United States Patent Application Publication US 2020/0377945 A1 - sequence listing, part 37

SEQ ID NO: 6957 - DNA, 67068 bp, Unknown
  gut microbiota DNA sequence
tactgtctgtcacattctcatgtgacgggtgcatctcttagatgctgttcttaaaaaatcttctcttaagaaattttcaaggttgttgtctattgtttaattatcaaggttcttcgctgttcttgttgataagaaatagctttgatattttatcacgccgttttccttttgtcaagaacttttttcattttctttttgctgtctgttccggaagtgtttcttcctcacaagtcagctttaataggttatcacatccgcatccttctgtcaagaacttttttcacgttgtccagcgatctgctctcgcatcctgtcccatcgcggccttgcggctttcgttctcttcttcggtctgtttcagcgacatgtgctatcttatcactgtgcaggtgaattgtcaatgatttttttattttttatttaattcagataattcagacaattcgcctgcatttttgaattcgagattgatccttatatctatttacagaaggtttatcgcatcactgatatttcctacccccagtagtttgattcctttgatttcttttaccatatccagacatactttgggaaggatacaggtctcaaatcccagttttttagcctctgccactcgctgttccggcatgctgactgcacgcacctctccgcttaatccaacttctccaaatacgatcatcttttcatcaatcgcccggttcttgtaactggaaaccagcgccatgatgattcccagatcaatcgccggttcattcattttaatccctccggcaatgttgacataggcatcataatttgacagcggcagtccaattcttttttccagtaccgccatcagaagatttacacgattataatccgttcctgctgccgttcttcttggcattccgaagttactctggcagaccagcgcctgaatctcgatcagaatcggacgtgttccttccatagagcatgccacaacagaaccagatgcattttccggctttccgctcagcatatattcggaggggttttccacttctaccagtccttctcttcgcatttcaaacacaccgatctcgttggtagaaccaaaacggttttttaccgcacgcagaatccgataggaagcatgtctgtctccctcaaaataaagtaccgtatccaccatatgttccagcactctcggacctgccacagtcccctcctttgtcacatgtccaacaataaagatcggaatccccatcccctttgccagctgcatcagcacatgggtagattctcttacctgcgaaacacttcccggcgctgaggatacttcttcattgtacatcgtttgaatcgaatcaatgatcacaagctccggattttgtctctcaatggctgtacgtatggtatccagatttgtttcacataacaacagcatatgatctgtaaaacttcccatacgatttgcacgcaatttgatctgagtctgcgactcctctcctgaaatatataaaatttttcttgatgccgacagcctctgacacacttgcaataacagggttgattttccaatccccgggtcccctccgaccagaacgagagaaccggagacgatacctcctccaagcacccgatccagttctttcatcccggtcagcatcctggtatcatccctggcactgatctgagaaagcggaactacttctgctgttttactctgctttgcagctgccgttgtcccgcggctcaatccggcactcactttttcttctgcgaatgtattccattctttacaaaccggacattgccccagccattttgcctcttcatgtccgcaattctgacagaaaaaaatacttttctttccttttgccatatactcctccataaaaaagagctgaacgctgttttcattcacagccccagctctctgctcttattgattataaaatgtcttctactcttgcaatcagcatttttctactttgacgtccacagcttccccttcgctgatctcaacactgacactcagctttccgctcagatttgtggtcatctttccggctgaaacaccatccagaagcacttcgtattcactctccggctcaagttccagtgtaaactgtacatcctccggtgcagaaatctgaaaagcgacctctgtatctgtgagtttaaagttctctaccgcacttcccggaacagattcgtatacaaacattccgtttttttctaattttgtgatctctgaaaatgtctttactttatataagtcgccctcaaattcgaaattatccagcttcgttttagacgccagtgtatagtctccaaaactcagtcttccgtcttcttctgtgcgtaataattcttttacgattgccattttccttgtcctcctaggtatttctgcatcccgccatcacttgcggcaagagctcttttcttctgtctgtattatataatatatcaaattctttttctacttaatttgcattctttaagtaaaattttatttcttttccggaaactcctgcctcaatctgttcgcccggtttcacttccccattcaggattgcttctgccagcttatcttccagctctgtctgcattgctcttctaagcggacgcgctccgtattttgtatctttgcctttttccgcaatccgttttttcgcagaatccctcagggtcaggctgatatccagctgtgtcttgactcgttttgtaaattcacggcacatcagactgacgatcttcttcaagtgctcttcacccagtgcatggaatacgataatctcatcgatccggttcaaaaattccggacggaagatcatcttcacttcgtccatcacattctgtttcattctcttgtaatcgtctgctttatcttcttttactgcaaacccgagttttttcggatctacgattgctttcgccccggcattggaggtcataatgatcactgtattactgaaatcaacaactcttccctgtgaatctgtaatacgaccgtcatccagcacctgcaacaggatgttaaatacatctggatgggctttttcgatttcatcgaataagattacagaatatggatgtgttcttactttgtcgctgagctgtccaccttcatcgtgtcccacgtatcccggaggagaaccgatcatctttgccacagaatgtttttccatatattcagacatatcgacccgaatcatagaatcttctcttccaaacaatgcctctgccagagccttggaaagctctgttttaccgacaccggtcggtccgaggaataagaaggaaccaatcggacgattcgggctctttaatcccacacgtccgcgcttcactgcccgcgtgactgcgctgactgcttcctcctgtccgattactcttttgtggagtgtctcttccagtttctgcaatctgtgtgcatctgtctcttttaatttctgtaccgggatcttcgtccagactgacacgacatccgcaatatcatctccgcttacctccggatgtgcggatgcctgttttttgtggaaacgttttctgagcatttccagttttgtctctgcctctttctctcttgcatgaaaatctgctgctgccttcatatcccctttgcggatgctcgcttctttttgttttgccagttctttcagctcatcttccatctgctgcagattgtccggtactttatatcctttcaggctggcctttgagcaagcctcatccagaacatcaattgctttgtccggaagatttctgtctgtgatgtattgctttgacaattctacagctgcctttagcgcctcttttgaaattgtcacccggtgatgtgactcataacgggattgtaatccctgtaaaatctccatacactgctctttcgaaggttcttctaccgtgatcggctggaatcttctctccagtgccgcatccttttcgatatatttgcgatactctgcaatggtcgttgcaccgatcagctgaatctctcctctggcaagtgaaggttttaaaatactggaagcatcaatggctccttctgcgcctcccgctccgatcatggtgtgaatctcatctaaaaataaaatgctgtttccatccgctttcacttccgaaatcagacttttcatgcgttcttcaaattctccgcggtatttggagcctgcaatcagcgcgggcagatccagagtcagaactctttttcccttcatcccttccggaacaacttctgccgcgatccgttctgcaagtccttctatcacagcggtctttccgactcccggttctccgatcagacaaggattgttcttggtgcgccggctcaaaatctgcatcagacgatagatctcatcctctctgccgatcaccggatccagttttccttctgctgcctcggcagtcagatctgtacagtactggtcaacggcgcctcttctggtacgtccgtcttcctgaatctcttcctgatattcttttgcatctacccctgccgcatttaatacatcctgcaggatcttctgcaaattgatgttcagggtgatcagcatcctggctgccacgcagtctgcatcatgcatgatcgccaaaagcaaatgctctgttccaacatctccggtgcgcagatgcagcgcctctttctttgcattttccagaatatactccagtctcggactttcttttggatcatcctgctgtaaaatctcttctcccggaacgatcagctcatccatcagatgcagaagctgctcttcgtccactccgtgggatgccagcacctggcctgccacacctgtgatctcgctgcgcagtcctaaaaggagatgctctgttccgatgtatggatgttttagttttctcgccatcctggctgcatattttatcgcatgttctgcctgtcttgtatattgattctgcatatactcctcctgctattcataattatcaaatatctcatccaccagttcatgcacttcttctctggtgatctccttacaatgtgcctttgccagcacgatctgaagctgtccgcgcatctcttccaaagcctgcagcttatctgcatccagagcgatcactgccccgtgtcttctgtccagctggataaatccctcctgctttaaaacagtatacgctttattcactgtgtgcatattgactcccacagtatctgccagctgccgtacagaaggcagggaatctccttctctgatcaccgaagtcgcaatgcccatgataatctgattgcgaagctgcatatagattgcctcttcgctgttaaaatcaactgttatcagcatactatcacctttcctcttttgttatagatatcgtagcacatctgagttccggccgcaagagaatttcttgtattaaaaaagcagagagcatccgccctctgcttctctcttctatactgcacgcagcatttccacaaattcgctgctcaattttactgctgccacatagaacacatctcccgtcatataggcttcccagtcatctcctatctctacttgaagctctccgcccggcatatgaacgatcactttgttagaggtcagtcccagtttgtacgcaacacctgctgccgcacatgctccggttccgtttgccatggtgtatccggctcctctttcgtaagtttcaattgcgatattgttcatatcaatgacattcatgagctctgtattgatatgattcgggaaataccttgcgcgctcggactctcttccgatcttacacaccagtggctctgaaatctcctgcatcgggatcacacaatgcggatttccgatggatacacaggttgccgggtacaatgtccgcccgaataccatatcctcattgataacctgtctgcgctctccgatcaccgggatttcatcactccagaatgacagtttccccatagaaaccttcagcctgcttccctcttcattcaggtaagtgatttctacctcgccgccatcggtcagcattgtataatgcttcttctgtacatatcctgcatctttcaaatatttggcaaaaatccgcacaccgtttccgctcttttcggcaatgcttccgttcggattccagatacggactgccatctgcttttcttccattaacggtccttccagaattccgtctgctccaagccccatattccggttacagagcattttcacattttcttcattcagctccagttcatttttatttggatcatagaccagataatcgtttcccaatccgtgataacgttctaatgtgatatccatttttttgcctcctcgatattgcttcctgatttgtctctgtttttattatatcccgcattttcttcaaatagaatagagaaaatgctttctatattgcaaataatgctctatactgaaagtatcttatttttcaggaggttattatgggcggatacaataagcgtggatacttaaacagtgactttaagatttttcatctgaccgatcagatttccacagaatttgaatttcattaccacgaattccacaaaatcacgatttttatttccggtaatgtgcaatactttgtagaaggaaagacatatcctttggaaccttacgacattgtcctcgtaaaccggaatgatatccacagggttcaggtggatccttctcttccctatgaacggatcatcgtctatatttctcccggttttattgatgcctaccggactgatgactatgatctttcctattgttttgaaaaagcaaaaaaagaacattccaatgtgctgcgcattcattctcttgaaaaaagctctcttttcaagatcacgaaccgcctggaacgttctttttctgatacggaatatgccggcagtctgtaccggcagatcttatttttggaatttatgatccacctcaaccgggctgccattaaaaaccgggtagaatttctggacaccagtctgtacaatccgaagatcgtcgatctgatccagtatatcaaccagcacctgacagaatctctggacgtagattttctctcttcccgggtttatctgagcaaatattatatgatgcgcctcttcaaagcggaaactggatataccatcggaaattatatcacctaccgcaggcttttgcttgcccgcactttgatcctggatgggatgccgatcacgcaggcctgccttgcaagcggctttcaggattactccacattttcacgagcctacaaaacagaatttcacgaaccacccagaacgcttttacatcactctgactgagatgtctcaaacagaatttccatccgtgttccttttccggtatcactctccacacttacctttgcattgtgaagcagcgctccatgcttcacgatggagagtcccagccctgtgccgccccgctctttggaatgacttttatccactctgtagaaccgctcaaagattcgctcctgatgctctttcggtatcccgatcccggtatcattcacctgaacttttgggccattcagtgtgctgcctacccagacagagacacttccgccctctacattatatttgatcgcattctcacaaatattgtagatcatctcatccaggatctgccggattcccacataggttaccggctctcctgaaagagaaacatgaacatgcttcatacttgcctgcatggacagtctgctgataatctctctgctcagttcgtaaagatctacttcttctttttcaatctctacggagccttcatccagtttggataattttatgatatcttcgatcaatgtgatcaggcgttttgcttctttgtaaatccgctctgaaaaattgggaatatcctccggacggaccagtccgtttttcatgatctccgcatagccggaaatcgaagtcagcggcgttttcaattcgtgagagacatttgcggaaaactcttttctcatatcttccactgccgctttttctttgttccgtctgtccatcgcagtcaacagcggccttaattcttcatagaccacattttccagcggatgctcaatatccagttcattgatcggacgaatcagccgttctgtctgccagcgcccgagaatccatgcaaatatcatcatcacaactgccagtaccccgatcaccggaagtgtatctcttgccatagctcccagattgtccatcgtctttgccacgcgaagtacagagccatcctgcagaaggatcgcataataatacatctcttttccaacggttccggatacgcggacatcctcaccggttccacttgcaagcgcctcttttacctccggacgtttgctgtgattttccagtgtttctgcgtcattgcctgaatcataaagcacctttccctccgtactgattctcgtgacccgggtttttatatccactccgtccatttctttcagatacgctggtcccgaaatatcgacagcagtccggatatacctggcctcctgattcacttcttcttttagcagcgtcaggttcttctgatacataaccagtgtcaaaagtccataaaaaatcaggatcgtcacaaacagaacaagaagcatacttctctggatcttagccttcattgcctcctcctattctgtagccgactccccgtacagtcttgataatatcgcctttttctcccagcttctgtctgagtgtccgcacatgcacatctaccgttcttgtctctccatcaaaatcatatccccagatatcctctaaaagctgatctcttgtcagtacaatattctggtttctcatcagtctctccaggagctcaaactccttcagtgtcagtgtcacgatttctcctgccactttcacttcatgctttttcacatctacactgactccgttgactgacagcatatcctgctcctgcactctgccggatcttcgaagaactgctttgatcctggataccagctccatcattccgaaaggcttggtcacataatcatccgctcccgaatccagaccgatcaccttgtcatactctgcaccctttgcagtcaccatgatcaccggaatatccttcgtctttgcggaattcttcagctttttcaaaagctccagcccatcctcacccggaagcatgatatcaagtaaaataagctctggcgtatcaaacgccaaagcttccataaatgccgtgccttctgcaaatccctttgccttaagaccggtcgtctccagagtgtaaatgaccagttcgcggatattgtcatcatcttccacgcaataaatcatatcttttctcctttttacacttatacattcactccgtttaggtgtactcctgtaatggaaaattccacccactctgcaatgttggtcgcatgatctccgatacgctccagatattttgtcaccatgatcagatccacgatccggctgccccgctgccctttattgatcgcgatataatttaccatctcttcccggatattgtcaaagaggcgatccactttatcatcttccagcattacctggcgcgcaagctccagatctttctgtacatacgatgtgacgctgtcgcgcaccatcttacttacaacagatgccattcttccgatatccttgatatctacgctttcctctgtattggctgaaattacgatttccgcaatatctgccgtctgatctccgattcgctccatatctgtgatcatcttcaatgctgctgagattcttctcagatcctttgccaccggctgctgctgtaagagcagtttcagacaaagcttttcaatatctttttccatctcatcgatctcagcatccgcattgatcactgcctttgcctgctcaatacttccatcgctcaacgcctttgtcgcattcgcgatcgcactctcacacaactcacccatatgaataagctgctcctccagtatctgtagctgtctgtcaaatttgttgcgcataaattaaccaaacctccctgtaatataatcttccgttctcttatcagacggaatggaaaacaatgtttctgtgttgttgtactcaatcacttctccaagaaggaaaaaggctgtgttatccgacacacgtaccgcctgctgcatgttgtgtgttaccatgacaatagtataatcttttttcagttccatcgcaaggtcttctatcttcgatgtagagatcggatccagagcggatgtcggctcatccatcaaaagtacttccggttctactgcaagtgctctggcaatacagagtctctgctgctgtcctccggacattcccaacgcactttttttgagacggtctttacactcatcccagattgccgcatttcgcagtgacttttctacaatatcatccagttttgctttggaacggattccgtgtgttctcggtccataggcaatattgtcataaatgctcattggaaatgggtttggtttctgaaacaccattcctacccgcttacggagcaggttcacatccattcctttgaagatattctgtccgtccagaaggatatcaccatcgatgcagcatccttccaccagatcattcatgcggttgatggactttaataacgtggactttccgcatccactcggtccgataaacgctgtaattttatttgcctctatttccagattgatatttttgagtgctttaaaatctccgtaatataaatccaggtttttcacactgatcttccccattgtttattcctttctctctacgcttttgtcagttttttcgcgattacgctcgaaatcgtgttgattccgactacaagtatcagaagaatgactgctgttgcatatgcctgatccatgtacagtccttcactggacagattgtacatatgaactgccagggttcttccggaaccaaaaacatttgtcggtacctgtgcaacagtacctgctgtatagatcagcgccgctgtctctcccacaattcttccaaccgccaggatgattcctgctaaaattccaggaattgccgacgggagtacaatcttaaatacggtacgcagctttcctgctcccagtccaaaacttccctctctgaaggaatccggaactgcttttaacgcttcttctgttgttctcatgatcagcggaaggatcatgatcgccagtgtaaacgcaccggccagcagggaaaatccccatcctaatgtattgacaaaaaacaacattccgaacaatccatatacgatggaagggattccggaaagtgtctctgttgtcagacggatcacttccacaaatttattccctttccctgcatactctacaaggaagatcgcagagaagattccaaacggaaccgcgatcagcaaagaaagcagcgtcatgataatcgtgttaatcaaagccggcatcaaagaggcattctcagatgtatattcgaacgcgaacaaagacggcttgatatgcggcactccgttgatcagaatataagcgatcaaaaacagcagaaccgcaaacgtgataattgctcccagcatcaccagaagcattacaataaatgagcccggatgttttaaatagcttttcagcttttctccgattccagtctgattactcatgttctgtcctccttttcagcattgctacactgaagttgatgatcaggatgaacacaaataatactacacctgtcgcgatcagcgcttccctgtgcagacctgtcgcatatcccatctccagtacgatatttcctgtcagtgtacgcattccctgcaggatattttgtgcaattctcggctgatttcccacgatcatgataactgccatggtctctccgatcgcacgtccgattcccagcacgattcctgccagtactccggattttgcagccgggatcacaactgtaaaaatacttctctcatgggttgctcccagagccagagctccttcataataatgggtcggcacagcgcggatcgcactctctgtggttccgatgattgttggcaagatcatcattcccagaatgatcgacgtagtgagaagtccttttccgtctcctgctttttccacgatccccatctgttttaatgttcttccgaactcccgtaccattggcaccagtacgaccagaccgaagaatccatacacaacggaaggaattcctgccaacagctctgttgctgctttcagcggtctgtatatttttttcgggcagtacattgccataaatacagatgtcagaattccgatcggcactccgaacacgatcgcacctgctgttacatataagcttccgatgatcatcgggaagattccaaacagattattgttcggtctccacagttctccggtaataaattttacgaacccgatttctctgattgcagggactccatttgcaaacaaaaagatacaaatgagagctaccgccagtacagaagtacaggcggctatcaagaatactccctgcatgaatttttcagtccatgcttttgatttcattcttctttcctcttatcaattattcagttacttcatcccaagtataagtttctcctgtgtagatggattttacctgatcagaacttaactcttctgtcgggttgtcattgtttacgatcactgcgattccgtcggttgcgatcacagttgcttttaatccctgtcccacttcttcctctttcagttcacgggatgccataccaatatcatagcttccttccagagtcgatgtcatacctgttgtagaatcagatgtctgcagctcgatctttgcattcggatttacacttttgtatgcctcgatcagtttttccataaccggtgatacagaagaagatcctcctactactgcgcttcctgacggttttgttccatcatatgcttttgtatcggcaaccggaatataaccgttgtctgctacgattttctgaccttctgtactcatgatataggtgatgaaatcatttgcaacttcattgtcagcgccttcttttactgcaatattaaacggtcttgatactttgtaagaaccattttcgatattctcttctgttgcttctgctccatcaatcttaagtgcttttacactctcatccagagatcccagggatacatatccgatggcatactcatcccctgctactgttgtaagcataacagatgtattatttgtaacctgtgcatccacagttgtcatatctactttttctccgtcaacttcctgctgaataccaaacagctctacgaaagctcctcttgttccagatccatcttctctggatacgattgtgatatcattggaagaatcccagtcactggacgcactttctgtctttgttcctttatcagcagatgtatcatctccggaaccacatcctgctgccagtgctgctaccatacctactgttgccaaaactgcgataaactttttcattttcattttacttaatctcctttttttcaaaagtgttttttcttttctccacagttagcaatgatacagaagaattgtaaaatatatcatcatctgaatgttaaatctatgtaaaatcatctttcttttccttgttaagtttttgtaaaatgtgaaaaaatcagcgcaaaaacggggcatttgccgcttttttgcaaatgccccgctctctttgttttgtaaaatcccctattctgccgtcaaaatctcttctgcgatatttctcgcatgatccgagattctctcaagacataccaatgcatccaggaatacgattccggattccgtgctgcactcatttcttgccagacgcttcatatgtgccgtacgcagcgcgatctccagctcatctgcctgactctctttttcaatgaccttcatcgccttttctttactacgctcttccagtgcctcgatcgcataccggaagcagtcgatacagacgtcttccatctgctggatctcttctcttgcgatctcggagaaggatgctttctgatctttgagattctctgcaaattcagaaatattttcacagtaatcgctgacacgctcgatatccgatacgatctgcaggatactcgccacctcctgatgctccttctcattgatggaaagtgtattcagtttaatcgcatactctgtgattcctttgcacaatccgtctgcgattgtctcttcctcccggatcttttctatctcctcacgcttcttggtgatcagcacatctcttgtacgattcatggttccccgcacaacatgtcccattcttaccatctcgctgactgtagactggagcgcaatacttggtgtctccagcattctgtcgtccagaagtacctgtccttcatccacatcgtcagaatcttctctctccagtttcttcgccagcttaatgatccagtcagataccgggaagagcaggatcgtagttccgatattaaaaattgtgtgaactgtactgatctctgtctgtgtgatcagggcttctccaaatcccggattgatcactttaaagaatacgatcgcaacaacgctgaagatgatcgtaccgatgatgttgaacaacagatgcatcacagctgctgtctttgctgtcttctttgccccgatactggacatgatggcagtcacacaggtaccgatattctgtcccatgataatgtaaacagccgcattaaacggaaccagtcctgctgccgcaagactctgtaagatccccactgatgcagatgaactctgaatcacagctgtaacaagcgcaccggccacgattccaaggaacggactgtgtccaagtgttacaaacagattgcagaatgcctctgactgctgcagcggctcgactgcatctgacatcgtcgtaataccgatgaataagataccaaatcccacaatgatactggaaatatcctttgtagaacgtctttttcctgtcagcatcacaatcacaccgatcataactgccaccggtgcaatattcgccgggctgagcgcttttgcccactcgacactggataccagccatccggtcaccgtagtaccgatgttggctcccatgatcactcccatcgcctgggtaagattcatgatccctgcatttacaaatccgactaccatcactgtcgtagcggatgaactctgaatgacagctgtaataaaagcaccgagcaaaaccccaaaaaacttattctttgtcagtacctccagcagactcttcatcttgctgcctgctgcattctccaatccctgggccatgatctgcataccatagataaacatacccagtcccccgataaaggggagaataatgctcacgtaatccatacgtttcctcctgtaataaaccctttataaaattttccgcactattacgataacattatactcgacaaaaaacaacaaaatctttacatttccttaacataaagacacagtgtctattttttcatcttcggttcaaagatatgagatgccagataaccgaaaattaatgctgctgaaattcccacagcactggctttaaaaccacccataaagattcccagaaacccatttttctcaacggcttctttgacaccgttccacagtacgtttccgaatccaaggagcggtacgctcgctcctgctcctgcaaatttctgaaatggtccgtaaatattcaaaaatccaagcactgcgccgccgcatacaagcagcaccatgattcttcccggcatcaacttggtccggtccatcaaaatctgtaccgccgcacagatcagacctcccacccagaatgcatgtacatattccatcttaatctcctccttttctcagcaatgttccagcacgatcccatgtgcaattcccggaacgcttgccccttcgttgtaactgaccgtagacatcagagcacccgtcggcacaaagagtacccgtttccactcgcctttctggatctttggaagaatgtaagcggaaagcgtcactgccgcacagccgcagccacttcctcccgcatgcgtatcctgtttctcctgatcaaagatcttcattccgcagtccaggtgtctgtcccgcatctgatgcccgttcttactcataaaatccagtaaaatactctgtccgatatacccgagatctcctgtaatgatccggtcatagctggtcgggcttcttccgaagtccttcagatttgttaaaatggtatctgctgctgccggtgccatacacgctcccatattctgggaatccttcagtccatagtccacaatcttcccaaccgtcacgcctgtgatcctcacatggcttttctgtctgcctaccagaaatgctccacttcccgtcaccgtccagctggcagataacggacgctgggatgcataccccaacggaaaccgaaattccttttccgcgcttccaaagtggctggaagtcactgccagcatatattccccatacccagctgccacgctcatagcagaaagagcaagtgcttctccggatgtggaacaggctccgtacaatccgaacatgggaatctgtaattcttccactcccatggaagtggcgattccctgacgcagaaggtctccgccatacagatagcgcacatgctttgcatccatatgtgcttttccaagtgccagtacacatgcttctttctgcatggtactctctgcctcctcccatgtttttgctccaaaaagatcatcctggttcaccatatcaaatagctttccaaggggaccttccgcctctttgcttcccgctacacaagcactgctgatcaaatagggagcttccccgaaactgatgctctgactgcctctgatctgattcatcttctctcctcttttcttcctgtttttgcaaattctttctgctgttagtatgcatctcaccagatgaaatatacatccgattgaaaatctttccggtgacagaatatttttccgtttttttcggatactatgaaataagaaaaaggaggcgatagttttgaagcagacagaaaaagaaaaacgacagcagcagtatgaagactatgtaaaaaagaaaacaccggtgcacaatgtttatctgaatatggcaaaatcctttatcacgggaggaattatctgtgtgatcggacaaggtatttataattattgtgaaatgatcggactgagcaaagaccactgcagcaactggacttctctttcactgatcttactgagtatcatcctcaccggagttggactctatccaaagatcgcaaaatggggaggagctggtgcattggttcccatcaccggctttgccaactcggtggcagctccggcgatcgagtataaaaaagaagggcaggtattcgggattggctgcaagatctttaccatatccggacctgtcattctctatggaatctgcaccagttctcttctgggacttttatactggatctggatgcagttttaaaagaagaggtgagactccttatccggaatctcacctccccttttataccttgcttcgtttccgcatcggacggatcgcccgttttgatacttctacatataattctttttgcagcacttcacgaagccagtttctttttaattgtcttccaataaaaatagcttttgcttccggcatcgtatcaataccggtaacgctgtatgtacgatctgtcacatcaaagcgaagccatccatttcccgccggaagatacccttttgctctgcagatatctccaaacacaccggaaactactccctgcaaaaacaggatcagctcctgctccgattgcaggctggcttccgtcagtccaagattttccagatctaactcccgctcttccttcattggaatctctttgtcaagatacgatgtcagcagtgaagcccaccagtcatctccctgttctgtataatgagaaacacagatctcagcttccggattgagcgctatcagcttctgtttcaaactgcaccgttcattctctgcagcatattccatcttggaaaccagaatcctgcctgcagactgtatctgatcctcgcagatctctgaaaattcaaacatacaacgatcatacatcgtaccgtccagaatcgtgagcggctcaagcagagtgatcctctcatattcaatcttctggatattctctatgatcttactgagcatccccacaccggtcggttctacgatcagatattccggatccactgtatttgcaatggtcaggatagacgtggcaaagtcgttctgcatggaacagcagatacatccctctgtcagctcccagatatttaagtcattcgtctgttccagaagatctccgtccacattgaccgccccgtattcattttccatcactgcaaaatcttttttggtacgttctgcaagtgtccggataaatgtcgtctttcctgctcctaaaaatccggataccactaaaatcttcatctctcatgccatccttattagtctgaaatctttacaaccggtttgatcagatccgccggtttatcacgcatcataaacagtgcctcttccagatgatcccatccttcaaatacatgcgaagccagagggtgtacatccagtttgccagctgctaccagagcgcccagtttttccatgcgcagacgtccgccaggcatcagacctccgttgatctgcttgtgacccataccaacgccccattccacacgtggaacagtcacataagtaccgcttccgagatagttgacatttccgatctttccgcccggtttcagacattttaccgctgattcaaaggtctcacatccgccgcctgcgatcacaactttgtctactccttttccatctgtcatggcaagcacctgctcttcgatcgttccattcttatagcttacaaaatcagttgccccgtacaactttgctgcttccacgcagtttttgcgggttccgactgcaataattctggaagcacctctgagtgctgttccggctactgacatcaatcctaccgggccgatcccgatcacaagaacggtatctccaaactgtacatcggcaagctcaactccgtgaaatcctgtggggaccatatcagagagcatacatgcatccactgtggaaatattcgatggaagcagtgccagattgccatccgcatcatttacatggaagaattcagagaacacaccgtctttaaagttcgagaacttccatcctgccagcattccgccggaatgcatcgaatatcctgcctgtgcctccagcgaattccaatccggtgtgatcgccggaacaagtacacgatctcccggtttaaaatcctttaccaactctccgacttctacaacctctgcacagcactcatgtcccaggatcatattgtgacgctccccaatcgcgccttcccagagagtgtgtacatccgaagtacagattgcgactgcaagcgggcggcagatcgcatccaacggaccacatacaggtctctctttttcaatccatcctgattccccaattttcagcattgcataacctttcataaattagtaaactcctttcaaatccgtatttttctccatgttactataggatttgtatattttcaactaatttattgttaattttttattaattttattaacttctatcattgcaaaaatccaatacatgctccaaagccttttccaagtgcaatcccgatgataaaccacttgatatagcgtaccagcttgactctcctgataaaaatcggaaatacattcaggatttctgccaatgccattgcccagcatcctacaaatatgccggacagcacaccgaaaaagggaagaataaagcctgcacaaggaatcatgatctgaaaacaaaacacggcatttcctaaaatcccgccaagggcgatagaatcctcatacagcaaaagactttctgccgtatgtgtccggtcagccaggtctgccactactccaagttctacgataaatgcaaataatccgcctgccactgcaactccggagctaagtcctatgagccccaggacgatttgctctgtccacatccagttcttcctcctttcgtgcagcatcctcgatcaatgttgtctggatgtcattttcatacagacgcatctgcacctccatcggcgtcggatccacagaaaaccgcctctttccaaaatgattgaagaataccagaatcccgatcgtaattcctacagaataggagacctccagtattgtaaagccgctgctttgttttcctgtcatccagtaatagatatatccaaacagcttatccacatccacatcattgttaaatgccatcatggaaaacgccgctccaaaaaatgtgatcagtactaccaggatcgtttttgccacatgcacccatttcgacggtgttttctgcatttcatatgtgacgatcaaatccgtttctcccagattctgcacttccagtcccggatatttctcatggatacacgcaataatctttaaaatggagatcacataccgcttttctccattttccggaattttcaagaccttcattgtcttcaaatgcggcaggataacgcggttactgcattccatagaaaccagatctccaagtgtcacttcccgctttgtcacttctacatttctgtctccttttacatacagcgtatcctgattaacagccatgggatatctcctccaccttccggatcaggtagccttttgtctgctgtgccggcgacatatttgtcttcacatagtaaattactccgatcgctactgctgccactaccaggattgtcagacaccacattatttttcgttttccattttccactttgatcatcctcctacttttattctgaccttagtatctgacatccatgaaaaaatataccctttacaatgcgatttctcagtgcgtcatctctcttaaattttgaatgattttcttttccattctggacacctgaacctgggaaattcccatttcttttcccactgccgactgtgttttttccgcaaaataccgcagatagatcaaggttctttcctgtccgtctaatttttccaacaactgcccaagcagcattcgatccagaattttctcttcccggtgttctttttcttccaacttgtccagaagcgaaatctcacttccttctttttgatggatcggacgatacagagattcaacctctcctgaggcttccattgcctgcaccagttcttctttttctactcccatctcctgtgacagttcttccagcgtcggctctcttcccagtccgtctgtcatcttctctctcgtctgaaagatccgataagagagttccttgagtgaacggctgactttgatcattccgtcatctcttaaaaagcgcttgatttctcctgatatcataggaacggcataggttgaaaatttcacgtcataggacagatcaaatttgtcgattgccttgataagcccgatactccctatctgaaaaagatcttctgcctcgattccccgtccataaaaccgttttacaacacaccagatcagcccgatattttcttccaccagttgttctctcgcttctttatctccattgtgtgatttttcgatcaaagcgattgtgtgatccatgtctccctttctttcccaatgctctttttcatgataactctggttccttctccgggttctgagattacatgtacgttatccataaacgcttccataaaagaaaatcccatcccggaacgttccagctccggtttgcttgtatacatcggagtcattgcctgtttgatattttcaattccctttcctgtatctctgacttctaccatcagttcttttcctctgacactgcatcggatagagaccttacaaatctgattatcatatccgtgaatgatcgcatttgtcacagcttctgacactgctgttttgacatctgaaacttcttccaccgtcggatttaactgtgtcataaacgctgctactgctactcttgcaaatccttcattttctgaacggctgtcaaataaaatttccatttcattggtatccttcatacctgttcctcctcatatatttgcatgattttcgtgactcccgacatggtcaggatctttcttatcctggcattggcatggactgcccacacctctcctccgatcagacagatcattcggtatctccccatgatcacgccgattcccgaactatccataaaatctgtctgttcaaagtcaaaaatgacatatttgatatgctctttttctatgatcgcatctgcactctttttcacttcctctgcattgtgatgatccacctcttttggaagaaaaatcgtcagacaattttcctgtacctgatattccatactcattgtctcaaatcccctttcgcccgttcgaacatgcacgtaaaagcgcacctaaaaaggatatgcttttttgcatatccttctctttcgtagctttttcaaccatcttattcctgcgtatcatctgccgttttggtatcgtctgcagtggtatcacccattgagttcaaattacttttggctgtcgcctcattttctgttcccgggaacagctccgccacacgattaaaataagtctttgcattctcattgtcaccgcttctcatataagcgatcccgagatttaacagggcagctccactgtcatactgctcatccatccgcactacttttcccagtgcatcaatcgccgtctcataatttgcaacattgagtgctgccattccattctgatattttgtctcacaggctcccggaaaaatctctgttgagagctcatcatagagtgcctgtccgctctgtcccagtgcatcccggttcacgttcagaagcgtatctgccagcgtcgcatctgaatactctccgctctcatactggctggataccgtcatcagattctcataactctccgatgtgctggccgcgctctgcgcctgcgcttctttgtccgaatcctgtgcccggtactcatccaatgtctttgtctgtgcactgacctgtgcttccagtgcattgatcctgttgctgtattctacaacctgcttattctgctttgccaccttcgcttcatctacagaaggaacgatcagaaaccagacgattgcggctccgatcagtaccccggcaaaaatattgcctgccgttactttccctgaaatctgtctgactctttttccgtgtgccggctgaatgatcgtctcattgcccagcttgtactccacactctcttctctggattttttcgttgtcttctgcccgccgatcagcgacaattcatgcatatagcgcagcgtaatgtcattcgtcgtatccagttttcttgccgtttttaaaatctgccgcgcctttgtatactgtgcagtatgaagatacaaaagtgcaagaagctgatacgctttcaaaaatgtcgggtgtgctgcgatcacttttttcagctggatgatcgccagatcttctccctgctgttcacaataaatcagacactggttatacttcttgactgcctgattgatctgctccagtttttttgctgatttctggacttcatcaataaaacgatccgccaggttgtccttaggctttaaattcttactgatgatccactccacaaggccctctgctacttctcccctgccataatacacgagacccaaaagatttctggcatcaatattcgccctgttgtactgcagacttttccgaagagaggtaatcgcaccggacatatccctgatctgcgccttcctcagcccatcattgtaccagtagtttgactggtgcaggattttctccgtatagttcatctatttcaccataatcctttactttgtcttctggtccatgacctgtttcaaaagatctgtcatatctgatagatcttcctgataaaccgcgtcttcgatttcttctacctccagactcggtttgaaatttttgagttctttttcatagtccagcatcaccctgcctcctctgttatcgcttttatcattcctgtcagataaagagatccgaggcaatacaccgcctttcctgcctttcgggagaatagatatgtaagtgcctggtgcagttcttcttttaccacaacaggtttatctgtatatttctgaaatatctgctttagttcttctgtctgtgcagcccgcttatcttcgatcagagtgatcacatattcgctgacgctcttctcctgacagagaatccggatcatctcttcgtaatttttctctctgacagcagaaaataacacgaccttttctcgtctgtctctttggatactctgcacaaacatccttaccgcactcacattgtgagcgccgtctacataaaaatccggcagaatctcttccattctgccttcccacttcacctgcgaaagtgcctctctccatccagagacatctccctgctctccgaagatcatacgcatggcctccatggcaagcatggcattttccggctgatacatggcagtgttctgcaatttccatgtagtatctccataatacgcatttgacggagaaaatgcaagagttccgtcctgaattttcagaatttcgtacgcacttttccctatttttttacaaggacagccaagctctcctgcccgctcttcaataacccgactgctctcctgctgtgtatctgcaaatatgacaggaacatgcggctttaagattcctgccttttctgccgcaatctcttccagcgtatttcccagaatctcggtatgatccagtccgatcgatgtgaggatacaggtaagcggaccgctgatagaatttgtcgcatccagccgtccgcccagtcctgtttccagtattacatattccacgcctgcttcctcaaagcctgccatcgccatcccgaacagaaattcaaaaaagctcggatgaggaaggccttcggcctccattctccttacgctctgttgtgtccgtaaaaacagacgggtaaatgtctcgtctgaaaccggttctccatccatccggatgcgttcattcatccggatcagatgcggagatgtgaaaagccctgtgtgctttctctgggcccgaagcatcgcatccagatacacgcagaccgaaccttttccgttcgtgcctgctacatggatgaccttttttccattctgtggattgccgagaaaagaaagaaacttctgcgtgtgctccagtgtatttttcttcgtaaatttcggcaattccgaaatatacgtttctgcttcctgataagtcactctactcatctttactttccttctttacatctttgtcctgattgacaaatgcatttcgtcctgtttccaccttatcctccgcatccggaagtttggtgagtttttcatccttatattcgtattgtgccgattccctgaaaatagtctcactggaaccaacctgattgacctggatcacatcaccgtcttttagctccacatcttttaaatccagacgggtattgttcaaaaaggtgctggtttgtttctctccgttgacatagaccttactctgtttcgtaaagttctctccatacagactgtaacttccatccaactgctcgatcacactatccagtgtcacatcactgactcccatcaccatatgtccttctttgatcggagagccatatttatcataggcgtattgctttccgtaaagaagatcgtactgaagcagttccagatctgcctgataatttttcgtctgacgtctctgctggtgatagttgaatacagttccggaatgaatatccagacggtcaaacacttctgccatgatctgatatgctgccagattcttatcttcctgttttaatccgatattatcccagatcacataatttgtattatacaaatatttgctctttaaatcctttgcctccagtcccatcgtcggaagatggtctccgtagaatacaagtacggtcggttctccgcgctcttcaatctgacgcaccagatttcctgcaaattcatccatctcatgcaccatattgacatagtattcccatgcgtttttcttgccctcatcctccggtccggttactacgatcttcggattttcaatcactttctccgtcggatactctccgtgtccctgaacactgactgtaaagacaaaatcctgcccttctgtggtattcatagactggtcaaggtattttaaaagtacgtcatccgttgcccatccatttggcgtagtctgcaaaatattcataaactctttgctggtataatggtcaaatcccatatggttatatacctgtgcacggctgtagaaatttccaccgttattgtgcagtgcctctgtaccatatccaagtgcactcagtgcagatgctgcactctccacatattttgtcttggcatacgtcttatacggatactctcccggtccgaaaaaacgcatactcattccggtcagcacttcaaattccgtatttgccgtacctgctcctaccgacggtgccttaaaatatccgcttgaataattttgaaacatcttccgcagattcggaatcggatcctcggaaaactgcagccactccacttctgtcggatcaaaaaaggattccagctgtacgaacatgatattcggcatctctccttcttctaatccggtactgctcttggaaaactctccgccatctgtgatctcatccattgtctctttactgtatccagaaggctctgaaattcctgtattaaagacactggcagcaaaacagtacgggaatccgtaatcttcatatgcaaatgcaatattgccaaagtaattggaaacaacccttttgtcaatcgcaatatttgtcagtccgatataggctccgatagaaatcacaactccgaaaagagcccacacacgatgcatctttcctgtgtactgaccgcctcttctccacatggagatcacccacaggatcacggccacgatacctacgccaaggagaacaaactccattgccgaaaaataattcttcgacactgccagaccttctgaccatgctttcagatcctgtgcattgaacggcgtaacccttttaagcagcatatatccattgcaaactccaagcgccagccagaaaacactgagcaggatccgtgcaaacacacgtctcctgaccagatatacaatagaaaatgtggcaaagatcaaaaaggcgttgaagaaaaacaccttcggtgtccctaccagatagtcccatgcctcaaacagggaatgcctggatatgatctcgatgatgaagtttaagacacatgccaacaggtaatgaagtactaatgaaagtcgattcatcatcctgtacaccggctgcattttacgtgcgaattttccattgcgacgcttttccagaatctgtctgcgccgctcttttctttccttaaaatgctctttgatatcctgcatctttaaatttcgtattttctggaaaaagccttttatatcaggtttcttcatatgaatatgtttcattgataacctcacttattttttcagtccggccattctctcctgtacctgctgaagcatctgtgtatatttttcgagcttttcacgctcttcctgcacttttgcctccggtgctttgctgataaaacgctcattggagagcatgccctctgctcgtttgatttcttttttcagtttctcctcttctttttgcaggcgttccatctcctgctcaaaatctaccaggtcttccaatggcagatatacgactgcatccggtaccacaacagaaacggcattatctgcgatattctctttcgtctgctgtaccagaatcttttctgccatcatcagcggcttgatggaattctccagtgtgctgattccgtcacagatttcagtatcctcacacacgacatatacttttgtcttgcggttgttcggaacattcatctctgcgcgcatattgcggataccacgtgtgatctcttttacatgttccatcacattttcttctgccgggaaatcccactccgcatgaaactgtggccactcggacatcatcagcgattcttcttccggtaccagtacgctgtaaatctcctctgtgataaacggcataaacggatgaagtaatttcaacgcctgtttcaatactgttttcaatacccagagtacacagtctgcagccgctttttcttcctctttgtggtagattctgtattttgcagtctctacataccagtcacagaattcatcccagataaagtcatatactttctgaactgcgattccaagttcgaatttatccatgttctctgtcacatcttttgccagtctgttgactctggataagatccacttatctgcctcgtttaacaaagacgcatccggttctgcaactacattttcttccatgttcatcatgataaatctggatgcattccatactttgtttgcaaagttacggcttgactctactctctcatgataaaaacgcatatcatttcccggtgcatttcctgtcacaagagtcagacgcagtgcatcgcatccatactggtcgatgacctccagcggatcgattccattgccaagtgacttgctcatcttgcgtccctgagaatctcttaccagaccgtggatcagtactgtatggaacggagatttacctgtatgctcatatcctgagaataccatacggattacccagaagaagatgatgtcatatcctgttacaagaacatccgtcggatagaaataatccagatcttctgtcttgtccggccatccaagtgtggagaacggccacagtgcagaactgaaccatgtatccagtgtatcctcatcctgtgtaaagtgtgtgcagccacagtgcggacatgtttccggcatctctcttgccacaacaaaatctccacattcatcacagtagtatgcagggattctgtgtccccaccagatctgtctggaaatacaccagtctttgatattctccagccagtgtaaataaatcttgttaaaacgctccggcacaaatttcagttctcccgtcttaagtgcctcgattgcaggtttcgccagctcttccatctttacaaaccactgctgtttgatcaacggctctactgtcgttccgcagcggtcgtgagttcctacattatgagagtgcggctcgatttctaccagatatccctgctcttttaaatcttcaacaatggcttttctcgcttcgtagcgatccattcctgcatattttccgcctttttcgttgatggtcgcatcatcattcataatgttgatctcttccagattgtgacgctttccaacctcgaagtcattcgggtcatgagccggtgtgatctttactgcaccggttccaaactctttatctacatagtaatccgccacgaccggaatctctttattcaccagcggaagcaatacattcttgcctacgatatctttgtatctctcatcgtccgggtgtacggcaatggctgtatctcccagcattgtctccggacgtgttgttgcgatctccagaaaacgatctgttcctacgatcggatatttgatgtgccagaagttgcctgcctgctcctcatgctctacctctgcatcagaaagagaggtcttacatttcggacaccagttgatgattctggaacctttgtaaatataccctttttcgtataatttaataaatacttcttctactgccttggaacacccctcatccattgtaaaacgctctctgtcccagtcacaggaaattcccagcttcttcagctgattttcaatcgttcccgcatactcttctttccactgccaggttctctcaaggaatccttctcttcccagttctttcttatcaattccttcttccttcagctgattggtaaccttcacctctgtggagattgccgcatgatcagttcccggaatccagagtgcattgtatccctgcattctcttatagcgaatcagaatatcctgcaatgtattgtccagcgcatgtcccatatgcagctttcctgtaatattcggaggaggcatcaccgttgtgaacggttttctgcttctgtccacctccgcatgaaaatacttgttctcacaccatctttcatacaatttttcctcgatcgcttttggatcataggtctttgccagttctttactcataatttcctcctcaaaatgtccctgttctgttccttcccgctcgtcattctctcaataacaaaaaaacaccctccacatcagaaatgcaaagggcgaatgttccgcggtaccaccttcattatatgcgtacgcatatatcttcttgagtcctgtaacgtgaacaactccgggataccctacttcctgttcagatatccggttcagaagctaccttccacagtcctttcttgaaatcgcctttcagccccggacgattctctctgccaagagtaattgtgtactcctctccctcataaccttttattttaactaattgttaactgtatattaactaccagataatcatatctttcgatattccatttgtcaaggaatttcaaaaatcttaagatatttcatagaatttacacagtttttgtatcctgcccgcttttacgaatttttaccttttagatgagagatcatctccacgatcgaatatccgtaattttctgcggtcgcccatcccgccccttgcgggttttccttctgaccaagccactgcacatacggagccgagcctttctgcacatattcataccggtcatccacacattcctgtgccagaggatctgctgtcgcataggccttcaaatgctggatctgcgcccgcaccccggtccgcacatcgggataagaattgcccggcacaccaccgcctgttgtcccaagtcccgcaaaattaaactgttcgatcgaagcatcccctccatactggagaaatccagtctctttcatagtctgtacaaatgcgacctccggtctcacaccctctgcctgcgcttcctctacataaatcctgcaaaatgtttcgatactgtccgccccgcccttagccaggctttccgccggatatgcttttccactggattgaaaataagaaaccatctgctctgtagtcacactgctttgtcccatgattgggtactgcccgtcggcaatcacatcctccgtctgcgtttcttgcttcttttctgcgttctcctgctcttgctcctccactttgttcgcttctgcctttgcccgtacagactccacttctgaagactttgcaataccggatcttcccgccgtaattcctgcaacacccagaacagcaattaaaacaaaggcagttgccgcctccgcaaaaaatgtattccgttttcctttcagccatttccagatttcttccagattcataaaccttcacacctcatacatatccattcaaacatcttcctattataaagatagatttttttgttttaccagtatattttactttctcttatagtctatgtccattgacaaaaagacatgcataaacaaaaaactgaggaagtgttccgctttttacagaaccttccccagtcatcatatctagaaatctatattgcccgaatccgtacaattataatttctactctactacaacacccttctgcagcattacatttgcgtaaattgcagattctcctgttgcaatgatcgcatatgctgtttttgcttcatcatagaatgcaaatctttcaatatttccgattgcagcttctccgcggtcatcgtgttttttcacgatctctttgtatgtatcccagatcggtgtctctactttgcccacatcatccggcatcagctgcatcaggtttaccggattttctacgtacgtatccagtgggaatacctgaaggatcgcatccaggatctccggtacaccatgtccgtcacaacggatcacaatcgcatcttttcccatagattctgatggaaagtttccgtccgcaataacaatgcgatcactatgccccatttcacataaaacttttaataattctggtgataagatttttggaattccttttaacatattgatttcctccacaaacattctgtaattttatataaggagcacccgagggtactccttgttatttgactgttcttatttgtataatggaccgtatgctgcacaagctctgtaatcagcaccttctttgtccataccaaatgcgttccaagctgctggtctgaagatatcttcttccggtacattgtgcatgcaaaccgggattctcagcatagatgccattgtgatcagatcagcaccgacatgtccgtaagaaattgcaccgtggttagctccccagttgttcattacatcgtaagctgtcttgaatgcaccttttcctgtacatcttggtgcaaaccatgtacatggccatgtgtaatctgttctcttccaaagtttgtcagaaacttcgtctggaaggttcagagtccatccttctgcgatctgaagaaccggtccaagtccttttacaaggttcagacggatcatagttgccggcatctcagcctgtgtcaggaaacgagaagagaatccgcctccacggaagtatccgttgtcagctgcattccatgttgttgctttgagcattgcatcctgatcttcttctgttacatcataccaggctttcattacattgtttccgtctgcatctttggattctccgtttgcatccagacatgcagctcctgagttgatcaggtgaatgaaaccatccgcttcttttgcttttccttcgatctcatatcctgttactctcttcacagcgtctccgctccagtatgtacgaacatcagcgaaaatctgagctttgtttgtcaaaagtttcatgaacagcattccaagaccattcaatacgtcgttctctgttgccagaacgtatggctctcttgctccgttccagtcgaaggaactgttcaggattgcttctgcaaagtctccgtttggatagaagtctgtccactgtctctgtccctggaatccggctgcgatcgcattgtgtccaactgcttcttcttcgcatccttccggaaggtttttatttccattcatcaagtctttgatgataactgccatcttaacaacgaattcgaactgctctgctttcttttcttcgctcatcttcagttcgtcagggttcttatcgaatccgatgatacatttttcttttgcccatgcaagagctttctggaattctgcttcatcgtagattccctctgtcatacgacggatgatctctacctcgtctacagactcaactctcataccaaggtatgactcgatgaaatcagaatcgatgatagatccgccgattcccatacagatagatccgatctggaggtaagattttcctctcatggatgctgctgcaactgccgcacgtccgaatcttaacagtttttctttgatatcgtcgccgatttcagaatcatctgcatctacaacgtcatgtccgtagattccaaatgcaggaagacctttctgtgcatgtgtagccagaacggatgccagatatacagctcccggtctctctgttgcattcagtccccatacacctttgatcgtcataggatccatatccattgtctctgatccgtagcaccagcatggtgtcactgtcagtgtaatgtcaacgccttcttttttgaatttttcagcacatgctgcagattctgcaacacgtccgattgttgtgtcagcgattactacttttactggttctccattggaatatcttaaattctcttcaaacaatttttttgcagcttttgccattcccattgtctgatcttccagagattcacgaacttttaatgctcctcttcttccgtcaattgttggtctgataccaattacaggatatcctccgattaatcttgattctgccataatgacattcctccttgaaaattattgaataaatgttttaaatttttcatatgcagcatcccatttttccgcatcctgcgggagatactcatatgtagtttctgaatttgcaataatctgtcttgcctctgccacatctttaatctctccaagtgacatcagctgaacagcaatgtttccaagagctgttgcctctaccggtcctgcaatgactttacgtccgcttgctccggctgtcatctgacaaagcagtttgctctggattcctcctccgatcatattgatcacggaataatgtttgtctgtgcagctttcaatctgctccagtgcatatctgtatttcagagccagactctggttgatacagcacatgatctcaccaatcgtctccggtactttctgtccggttctgcggcagaactcacgaatacgctccggtacatttcctgccggaacgaactccggtgcatccggatcgataaagctctggaacggttctgctttctgtgccatctgctccagctctccgaatgaatattcctgcccttcacgaatccactgtcttctgctctcctgagcaagccacagtccgataatattcttcaacaatgtcgttgtattgccatatccgccttcgttgctgacgttgcactccagtgacttctcaccgatgattggtccgtcgagttctgtaccgaaaagactccatgttccgcagctgataaagatgaaatctttctcctgcgtcggaacagaaacaaccgcactctgtgtatcatgtcctgtgattgcaatgactttcgcaggctctacaccaagttcttcacagattgatggctgaagtgtacctacaactgtaccgctcggaacgatctccggaagaatcttcttcggaatctgaagtgcctctaaaatccggtcagaccagactttgttctttgcatccatcagctgtgtggtcgttgccatggtatactctgctttcttttcaccggtcaggaaataattaaataaatccggtgtcaaaagcagcgtatctgctttttccagaatccatggtctcttctgaaccagagagtacaactggaaaatagtattaaagttttcaaactgatttcctgttaaattgtagacttcctcctttggaatgactttaaaaacttcttcctgcattccaagagttctgtcatctctataatgtacggcactctcaagcagatcgccatgctcgtccaaaagtccgaaatcaacgccccatgtgtcaattccgatactctcaaagccgcctttttgttttgcttttacaatgccttgtttaatctcaaaaaaatgtctcagtgtgtcccaatacatggttccgtttacgattaccggatcattggaaaaacgatgaacttcttccatatggattttcccgttttccagagttcccagaatcgcacgtccgcttccgcctccgaaatcaaacgccagaacttgctttttcttatcgctcactgatatgcctcctttcaaaggttcttaaccattactgattttattttagcattgtgtgcttctttttacttgtgctataatagtaaaaaatataacaatattcacctaggagtatcttatgcaatatatcaactacagagaaaacagaagaagaggaactgctgactttcccctggaatattatcacgtcactgcttcccatccgcagtatgtcatgtcctttcactggcatgtagaatttgagctgatccgcatcctaagtggatctctgactgttaccattgatgaaattgaatttcttgcagaagcaggagacagtattttcatcccagccggttcgatccattccggtattcccgatgattgcgtatacgaatgtctggtgttcgatatgaatatgctgatgaacaagacggattcctgctgtcgttttcttcgccagatcacagatcatgaggtttccgttcagacgcactatccgaaaatctgcaatacgatccaccgcacactctggacactttttgatgcggcagcctccaaaaaagaggggtatcagcttgtagttttcggcgccatgtatcagtttttcggcactctcttcagtgaaggtttctgtaaaaacgcaccggatgaggaacaccgaagccacaaaaggattttgcagctgaagcaggcactggaatttatggaatcttcctataatcttcctcttacattggaagaaatttctggaagtgtaaatatgtcgcccaaatatttctgccgcttttttcacgagatgacgcatcggacaccgattgattacctcaattactatcgtattgaacgcgcctgttaccagttgatcacaacgaatctgtcgatcacagaaattgcctacgcctccggattcaatgatctgagttatttcatcaaaacattcaaaaaatacaaaggaaccactccaaaaaaatatcttaaaatatgaaaatataccactttcttatattacaaaaagttccccgcagaataagcctctctcacttacctgcggggaatccccgtaatcgtctgaaaacactcttattttacatacctgaattgaaaccctcagaataactcgatgttcaccatgctgctctggcgaaactctttttaaaaaataccaaaaatcttttccctgaatgatccgtacaatgtatcataatctgtatactgaatctgactctctttaaaccgttttccccatgcactgcagatgctgtcagcgatcagcttcgcatactcgtgctcagtccccaaaattgtaggaaaaacataatagatcataaagaaattcagatccacctgtgttctggaatcaatttttccttttttcgaagcaaacttcttctctacacgatttatcagtgtatctgcaatttcttctgctgcccgctttttatcggaaatactgtccacatattctgtcatttcccggaaataatgtccgtaggaatcgataaaatcctgtgtatttttttcaaatgattttttctttaaatgccgaagcatttgggttgtattatcaaaaatagtttctattccattgagcatatgtgtgttcctcctgagtgtttgtctttcataaaaagaaaccgggaaaacccccggtttctccttagatatcactttttactgtttgatcagcaaaagattagtcgtaaaggtttggtgcgatttctgcatcttccattgtttctgcatcgtaccagtagcaagctgtctctacgtcttttacttcttttccttcgcagatgtcattcagagtctcaatagcgattcttccctgatctactggagcctgtgttacagatccaagtaatgttccgtcttttacagctgctttctgtgttgaaccagcatcaaatcctacaccaaggatctttccatctcctgctccaagtacatccaggttctggtttgctgtcagaagaccttctgctgttacctggttagaaccgaacatagcgattgtatcttttttgttcatgatgttagaagcttctgtagcagacagttctactgttgtctgtgcaggtacagctacttcgatgatgatatcagcatcagcttcttttgcattgttctcaacaaggtttacatagtattcatttccaactactgcaactttctttccgtcagcttcagcaagttctttaaatttattgatgaatcccataccacgtcctgtgatgtttccggatgtagcatcctggtttacttcaccaattcttacagcatcttttgcgtttgcaagctgatctttcagagcttcgtacattttttctgctgcaattccaccagcttcttcgttgttagtaacaactgttgcatatacagatccttccggagcatctgctacacctgtatcgaagcaaactacagggattttcttatccagcgcattctgcagagatttcagaacagaactctggtcacaagctgccagtgcgattccgtccggagctttattgatcgcattgttcagcatgtttacctggtcagcgatatcagactcagcgtttggtcctgttgtgttacattttacaccaagctcttttgctgctgtatcgataccctgtttcgctgcctgccagtatgtagactggaagctctttacaacaacttcgaagttatatccgccgctctttccagaatccttgcttccatcatcagatgtcttagcgtcgtctcctccgccgccacatcctgctaacaatcctgctaccatacatccgccaagtaacactgctaaaactttctttttcatagttcttatcctcctaagatatgttttctgactgcaagccgaggtgcagcctcctcttttctatagtaacagccgggggaatccctagattcccgacgccggtctgctatctatcttttcaatctgacacaaattaagctgcttctttctttctcttgaagatatcaatcaatacagctgcgatcaatacaaaacctgtgatgatctgctgccagtttgctgtcagtccgatgaaaggaagtcctgtctttaacagacagattacgaatacacctgcaagtgtaccagtgatgcttcccacaccacctgtcatggatacgccaccgatgattgctccaccgatcgcctccagctcaaatcctgctccactacccggctgaactgttgcaaagattgcagagtaggaaattgctgccagtcctgcaaagaatccacagatcacatatgccatgatgtggtaaaatttaacattaactcctgagagtcttgttgcctctttgttacttccgattgccagtgtgtaacgtccgattcttgtatggttcaatacgaatgtcataaggattacaagtaagatgatccataaaaatccgattggaatgttcataccatctgttttaatcttaaagatatttctgaaccatccttccggtgatcctgctaccggccaaggaataccaaatccgcctactacgattgtaccaatacctctggcgatcatcgatgtacataaggttgccaggaaagccggaagatccatgatcgctaccagaacaccattgagtacaccaattgcaacacccattaaaatacttaccagcatacccgctgctgtcggccatccctgatgtacgatcaggtatccgcctaccagtgaataacagatcagtcctgtaccgatggaaaggtctacaccacctgtcatcagcggaaatgcaactccgattgccatcaacgcaatgtagtaagaataatccagaatacttacaaatgttgtatattttctaaatcccggactcattgcacaaaagaagatgaacattgcgattacgatcaggaaaacgatgaatttctgtcctcccattctgtcaatgaacgacttgtttgtgccagccgtctttgttgtcttatttgccatttttacttcctcctactctatctctcgtgtagccatgttcatgatattttcctgtgtagcctcggaaatatccagctcaccagttttctttccttcacacattacgacgattctgtcactcatacgtaagatctcagtcatttcagaggaaatcataataatggctttgccctgttctgccagctgattcatcaatttataaatttcgttcttcgctccaacgtcgatacctctggtcggctcatcaaaaatcaggatgtcacagtttcttgtcagccattttgcaataacgactttctgctggttaccacctgacagattcacaacaagctgatctacattcggtgtctttgttgccaatgactctacatactgctgagacacttctttttcttttttcttatcaatgaagatgcccttcataaagtgttccattgttgccatagaagtgttctctgcaacagatttctgaacaacgattccgtatctctttctgtcttctgaaagatatccgataccatttctaactgcatcttccggactcttgatatcaactttcttgccgttgatataaatatctccgctgtcgatcggatctgcaccgaacagtgcacgtgctgtctcagtacgtcctgcacccatcagtccggagaatccgaggatctcacctttatgcagctcgaagcttacatcttttaccatctttcctgcgttcagatgatcgacctttaagacaaccggcgcatcttttggcaccatattctgtgtcttcggatcttcgtagatgacacgtccaaccatcatgttgatgatgtcatcttttgtacagtcttttgtgatcagagttcctacatatgtaccgtcacgcataactgttacacgatctgtgataaccttaatctcatccatacggtgagaaatgtaaatgataccgattccttttgctttcagatcattgatgatcttgaacatctcctgaatctctgtctctgtcagcgctgcggaaggctcgtcaaaaatgatgacctttgcgtcatgagaaatcgcttttgcgatctcacacatctgctgtttaccgactgtcagtttgttcattgtttctctcggatcaatgtcgatatgcattctgtcaaacagtttttttgcttcttcattcatcttcttgtcatcgatgcgaattccctttttgaactctcttccgatgaagatgttctgtgccactgtaagatgaccaagcatgttcagctcctggtgtacgataacaataccgttatcctgagcctctcttgtatttgcaaactctacttcttttccttcatatgtgatagttccggaatcttttttataaatacctgtgagaaccttcatcaaggttgactttccggcaccgttctctcccatcagagcaaggacttcaccttttctgacttccagatctacatgatccagtgcatgaacaccagggaaagacttgtcgattcctttcatcgttaatataacttcacccattttattacccttgcctttctatttcacttcttctctcaattattatgtatcacgattagttctttctgcgtcttgcaacaacgtcactgaatactgcgacgataacgataagacctgtgatgataagctgataatcttttgtaaagccaagagcaagaataccttcctgaagcaatgcgatgatgaatacaccgattactgtaccactgatagaagcaagtccgcctgccatggatgtaccacccattacacaacctgcaattgcctcattgttgtactgatcaccatatccaggctgaacagttgtgtaagcggctgtgtagaagattgctgaaataccaaccaggattccacagataatatatgcagacatttcccatttttttacatttacaccagaaagtcttactgcttctttgttgcttccaagacataagatgtaacgtccaagttttgttttatttaacaggatcgcacagacaattgccactgcaaggaaaatgatcagacctaccggaattccatcaatactgatgatttttctaaaccaaccaccatcctgcatctcctgcggccagctgacagactgtgtctttgtgaatacagatgcaacaccttttgaaatattcatacttgccatagaagtaatgaatgaaggtactgaccagtatgctaccagatacccgttaaagataccaaagatcagtccgatcacaatgctgaggatcagcgctaccggcatcggcattccatgtgatgtgaagcagtagcctgaaatcaatgcacaacagaacataaccggtccgatggagaaatcaatccctcctgttgcgattacaaaggtaactcccaatgataagaatcccagaaaatatgcataattgagggtactcagaatacgttcaattccgaagaaacttccctgtgtcagtgcgcagaagaaagcatacatcagaagtaatacaaagcataacacgattctgttaaaccctaccttttttacaaaaggattttgtttaatcttttccacttttcgtcctcctacttcttttgttccgtctgttttaaatacggaatcatttcctatctcgctgttctgcgccaccgccctgtatctgcttcgactccttcaggcgcccgctgcaatacttggaaaacatgaaccccagatttcatacttttcgtagtgtcagaatcgagatcaactttcgaacccgtgacttcagaactaagatttatatatagtatagtctttctttttcctgattgaaattgaaaatcttcctaaaaaaggttaaaaaattacaccaccgggtaatattttacacggtagtgtaaccttttcacctttttcgcttactgttgaccggaaaacgagtataaaagtctttgattttcctcttcatacatattctctttggtgatcagcttacagccggaatccagattatattccatcggatagccttcaattgcttttactgcctgttccacccccagatatccgatattaaatggtttctggatcacgatcccctgaaagactccggcttccaaaagctggatctgctccacggagttgtcaaatccaacaaccttcacctgatcttccatccccatttttttgacgccgcgggcagcgccgactgctgaatattcattcgttccaatcacaacatcaatctccggccgttcttttaacattttttctgtcagatcgcttgcaagatcgtaagaagaattacagtagacaatatcctgaatccgattttgatcctctcccagaccttctctgatcccatcctctctttctgtcgctgtggagcttccttttacgtgcgccacaactccgatctttgaatccggttttaaaattgtttttgcaaacgttcccagttctttccctgctttaaaattgtcggtcgcaaccactccgttggcaatttctttgtcgatcacagagtccaccaggattactttgataccggcattgatcgcctcctgcactgcttctgtcgtatgagtataactgcatggcgcaatcagaaacgcatccggattcttcttgatactctcttcaatcagccggttctgcccttcataatcatcctctgaatcacttccgaccacctcgatctcacagccaaattcttctgctcccagctttgctccttcgatcagcccggtccagaaatcattggattcatcaatggtcttaggaaccatgatgatcttataagtccgcttattttgagagctgtcctgaagtacaccgatcgtgatcagaatcaggatcaaaagcacaaatccggccgtcattaccccaatcagtcttttacctgcccgtctcttcattgctttttcctccatccagagggatcgtcacggtcgcaaccgttccctcaccttttctgctgatataagaaatcccatattccggcccgtaatagagctgcagccgtttctgcacattatatacccctaccccatttgacttggtctttttctcttttttctccagaatatgttccaattccgactcttccattccggccccgtcatctgcaacgaccagacagacacgattgcctcttctgtaaccgcgaatatccagatttcctttggtctctttatatttcagaccatgatagattgcgttttccaccaatggctgaagtacaaacttaatgatccgaacatccaggatccgctcttccacgtcaatcgtatactccagcttatctttataacgcatcttctggatcgtcagatagcttcgcacataatcgatttcttctgccaccgtgatctgctctctgtcgttgctgatactctgtctgagcagctttgccagagcagatgtcatcaatacgacctgatcattttctcctgcctctgacatccagatgatagaatccagtgtattataaagaaagtgtggattaatctgcgcctgcagggctttcatctcgctctttcgtttctgcttctgctcatagatgttctgttccatcaatgcatggatcttttgcgtcatggcattgaacgatttgctaagacttccaatctcattttctgccgtgatttccacactggcctgttcaaaatcccccttttccaccagactcatcgaatctcttaagcgtctcaatggtttggtgatctcgctggaaatgaagctggaaatcagaatgacaccgatcagaatccctgctgctgccagaagatacaacatctgtgcctgccgattgtttttcatcaattccgtcacataagatgcccctaccactgtccatcccgtcttctcagattttgacatcgtataaagcttactgtcttcaccttcctctgtctccagaaaatccccttttgaagccaggatatcctcgatccgttcttcttttaatccaccatagatcagctgctgctgcggatggtagatcatactgcctttttcatccagaataaaaatatatcccttgcttccaatggatgtattgctgcaaagactgctgatcgcactgtaatttaagtcgacaaaaaataccccctcgcgttctcctgtctgctcattcacaatcgcacggcttaaggtgatcacccagtgatagctgcctgcgatcgcattctgcacatgagaagatgacaccgcgatcccggtcggtgaatggatcgccgcctgataccagctctgctgccggacatccacatacttattgagacgatccgctcctgaattgatcaaagcttctccgttatctgcaacagccgcaacattgtaaatatcagaacggctttccagaatcgtagtaaactgcgtcaggatccgctctttcgcagcctccttttcctcaggcgtctgctcctgattaaataaataacgcgacagatcacttccacttgccgccacccaggaaatattttccatatagtctatataggaatctatatcataattcacctgactgatcagctgagaagtcgaagttctggaattctcgtatattgttttttttgtgaaattcatagcaatcagaagaaagatcagaaccgcaactaccaccaacacagaaaaagagagcatcatcgcgtcccgtatactcttaaatcttccaaatatcgtcatctcacgctttttcatcacttacttctccctggaatactcttttggagtcagtcccgtgctctttttaaatgcaatgctgaaatagtgcggatcactaaatcctactttttctgcgatctcataatttttcaggctggtctcacgtaacagctgctttgcccgatccatcctgattccatttaaagcttctgtaaatgtctttcccgtcgcttctttgaatacactgctgaaacggcttgtgctaatgttcagatgttcgcatacatcattcaagctcaaagacggattgccgtaatttttcttaagatattcaagtgcaagtcttgcccagcgctctccgctggactgccctgccatctccattgcttccatggcacgcttaacatacgctctcaccttttccatggcattggtaaagcttctggactccatcacatctccgatatcacgctcatccatctgaaaatcttcattggctctgcgcaccacgccgtaaatgatcatcatgatctgccggagccatgatacagcctggtttcttgtcacatatccatgactgatccatttttccacatgatccagaatatccataagctcttcactctgctggttcttcgctgcctcctcaatatctttaaagtcctgttccagctccagaagatttccgcagctcatcggagattcacagtcatatacctgtccgcttccttttgtataccggtattttaaggtcgccactgcagactcataggatttcggcagttcttccagcttttccacacagaatccgattccgatagaaacgctcaactgcatggcctctttcactgtcttttgaatctctctgcagatcacttgaatctcctgcgaaaattcttttgggttatcgctccataacagcatacagactctgctgtccgaatcccgatatgcaattccggcattgtgatcactgacgatctcattgctgatattttccaccacaaacgacatgagtgcactctcttttttcagttcatcatttgtatcatacaaactggaatatacatcgatatctgtcgtcacaacacggtaaaacgcacctcccagttcaattccgaattcttttaattcttccatactcgtctcaatcgcctgcgttccctgcagcagcctggacaaggttttggaaataatcaatgcctcattctttgtataggtccgatatgctttttgaagcgcatcgatccgctcctcctccgttctctcactgtccagtttttccctgatcctggtcagtacctctgtcagctcctttgccgtcacaggcttcagcaagtactctgcgactttatactgaattgcctgctttgcatattcaaaatcactgtaaccgctgaaaataatgattcttgtctgcggcatattttcataaatatatttactaagccccattccgtccagatatggcatacaaatatccgtcaacaccacatccacaggattttcctttaaaaattcaatcgctgcttttccattttcgcaatcacctaccagttcaaacccaagatgtccccattctatcttcgcgctgattgcttcacggacgaggatttcatcatcgaccaataacactttatacacttttgtatcctcccacctatgactcctgtcaaaaacacagaaattcctacgcctagtatacaacaaagcactgtattgtgaaagtagaaatttcggcggagattttcttttatacatagaaaaagtcgatgccagatatatctgcaccgactctttccatgcctgaaagaaacgctaaatatgatcgattcccagttttttatcaaatattttcataagtactactgctgatacaaaacttgctatacatgcaataattgctgcaactactgtggaatcaaatcctgtctgtgggttgatgacttgtaaccatccaaaaattccattggttcctgctgagtactgttttactcctccaaatccgataatcgcacccccaataccggaagccagacaagcaaggataaacggacgcttaaactgcaaagttaccccataaattgcaggctctgtaattccaaacattgccgaaataatcgcagggccacatactccttttaattttttattttttgttttgagcatgatcatcagaaccacccctgcctgtgcaaacgcagaagcaagtcctgcgatcgtaatcgcgtcatatccgagagttgccatattattgacgttcagtgcaacaaatccccagtgcaccccaaacatcacacatacctgaatcaatgctccataaagaaatccacagattgtagagttaatttcaaagagaaatcccatcagagctcccaacaaattacttgcgaatgttgcaatcggtcccaataccagaagtcccagaacaacaccgcccaaaattgtaagcattggtaccacaaatgccttcaccaactgtggaatacaacgatccaaaaatcgttccagctttgccgcaaaaaagcagactaatacaaccggaatcacagagcttgcataattcatcagaatcactggaatccccaaaaatgtaacatataccggtgactcaaaaatcgttcctgcaaaaagggtatacagtggctcacctcccataatgaccgcaatagacgggtacacaagagctgcaccgatagccattccaacaaacggagtcccaccgaattttttcattgccgtatatcctaaaaagacgggcataaagtagaaaaagcaatcccctgcaatggaaaggatctgataggttcctgccgttgcatccatcaaaccggtcgcagtcataagtgccaggaaacatttaataattccagttgcgatcaacagatttaaaatcggagtaaagactcctgaaatcgtatcgataaaccggcttgagattttcttatctttcatttcctctttaaattcttttgcatcttttaatccgctttcttctttctgcatatcatacacagatagtaattcctgatatacatcacccacatgacgtccaatcacaatctgatactgacccccgccttttacgacggaaagcacaccttctatgttttttactgtttcgtcttgaattgtgtcctcctgcttcaactgaaaccgaagccttgttgcacaatgatatacattgagaatattttctttcccaccgattgcctctacaatctctctgaccattttttcatatttcatctcgatccctctcttttcattcgaatacaatcactttcttttcgcctttttcacatctgatttttcttgattctaatgtttcatttacaattgtaatctgcgttccatgaacagattctacttctacgctttttacacggcatccgctccactccatgtttagaataaagccactttttgttcggattccactaacatttccatccggcatctcctgcggcaaagcaggtaaaagataaacaacatcctggtagtcctgtacgatcatttccaatatcccacaggctcctccaaaatttccatcaatctgaaacggtggatggttatccaaaagattgtctaaagttgcctctgccaataattcttgaagattttgatatgctttttccttcttccacagtcttgcaaaaaacaggataatccacgctttactccatcctgtatgacctccgccattttccagacgtcgatccaatgttttttctgctgcttgtgccagcttcggagtctggtctttccggatctgctgtgcaggatacaaagcaaacaactgtgaaatatgacggtgtcccacttccaattcttcgtaatcctgatcccactcctgaatctgaccatattttccaacttttaatttcggcagattttctatccggtcttttaccagccctgttaatggttcctctttttccaaaatctctaccgttttcagataattactgaataattctcttacaatttcaatatccatggttggtcccatacaaagacatccatactgattcttagccgtgatgtaaatattttccggagaactagatggtcctgtcacccactttccatctgaattctgaaccatataattcataaaaaactgtacactgtcttttaaaatcggaaaatattcctccaaaaatcccttatcttttgtatactgataatgttcatatatatgcagacacagccaggctccgcccatcggccatatcgtagagctggtatgataatcctgtggtgcacaatccccccatatgtcagtattgtgatgacagcaaaatccctctacatgatacatggatgccgccacctcttttccccttggatgcatacgcttcaaatgctccagaagcggaaggtgtaatgcctgcaatcctgttttttccgccatccagtaattcatctgaatattgatgtttatagtatatttgcttccccacatgggttcaaattcttcattccagattccctgcaaatttgccggaaggctaccctctctgctggaactgatcaatagatatcttgcaaaatcataatacagattcaccagcccgatatcatgatgtccttcccggattctttttaatctttctggtgttgtgagattatccagattcatttcctgtctgaaagtgagacgactggcattaaagtatgtttgataatcctgaatatgctctctttttctctctgcatacgtgtccagagataatgaagccagatgctctctgcaccattgtttcggttctgcagatcgaaatgtcgttcttcccgtaaaacagatcagaacttttcttgccttttctacaataatacggcttcccatctgatattgccttcccccacaggaacaaactcgaactcccatggcaaatccaattccttcccttcctccggatgatccttccagccagatgtactgattttcctctgccagaatccgatcacagaaggatactccgcgacctgatcgattgtcttttctggttgcagatatctcaaggttaatgtcctctccactttctgcacaaatactgtacatagccacttttgccggatttgaggcaaaaaattcacgattccattttgttcttcccacacagtattcaatctttccaactgcctgttctaaattcaatattctctgatatgcttccacttctgctgcagattcctttaaatatggcagtccactttcatcccgagccagttttcgctctgcttcctgatccataaaacgaatccagatatctcctaacggctggtacacccgcatattaggacttgtagcatacatactttgttctgccagtttctctgcttcctgaacgtttccttcaaataaacattctctgattttttcaagatatcttcctgcatcaggattaacccgatttgaaaatccgcctgaccatacggaatcctcattcacctgtatccgctcttttgcaacatttccgaacaccattgctccaagaaatccattcccaattggaaacgcctggttccattcttccgcctctttccggaaataaatatttcccatagactcctcctttttcttctcaaataaagctctatttgttactatcattataataaaaaaaacagagatttttaaaagttcgaattttggaaactttaaaaccctctgtttttaacctcttttattttgtattcataccttctgaagtaccatataactcttcataactgtataatagtcgttctatgaacacctgatacaggattggatgattttggacacagtctgcatatcgaaacaacacacactcatctactcttttatcaaccaacatttgttcattcgatgtaaccagcacgattttggctttcgtcttatcaaaactatactttggcggccgcccttcacgattctgatattcagtgatgtattttcctgaattcgaaaaaataaagatcaatgtctcctcatccgctgattcgatatagttttcctgctgtctgtcattcattgtcgtatacaaaaacttatggtaataatgcattttatgctgcaaattgatcgccgcagattctgaataactgattccaaacgctgccaggtgtttgtattcatgcaaatccaccgccagacgttttaactgatcttcctctattccaaacaatacagatctaatatcttctgacaaaattttttcatattcccatatgccatgcccccgaatataatctgtgatattacattttccattgctattataaatttccttcttcccctgccgtactgcttccagtttaaaatctaaataatcttcaaaaccaatgtctctgacaaacttggaaatcgttgactttgaaacagcacacatctttgccacatcactgatcgacattcttggaagctcccataaattccagatcatcattttggcaatataaaattctgtagaatccggttttttctcattcaatgcagtgatgagtctattatataaaatgtacatagttaatctcctttttcatatgtacttctattttaaccgaatttttttctgtttaaaatagcaatctgccttaaataagtaaaaagacataccatacagcatgcctttctacttatttacagctttacaacgttacaatttttccttcttcatcccagagatcgtgccagtcttttgcgccttcccacaaaaatacctgacctttcacaagacggttgtttctctcaagtgtctcgatcgtcttcatctcttcttcagtcagaggatcctctgtcatcgctttcaggttacttacatattctgcttcatgaacagagaacggaatcggaatctgtcctctctgatgtgcccattttaaagcgatcagcgccggatgacagccatgtgcctttgcaatttcctgcatctcaggagtctgcaggtctgctacatcttccggacacatatctctctccggtctctgtggggaaccaagcggcatgaatccgatcggctgaatcttatgttccgtcagataatcaaagatttccttctgctggaagcacacatgcatctcggattcacaggcagacggcataatttccataagcggcagtactgcctccattttcggaatggtcatattggaaattccaatgtggcggatcagtccttttctcaccagttcttcacactgtctgtatgtattcataaattcttccacagagaatggtctggaatccggatttctggaatccacatcacatcccggtgcatggtagttcgggaatggccagtgaataaagaacaaatcaatgtagtcacactgcaggtcctgaatgctttttctgcaggattcctctactctctcatgcatatcattccatacttttgtcatgataaataaatctttccgttctaccacaccctcttcaaaggccgcatggaatacctctccaatctgatcttcatttccataacatgccgcacagtcaaacatacggtatccgcagcggattgctcctgccactgcatttgacacctgctccggtgtaaaacggtcagaaccaaatgtccccattcccacacatgggatttcttctcctgtatacaattttactttcggcaccattgccggctgaatcatttctgccatgttttgtccctcgctttctttattttaactttgttatttttacctctttaaaaatgcgttccatatcttcttttacaaaaaatccggtttcttctcgaagtgcagctgccgctgaaatcgcgcttgcaagtcttaaacttccttccacggaaatcttctgactcattccgactgcaaatccggcaatcatggaatccccgcatcccacggtattgactgcatcgattttcggaacctgcgcctgataaatcccttcttcacacaccacaaaggatccctctgcgccaagcgaaactgctacgatctccactccgccttcatgaatctgctttgctgcctcgatcatttcctccaggctgtcacaggacatgcctgtcaacatccggatctcatccagattcggtttgatcattgtcggttttgcttcaattcccatggtaagcaatgcgccgcttgtatccagaatcacattccgtttttcctctctgcagatttccaccagacgctgatacgcgcttccatccagtccttttggcacacttccggacattgctatcacatctgcctgttttaccagattgcggaatttctttaaaaatccctgaaactgctcttctgttaccgtaaaccccggttccagaaattctgtctgcacacgattcgtctcatcccagatattgatgcaggaacggctctctgcttccagatggtaaaactcactttgaattccgaaaggctttaacgcctcctcaatataatttcccgcatggcctcctacaaaacctgtggcaactacttcttctcctgcgattgctgcaggttttgaaacattgagtccttttccgcccggagtgtatgcacactccttcacacggtttacttctcccagacggaaattttctacaacgtaacgtttatcgattgctgcgtttaatgtcacggtcagtatcatcttacaactatctctccactcatttacgattcgtttacaagtaacacttttcctttgaccagtcccggcgtcttgaacatctgaaatgcctcctgtgcctgactcatcgggacttttttgtagataaatcccggatcgaattttaactgtcctgttgcaaaataatgtgcggtcagctcccactcttttcccggaaacggtgcactgtaagacatccaggaaccggtcaggtggaactctttccggttcatattctcccacattgccggtgtgaatgtaagctctgcatgtggtgttccgataaagcagacatttgctttattgcccgcaagttcaaatgccatatgcatagtcgggatctgtcctgccgtctcgaacacatagccatatccctttttcccggtaagtgccattgcttcctgcatataattttctttcgttgtattgatgactgcatctgcacccagacgttttgccagttccagacgctcctcgctgatgtcaaataccacaacttttctggagccgaaaatctttgcccactgcatggtgaacattccgatcgttccaccgcctaacacagcaacatactgccctccctgatactcgttctgtaacaatccgtgaagggcaactgtagaaggctcgaacatagcggcctgctcataggagatcgaagaatcatagacaactgcattttgttccggaatcaccacataatctgcattgcttccctgttctctggagccgataaagctataatgcttgcagagggaaaagtttccattctggcagtcatcacatttcatacaaggctttaacggtgcaccggatactctttctccgacttttacctttgtgacaccttctccgatctccacaacatctccggagaattcatgtccaagtacgatcggataaaagtgtactccattgtgaagcactctcggaatatccgaaccgcagattccggatgcccgaaccttaaccttcacttctcccggtcccggaatcggctcttcataatccagatactgtacatcttcatttgcacaaactactgctgctttcattgtttctttcctcctgtctttttcatcagactttttaattgttcatacagagctctgtatgtctcataattcttttcgtggatttccttatgctccacattcggcgtatggactcttcctttattgacggtcttctccaccgcttcttcaaagctttcatacattcctactccgactcctgcaagaagtgccgctcccagtgtggttgcagtatctgatgaggggacttccatggtttttccggtcacatcggatttgatctgtgtccagaggtgtgaatttgctgctcctcccattgcttttaacacttccacttttgctcctgcttcttctgccgcttccagattgtgcttcagtgcataggcagttccttccatcgcagcccggatcagatgcccttttttcttgctgaaatccaatccgtagtaaacacctttcgcatccggatcccagatcggagaacgttctccggacatatacggaagaaatacaactccgtcactacccgccggaattacttttgcctcttcgttcatcagatccagagagctgacgccccttcgctttccttcctctcgttcccagtctccaaattccttttccagccagcgcatgacaccgccgcctcctgtagttcccccctgaagcagccagtgtcccggcacaacatgggctccgaggatcagcctctcgtctgcacaataatgatccatgcagatactcatcccccctgcctgcccgccttgctcctgtgtctctccatcgtgaagtacaccgactcccagtgctgcgcaggctgcatccagaccgcctgccacaaccgggattcccacgcaaagtccactttctttggccgcttcttctgtcacggttccgatcacagcatggcatggatagatttcaggaagcagatcctttgaaaatccgagctcctcacacattgcaaaatcccaagtcatttcctgcatattaaagcaatgcaaaccatagccctgagaaacatcctgtgtcatttttccagtcagcttaaatgcaatatagctgtttgactgtaagatctttgctgtttttgcatatacttccggaagatttctctgataccagacaatcttaggcgttgtatacgatggctgcagggagtttccacacagcttgaaaatccgatcttttccgattctctcattcaattcatcacagatgtcctgcgctcttgtgtccatccagatcggtgtatttgtcagaacgtttccgttttcatccactgcgatggctgaccagctctgcccgtcaattccgattcccgcaatctcatccggtgaaatctcagctttttgtaacatttccggaagtacctggcagattgtattccaccagtcctccggattttgctctgcccatccgggctttggataatacaccggatacgttccgctctgcgcggccaggacttctcctgctttattaaatacagcgattttacatccgcttgttccaatatcaattcctattaaatacgtcttcatgttctcctccaaaacattccgaaacgtttcggttttcgggataaagaaatcgtacaccttgtcatacagacaaaatgtgtacggattttccttctacaaaactggtctttaacttcatttctttcggaggcatctcccgggttggattgtccagtctgtccaatatcagttctgctacatttctgccgatttcttttgtcggctgtgtcacaatacttagctttggattgctggctttcgcaaactcgatattatcaaatcctatcactgacagatcttccggaatccggattccaatctcattgctttcgatcatggctccaaccgtcatctcataatttgatacaaaaactgctgtcatctgcggattctgttttgcaagctccttcatcgccctggcaccgcctgcgatcgtataatctccatgcacaaccaatgaatcctgtacttcgattcctgcctttttgaacgcctcttcatatccaagatatcgctctcttgctgtaaatacatgctccggtcctgcaatcattccgatctttcgatgacctgccagaaaaagtctctctactgccgcctgcgcagctccccggttgtccacaagtacactgtcacatggaacatcttccagattacgatcgatcagcacaactggttttcccacatgtaaaaatctctccagatgctttcctgatttgccggacggcatcaagatcagtccgtccaccctgcgtcgaaacaaaaactctaccgcttccgcttcccgtgccgcatctgttctacagtcacagatcatcgttgcatatccatgatttcgaagcacatcttccacttctgtaataatctctgcacagaaaatgttgttcagctccggaatgatgatcccaatcgtctttgtccggtttgtctttaaacctctcgctacctcgtttacctcgaaatccaattcgtcaattgccgcctcaattttgatccggtttttctcccggacatttcccccatttaaataagaagaaatcgttgccagtcccagtcctgtcactctcgcgatgtctttcatcgtcgctcccattgatgctttccgccttccttactacatctatgtggaactactgtacctttcctgtacatccacacatcttcattcgcagtatggtctgttcttttacggctttcattgctgcaattcccagttttttcggatcaaaggtctccggattctctttcagcaactgtttttcagcatctgtgtatgctacacgcaattctgtcgcaaaattcactttacacatcccgcgctgtacacattctaccacatcttcttcgctgagtccacttgcaccgtgaagtaccagtggtacagaaacaacctttttacaatctgaaaccctttctttatccaacactggagttcccgcataaaatccatgagctgtaccgatcgcgatcgccagagaagaaacacccgttctttccacaaattcttttgcctcttcaggatctgtattatgatccgcttctgcctccagatcatcttctttcccgcctacttttccaagctccgcttccaccggaactccataggcattggctacctcaaccactttttttgtcagtgccacattttcttcaaatgtttcatgggatccatcgatcatcacagaagtatatccggctttcatcgcctgtacagccagctcaaagctgttgccgtgatccagatgaagacagaccggaatatcggtcttagaagcctctgcttttacaattgctgcaaatgtttccaaagatccatacttgaccgtagatggagtagtctgcagcataaccggcgagcgcatctcttctgccgccgcgatcacagcttttgccatctccatattttctacattgaatgctcccactgcatacccacctttttgtgcgtctgaaagcattttttccgacgttactaatggcatatctctttcctccttttccttaaccgaaacgtttcggttttgtgagataatagtactatacaaaaagaatattgtcaatctcttctgtaaggaaaactgaaaaaccgggacagaaaaatctgtcccggcgtatattggcaacaaaatagtcgattatggcttatttatttatattcttccaaaagtgcttagcgctgtacacgtccggaagcatctcctcctgccagtttggcaacttcatccatagaaaccatgttgaagtcaccttcgatggagtgtttcaggcaggatgctgctactgcaaattcaatggtagcctgtgaatcatatccgctcagtgttgcagcgatcaatccgccgccgaagctatctccgccacctacacggtctacgatatgcatcttatattttttactgaagaaatagtctgttccgtcatataacatagcagaccagttattgtcatttgctgaaatagattcacgaagtgtaattgcaactttctcaaatccgaaacggtcagcaagctgttttgctacatctttatatccttcgtgatttacttctcctgcagttacatctgtgtttgctgcatgaataccgaatacatctgctgcatcttcttcgtttgcaatacatacatccacatatttgcaaagttcacccattacttctcctgcttttgctttgctccacagtttatttctgtagtttaagtcacaggaaatcttcacattcatctctttggctgctttacaagcttccagacagatttctgctacattgtcattgagtgctggtgtgattcctgtaaagtggaaccattctgctccttcaaagatttctttccagttgaaatcttctttggatgctgtatagatagaagaacctgcacggtcataaattactttagatggtctctgagaagcacctttctccaggaagtagatacctactctgtctcctccacgtgcgatcttggatgtatccacaccgtattttctcaaagaatttactgctgcctgtccgatctcatgtgtcggaagttttgttacgaaagaagcatcaaatccataatttgccagagaaactgctacgtttgcttctccaccgccgtatgttgctccaaatgtatctgcctgcacaaaacgataatatccttctggtgcaagtcttaacataatttctccaaatgtaactacttttttactcattattattctcctttaataattttttatttctgtacaagatgtactgcaaatccggcaacttcttcttttaagtaaattgctgtaagttttccgtctttgtattttgcactgtccatattgaactctacgccctgagactccagataatttactgcacgatctacgctgtttgttcctactgcaatgtgtccttttgctccaaggtatgggctcttcattgcttctacagcacttcctgcaaatacagaactgtttccgctcttcttctcaaatccgaataaagaagcgaatgttcctgctgttttctcagcctcttcttcattttcacagttgattccgatgtgtttcagttcaaatccaagcattgtcatcactgcttcttttgtcagctctgtaatcttatcaaattctcctgctgcaacaagatctccttttaccatccagcttccgccacatgccaggatcttagggaatgcaaggtagctgttgatgttctttgcattgattccgcctgtcggcataaatttcatatttgtgtaaggtgctgccatggacttgatcatattcagtccgccggctgcttctgccgggaagaatttcacaacttccaatccaagctcgattgcctgctctacatcacttggatttgctgttcccggtgtcaccggaactcctttttcaatacagtattttacaacctttggatttaatcctggacttacgatgaattttgctcctgctgcaactgcacggtctacctgctctgttgtcagaacagtacctgcccctaccagcatctgtgggaactgctctgccataatgcggatagactcttctgctgcttctgtacggaatgtcacttctgcacatggaagtccgccgtcacagagtgcctttgccaaaggtgctgcgtctttcgcatcatttaatacaacaaccggaacaatcccgattttctgaatcttttctaatacttcgttcatggtcattctccttatcactgaatcacgttgtttgtttcacattatggaactatgtttcgtaatatgaactctttaattttgattatactcactttctatggattgtcaagccattctttgcatttttttactttactatttttttatttactcttcttcccaaactgtgctacaataaccactgaatgatactcggcgctcttttgagcaccggactttacaggagtgatcttatggaagaaaaaaacccaatacaggtatcggaacgtattttccataccatagaatgccttgcccgtaccggtccgatcggacttctggaactgagcaaggaattaaatctcaataaaagtaccgtccaccgtatcttaaactccctgatctgtatggaatatgcaaagcaggatgcggagacactgaaatacagtctgacatttaaattctgtggaatcgccaaccagattctggcccagaataatatcatcgatctgatccgcccttacattaaagaacttgcagaacagaccaatgaaacggtccacctggtccagctggatggtctgaatgcagtatatattgataaagtagaggcttcccacaattccgtgcggttaatctctatggtcggaaaatcaattcctttgtactgctccggagttggaaaagcgctgctggcagatatgaaagatgaaaaagtaaaagaaatctgggatcacagcgaaattcgaaagctcaccgattacaccgttgtcgatttcgtcaaatttcaaaatctgatcgcagatgtccgcaaaaacggctatgccatggataacgaagaaaatgaactgggtgtgcgctgtatcgccgtctcattgaaaggccttcacagaaaaccctcgtatgccatcagcgtatctgcaccgaaagaccggatggatgacgcacggatggaacagtttacccatctaatcctggataccaaacaacggattcagaatgaactgggaaattaatttaaaaatgaggaaagaacctgtttttgattctttcctcatttttctttttatttatacctcaaatccaaaatatcttactgcattgttgtaagagatatcctgcacaattcttccaagaatctcttcatctgccggatactctccgttttctacccatccgccgatgagattgcagagaatccgtctgaaatactcatgtcttgtataagacaaaaagcttctggaatctgtcagcattcccacaaaattactgagaagtcccaggttggcaagggatgtcatctgatcgatcatcccctgcttgtggtcattgaaccaccatgcgcttccctgctggatctttcctacgacaccggcatcctggaaacatccgatgatcgttccgatggctgcattatcgtttggattcagactgtacagaatcgtctttggcagctcgtctgttacattcagtgcattgagcagatctgccagctgtgcagatggcgtataagtgtcaatacagtcaaatcccgtatccggtccaagcttgcggaaacgttttacgtcattgtcacgtttacatccgtaatgaagctgcattgcccatcccagacgatgatattctcttcctgcataaagcataaatgcagtcttatattttaattcttcttctttgctgatcggctctcctgccattcctttttcaaagatggcttcgatttcttcctcggaagcaggcacatacatggcatagtccagtccatgatccgatgcgcggcatcccatctcatcaaagaattccatgcgctttgtcagggcattcttcatctctgcaaaggaatgaatttccataccggctgcctctcccagttttttcaggtatgcggcaaatcccggcttttcaatcttcatcgccagatccggtctccatgcagggagtacctgcacttcaaaagaatcatcctcttttaactgtttgtgccatcttaagtcatccgccggatcatctgttgtacagatcaatgtcacattggactggcggatcagctttcttgcactcatctgcgggctttgcagtttttcattgcaaagattccatacttcttctgctgtcttcgcatttaatgcgccatgatatccgaaataacgctgcagctccagatgactccagtgatacagcgggtttccgatcgcgcgctccagagtctccgcccatttctggaatttctccctgtcggacgcatctcctgtaatatagcgctcttcgattccattcgaacgcatctgacgccatttgtaatggtcgcctcccagccatacctgggtaatattttcaaactgtctgtcttctgcgatttcctgcggactgatatgacagtggtaatccaaaaccggcatctttgctgcatactcatgatacagcatcttcgcagtttccgtctccagaaggaaatcctgatccataaatgctttcataccgcttcctcctacacgtattttttgagtgtttcacgaacagctcccggtgcttttgtcatttctttcaagtatccacatacaagttctgcaagtcctgcttcatataaatccacaccgaaaatctgtttcatcttcaacacttctgatactgcgctctctacgtcctgtccttcttccaacttcaggtctgcaacatatgggcagacagttgtaagcagcggatccggacttaaatcaaatgcttttccgctgtcatctacgcccatcagataacgcagccatcccgcaaatacaagcggaatcagcttcaggtctttgacatccagttcgtcggatgctgcatatgctttgatcgtctctccaaaacggattgccagtttctgagaagtatctgttgcaatacgctgcggagtatccggcataaatggattcggaacacgaacctgaagaactgtatcaataaactctttcggatccagtactcccggattgactacaaccggaagaccttctttgtatccgattgtctccactaattttttgagttcctcatctttcatttcgtccgagattttttcatatccaagcagacatccgaatactgccagcgctgtatgcagaggatttaagcaggtgcagactttcatcttctccactttgtctactgtctcacgctctgtaaacatcaggccgcctttttccagttctggtcttccgttcggaaatgcatcttcgatgacaagatattcgcactcttctgcatttacaaatggcgccacatacgtattcttggatgtgatcaccggatccagctcttcaattccatcctttttcagaagttcttctactgaagcatccggacgtggtgtaatcttgtcgatcatggtccatgggaatgtcactttttctttacagtttacatatgctctgaatcctgcatctgtaagtttgttctcttcccatttctctgcaaatgtattgatcgctgcatacagtttatctccgttgtgggaacagttgtccatgctgaccattgccaccggcttttctcctgcctgatatctcgcataaaggagcgctgccacttttccgatgtaactcttcggagcttccggtccgcttacaaagtctgcctctacatccggaagcagttccccttttccgtttacaaggctgtatcccttttctgtaatcgtaaatgtcaccatctgcagggagtctttggcaaagatctccttcagacgtgcaaaatcagatgcattttctgtgttgacagtcaaagactctaccacacttccgactactgttttctcaatgtttccatctgctttgagtgtcacaagaattgtgtaatcatcatgaggatggttcattttttccacgatctcatagtcaaatccctctgcaacgatcagaccgcgatccagaatgccgtcattcaacaggttctgtaccacatttgcctgaaatgcacggaaaatatttcccgcaccgaaatggatccagaacggattttcttttgtcgcttctgtcactttctctctgtcaaattttggaagggcgtatcccgcctcttcccattttgctctgtctttcagtccttctgcacttaatctcatgattatctggctcctttctcgattgcttcccacaggccgtttaagtaagttgcccccagtgcacggtcataaagtccgtatcccggcattgccacttcatcccagatcatacgtccgtgatccgggcggatcggtccgtcaaatccgatttcgtaaagagccttcatgatctcatacatatcaaatgttccgtcagaagacaggtgtgctgcctcttcaaagtctgtcggagagttgaatttcaggttacgcacgtgtgcaaaatggattcttcctttcagggaacgaatcatatccggaagatcgttctccagatttgttccgtaagaaccagaacagaatgtcacaccattgtgcgggttgtctaccatttccatcatacggagaatgttcttcttgttgatgatgatacgaggcagtccgaatacgctccatgccggatcatccggatgaattgccatgttaatgtcatatttgtcacaaaccggcataattctctccaggaaatatttcaggttttcaaacagtttctcatcatcgatctctttgtacatctcaaacagttctttgacatgctccattctttccggctcccatcccggcatcaccgttccgttcatatcacctgcgatagaatcaaacattttttccggatccagtgcatctactgcttcctgtgtataagcaagtactgtcgatccatccggacgcattcttgccagctctgttcttgtccagtcaaatacaggcatgaaattgtagcacaccaggtgaatgtcttcttttcccaggttttccagtgtctcgatgtagttatcgatatactgatctctctcaggtgcgcctgttttgattgcatcgtgcacatttacactttcaattcccgctacatgaagtcctgctgcctctacttcttctttcattgcacgaatacgttcgcggctccacacttctcccggtgctgtatcatacagtgttgtgatcactcctgttactcccggaatctggcgaatctgcttcagagtcactgtgtcaaatttagctccataccatctgagtgtcatttccatagttatcataccttccttttctgaaatcgtgttgttacattcattataaaaaatactgtctaaaataccattgacttagttgttgtatacattgcaaatcttgttgtttcatgctactctaaaaaaagaaattcatgtgctgcaaaaatcagcacatacttttaaaggagtttttatgaaaaaaaatctgcagacagcatttattacaagacagcatatgctgtcacgagatttcgaactttactattataatgaccacaatctgtccaaagtagacctgcattcccacaattattatgaattttatttttttatggaaggtgatgtcagcattcagatcggaaccgaagtttacccgatccatttcggagatatcatgctggtcccgccacatatcccacatcgcccgatcattcacagcacggcctctccctaccggcgttttgtgttctggatcagtcaggaatactgcaaccatctgctgcagatttccaaagattacgcttatttaatgcagcatgtgcaggtcagtcagaattacttttttccaacagacaggatcacattcaatgctatccagtcaaagctgctgcgtctgatcgaagaagtgcgttctgaccgttttggacgggatgcccagattccgctttacgtcaatgatctgcttttatatctgaaccgtctcgtctacgaacggcttcatccacaaaaaagccggaccgaggaatccctgtatcagaatgttgctgcatacattgaggaacatcttgacgaagatctctcccttgaaaagcttgccggagaattttttgtcagcaaataccacattgcccatgtattcaaggataatctgggattgtcgattcaccagtacattacaaaaaaacggcttgccctttgcagggaagccattctcggacaaatgagtatcaccgaagcctatcagaccttcggcttcggtgactactccagtttttaccgggcattcaaaaaagaatacgggatttctcccaaagatttccgagacatgcaaaaagatctgctcgtgtgatcagtctaaatggaagacttcatggagatctgtacacaccgggctgttgtccgggttcgtctccatgatatcagccataaaatcccaccatttgcgattgattgctgtatctgcgctctcgtcccattttttcaaatcctcaacttcaatatatccatacagaacattggtttcacgatccagaaaaatcgtataattgcgtccgccgtactcgtggatcatctctttcatttccggccagagttcattatgacgtttttcatactcctctgccatatccggatataacttcatcttaaatccttttcttaccatgctgtgctcctcctgtattcatatgattgtgtttactatagcacaattatatttgaaaaagttgagtaaaattgcggtttttatgggatttcggatggttcttgcggtgttgttcaagcatctttaaggcttctgcaaaaaaatatgggaagatgcccatcctaaaacaggcatcttcccttgttaaacgtctttactccaattatctgctcattattttttctttcttctgataatcactactgcgccaacagctgctactgctgccaccagaagtactgcccacatgatcacattggcattgtctcctgtctgcacactctgagagtgtgaaccggatgtacttccattgttatgacttccg

SEQ ID NO: 6958 - DNA, 20521 bp, Unknown
  gut microbiota DNA sequence
aaaccacttcactgtcagaaaatattttatgatatggcagatcaggagtatcgtacatctacaatttatcaggcaagaattgcattatacaacatgtttgagtatgcaaaagaaaatgaagtcttgtgtagcaatccctgtaaaaaatctgtgaaaagtgatatgggaaagccatctgagaagaaggttgcattaacaagagacatacaaaaaacatttttacaatacgcagaaggtcaaagctatgaaaatcagtatcgttttatactacaaaccggattgcgaacaggcgaattggtaggattgaaatggaaagatgtcgatttaaaatccaaaacaattcagattcgcagaagtatggaatatcgttacagtgcaaagaagtggcgtatcggagaaccaaagagtaaatcaggttaccgcacgatacccttaacagaagaagcggttgctatactaaaaaaacaaaaagaaaagaataagaggatttcagaaatttcaacagaatggtgttgatcagcacattataatatgccattttcagaaaaatacatagtgcagaaataatacggggatcttccatccccgaacccctggaatccttgttataacagtaatagaaaaaattattaccgttataacaaggctaaaaatgggatattttaattttccgaattctgcaaattatggcatcaaataaaatgtgttgtaacaatgggaagaatttgtgtttctgtgtcgaaaaggaacgcctgtcaagaacagtacatatgatacagcgttgtttaaaatctgtgataaagcaaaaattccaagattttcgatgcatatcttgagacatacgtttgctaccagatgtattgaagcaggaatgaaaccgaaaacacttcagatgttactgggccattcgaatattggaattacgatgaacttatatgttcatactactgaggaagaaaagaaaaaagaaatggacttggtggcagaagcgcttatggcaatataatggcccactaaatggcccacttgcaaaaataagtgtgctgaaatcccttgaaatcaaaggatttataggaggaaatataaaaaatgaaattaggaatcgtaggattaccaaacgtaggaaagagtacattatttaattcgttgacaaaagccggagcagaatccgcaaactatccgttctgtaccattgacccgaatgtgggagttgtgaccgtaccggatcacagactggatgttctgggtgagatgtacaatacaaagaagatcacaccggcagccattgagttcgtagatattgcaggtctggtaaagggggcatcaaaaggagagggacttggaaaccagttccttgccaacatcagagaagtagatgcaattgtgcatgttgtgagatgttttgaggacagtaatattgtacatgtggacggaagtatcgatccgctgcgtgatatcgagacgatcaacctggaactgatcttttccgatctggagattttggagagaaggatcgcaaaagtggtaaagctttccagaaatgataagacagcagcaaaagagctggagctgttaaaacgcatcaaagagcatctggaagaaaataagatggcgaagagctttacaacagacgatgaggaagaacaggagtggctgacaagctacaatcttctgacatacaagccggtgatctttgcggcaaatgtgacagaggacgatctggcaaatgacggtgcagacaatgccggagtacagaaagtgcgggaatacgcagcagaagagaactgtgaagtatttgtagtctgcgcacagattgaacaggagatcgcagagctggatgaggatgagaaaaagttattcctggatgatcttggtctggaggagtccggtctggaaaaactgatcaaagcaagttatcatctgctcggactgatcagctatctgacagcgggagaacaggagtgccgtgcatggacgatcacaaagggaacaaaggcacctcaggcagcaggaaagatccatacagatttcgaacgtggatttatccgtgcggaggtggtaagttatgatgatctgatggcatgcggaacacatgcggctgccaaagagaaaggtctggtaagactggaaggaaaagagtatgtagttcaggacggagatattatcgtattccgctttaacgtataataattggaggcaggaagcatgcactatgatattagttttccccatctgggaatccatttggaacatgtcggaaagacaatctcggtatttggatttgagatcgcatattacggaatcatcatcggcacggcgatccttctgggctttgtgattgcgacatcagaggcgaagcgtaccggacaggatccggagagttatctggatatgggaatgttcggtgttgtattcgggatcatcggagcaagattatattatgtgctcttttcctgggatatgtacaaagacaatcttctggaaattttgaatatccgggaaggcggtcttgcaatctacggcggtgtgattgcagcagtactgactgtgatcattgcagcgaagatcaagcatttgagtgcgccccagatttttgatacgatcgcgcttgccctgttaaacggacagatgctgggacgctgggggaatttctttaacagagaggcgtttggcggatatacggacagtttgtttgcgatgcggcttccgatcgatgcagtgagaagttctgatgtgacagagcagatgcgcatgcatatccagagtattggtggtgtagaatacattcaggttcatccaacatttttatatgaatccctctggtgctgtgcacttctgatcatactgtttgtgtatcgaaagcataaaaagtatgaaggggaattgtttcttctttatatgttcggatatggacttggacgtgtatggattgagggacttcgcacagatcagctgatcctcccggtggttggacttccggtttcgcagcttctggcaggagtgctggtagtggtaatgggaatcttgattgtgtatctgcgaaagcaccattccagatacgcaatgctggcattgaaaacggagcctgtgaaagagtgaatgataggggagaacgaaaaactgcagtaaaataactgcagtttttttgaacttttttgtctttttcaggtgaaaaagactccagaatgcaagaatggaaaagtgaaattgcataaataaaatcaaaaatagcttgaaatcaaaggagaagtagtatataatgagtaaatctgaacactagtttataataatactttagtgcggtgatctattagcgctaggaatgataaaattgatcaaacagataggtgtggcaaggaggaaatggtatgaaatttgcagagatgccttatcagagagtagatacagaggctgttgtagcagctttaaaagaactgacacaggagctgaaggcagcaaaaagtggagaggaacagtttgagatccatcagaagttttatgcgctgcgtgatgagtataatacgacgattcagatcgctatgatccgcagtgatgtagatactgcagatgagttctacagcgaagaaaagaattattacaatgaggttcttccgacgatcaacaatcaggagacagagtacagaaaagcattgtactattctccgtacagagaagtattggaagagaagataggaaaagtggcattcaagagtatggagcttgaatttaaagctatggatgagaagctgatcccgctgatgcaggaagaaaatgcgctgacaacacagtatgacaagttgattgcaagtgcaaagatcgactgggaaggggaagctttaaatctgtctttacttcgtccgtatatgacgcatgaagatcgcgagatcagaagaaaggcacatgaaaaatacagtgcgtttttccagagcaaggcagaagaactggatgagatctatgacaagctggtgaagaatcgtacagcgcaggcaagacttcttggatatgagaactatgtggaacttggatattaccggatgaaccgtaattcttatggaagagaagatgtggagaacttccgcagacaaatcaaagagtactttgtaccgcttgcagaaaagatgcatgacaaaagaagagaaagactgggacttgagaagctttcttatattgatgagaacatgtatttcgtggacggaaatccaaaaccacagggaactccggaagagatcatggcgaatggacagaagatgtatgaggagctttcactggagacaaaagagttctttgattttatgatggagaatgaactctttgatgtgctcggcagaaagacaaaaaaggccggcggttatatgacatatcttccgaaatatcgcgcaccgtttatttttgccaatttcaatggaacaagcggagatgtggatgttgtgacacatgagtgcggtcatgcgttccagggatatgtttctggaagtgatccgatcgaagagcattgggatatcacgatggagacagcagagattcattctatgtctatggaattctttacagaaccatggatgaatttgttttttaaagaagaagctgacacatacagacagatgcatctggaagatgcgatcgcatttattccgtacggatgcatggtggacgaattccagcatattgtctacagcaatccggatctgacaccggatgagagacatgcggcatggaagaagctggaggaagaatacaaaccacaccttgattacgaaggagatccatttatggaaaaaggtggtttctggcaaaaacagcttcacatttatgatactccgttttattatatagactatgtactggcacagacctgtgcgatgcagtacaaaatctggatggatgaagactacaaagcggcatggcagagttatctgaagctgtgcaggctgtctgcaagtgatttctatacagagatgttaaaagaagtggggcttcaggttccgtttgaagacggatgcgtacgcacactgacagaaaaactgggagtaatgatgaaataagagcccggtcgatgaatccgtgtttgtttccgcattttcagcaacagatgagtaatacggctatgaaaaaacagagtaaataaatcggaagatgcaggaatcaacataaatatttttcaaggaggaaaaaatatgaaaaagaaagcattagcttgccttttagcggcagtaatggcactttcacttgcggcttgcggcagtgggtctgacaataagaaaacaagtgaaaaaacagaatcacaggacacaaatacttcattagaagcaacaaaccagctgatcgaagcagaggatccttctgcacttcctgagacagcagcaaagagaaaagacacactgatcgcaggtgttgcagactttgcaggtgtattcaacccggtatactgggaagcaaatgaggatttccaggttgtgacagctacaacggcatctttgagtgtcaatgatgacaaaggagagatcgttgatggtacagcaagcatgtccgtttctgaggatggtaaagtttacacatataaactgacaaaagaaaaatacaacgatggatctgatgtaaaagcagaagactatgtaaattggtacaaagtagtagctgatccaagttatgatggatatcaggatatttctaaagtaaacgttgtaggatatgatgactacaaaaacggaagcgctacagaaatttccggtatcaaagtggtagatgagagtacaatcgagattactctggaagcagcaaacacaagtgcaccatacgtattaggttcagcagtgccgatctctacagcaaaatatggagatctgatcaagaaaggtgacctttctaaattcaaagcgatgaatatggttgattatgtatccaatggtgcatatgtgctgaaagagtacaaagaaaaaacatctgcaactttggtagctaacccgaatttctatttaggagagcctaagacaaagaacctgatcttcaaagtagttgctacaaatgcggaacttcaggcagtagaaacaggtgatgtagatattcacgaccaggttgtatgtgatgatgatcacatcgaagaggcaatgtcagctggattcatcaacttgaagattcagccaacacttggatatggttatgttgcaacaaaccagaaaaatgaaatcttccaggatgtaaaagtacgtcaggcactgctccacgcaattgaccgtaagtctttgaaccaggctgtttacggacagtatgcgattacactgaacattccacaggcaccaatttcatggttgtatgatgatgaaggtatggagacatacgattacaatcttgaaaaagctgcagaacttctgaaagaagcaggatgggaaaaagacggcgacaaactgatgaaagacggaaaacagatgaagatcgtcttcagtgcaatgtccggaaatgttgtaacagatactatgatccctctgatgatcgacgcatacggacagcttggtatcgacttccaggcagagtatgtagattggccgacactgcagtctaaatcccagaacggtacatttgatatgctgttcatggcatggggattgacagctgatccagacctgacaggtacatttgcaagtgcagaagcaggtggaactcagaaccgtacaggatatgcaaatccggaactggataagatgcttgcagaggcactggcttctacttcacaggacgagcagaaagaaaaatacaaagagatttacaaacttatcaatgaagaacttccattatatccgatctacgagagatgcgacctgatctgctacaacactcgtgtacagaacatcgagcagagctcttatgtaaaatggtatcagcaggataagatcgtcaacattgaagttgagtaatcaaagtactctaaaaaaataacaaagccgtaagacttgaagctcaaatagggatccagcgaggtttcccttcaaacaaacggcccgcagggggtggatacgaatttgattcgttctatttcctgcgggcaaaattaagttatttgatcatgagcaaaacagagtcaaataaagattggaggtttttaacaaatgtggaaatatgcaactcgccgtgttctcacgatgattcctattctgatcggtgtatctatggttgtatttcttttggtagcaagtctgccgggagatgccgttgatgctcatgcaggcggaaacatcacagcggagaagatagcgcagaacaaagcacttttaggattagacaaaccgataccggaaagatacgtaaactgggcaagtcatgcgatcagaggagattttggtatctcaatcagttacaagattccggtaacagaagtcatcggtaaatttgtatggaactcgtttttagtagctgctgtagcgttcatactgcaactattgatcgcgattccaatcggcgttatttcggcgaccaagcagtattcaatttttgacaatacattctcggtagtagcatttgccggtatttcactgccatcattcttcctggcaatgattctgcggcatgtgttctctgtcaagttgggggttcttcctcttgacggtatgataactgccggagcaaacaatacaggcggggcttatgttttagacgtagtgcttcatatgatccttccggttgtgacactgacagtgatccagttgggtggtaccatgcgttatgtgcgtacatccatgcttgaggtaatcaatcaggattacatcagaactgcccgtgcaaagggacttccggaaaaagtggtaatttacaaacatgcgttaaagaatgcgatgattccgattgtaacttatgttggtggtgcgatcccgggactgtttgcaggtgcaatgatcacagagactgtatttgcatggcctggaatcggtaaagtatttttggattccatcggaaaacgtgattatctgttcatgatgggattcaccatgttccttgcagtactgacgatgcttggaaacttactttccgacctgttatatggtgcggttgacccacgtattcgtttgaagtagaaaggaggaggacacgtgaaaaaaacacaagatgcaaataagaaaattgcaaaacaggcagcagagaataaaagcatggaatccccctggagacttgcgatgaagcgcctgtccagaaacaagctggcgatcgccggactgatctttttaggagtcatgatcgttctttgtattgtgggaccaatcgtatctccgtattcagatattacagcaactgatattgcgaatgcaaaacagccgccgagtgcacagcactggtttggaacagacgaaaatggacgagatgtctttacccgtcttctttatggaggacgtatttccatgacagttggtctggcggcgacagcacttcagatctttatcggtgcattattaggttgtaccgcagcatactatggcggagttgtggattttgtcatcatgcgtgtagtagacgttattctgtctctgccgacgatgccgattctgatcatgctcagtgccatgatgtcagactggaaagtggacaccggagttcgtgtatattatctgatggtaatccttgcggcgatcggatgggccggtacgtgccggtatatccgaggtcaggtactttcgatccgtgagatggattatatgtcagcagcggaatcacttggtatccgcgatctgcataagattttcaaacatattatgccgaatgttatcccgatcatcattgttacagcaacactggcaatcggtgatacgatcatcatggaatccaccatgtcttatctgggagtcggtgtacttcctccgatgtccagctggggacagatggtatctgcaggaacaaacctgatgacattcaaactgcgtccatggctgtggatgccggcaggattctgtatcttattgacagtacttgcggtgaaccttgtaggtgatggcctcagagatgcatttgacccgaaaatgaaacgctaagtaagttttgacaaggagaaaagttatggcatttatagaatttaaaaatcttcatacatggttctatacagacgctggaattgtcaaggcagtcaacggcgttgattttgagatccgcaaaggagagacagtctgtgtagtaggagaatccggatgtggaaagagtgttacttcactctctctgatgcatctggttcagtcacctccgggaaaaatcgtggatggtgagatcctgatggatggaagagatttactgaagctgagcaagagcgaaatggagcatgtcaacggaaaagatgttgcaatgatcttccaggagccgatgacttctctgaatccggtactcaaagtcggacatcagatcatggaaagtattcttttccatacagatgcaacaaaagaagaagcaagagcaaaagctctggaaatgataaaactggttggtattccgagagcggaagaaatcatggaatgctatcctcacgagctttccggtggtatgcgtcagcgtatcatgattgcaatggctctggtatgtaatccgaagctgttgatcgcagatgagccgacgactgcgctggatgtaacgattcaggcacagattctggatctgatgcgcaagctgaaagaggaaatggatatgtccatcatgctgatcacgcatgacctgggcgtcgttgcggagatggcagattacgtggttgttatgtatgccggaaatgttgtggaaaaaggaaaagtactggatattttccagaatccgatgcatccatatacaatcgggctgttaaaatcaaaaccgatcattggtaagaccaatcacaatgagcgtctgtattcgatcccgggacaggttccgaacccgatcaatatgccggagaactgccatttcaatgagagatgtgagttctgtcaggaaggctgtaaagaaaaagaaccaaaactggtacacgttggaaacggtcattatgttgcatgctttgtcaacgcaccggaaaaggaggaagtataaatgaacagagaaaatgaaatcattttggatgtccagaatctgaaaaaatatttcccgatccgtggcggtctgatcacaagaacagtcggacatgtcaaagctgtagatggaatttctttcaaactgagacgtggtgagacactgggaatcgtaggtgagtccggatgtggaaaatcaacagccggaagaacgatcttaagactgcatgatatcacagacggaaaggtcattttcaaaggagaggaccttgcaaaatgttccaaaaaggaaatgcgtgcaaaacgtctgcagatgcagatggtatttcaggatccttacgcttctttgaatccccgtatgacggtcggaaacatcatcggggaggctctgcttgatcacaaattgatgagtaaggcagaagcacgtgaaaaggtattggagacaatggaaatctgcggacttcctacgtattatatcaaccgttacccgcatgagttttccggtggacaaagacagcgtatcggaattgcacgaagcctgattctgaatccggaactgatcgtctgtgatgagccggtatcggcgctggacgtgtctattcagtcacagatcatcaacctgctcggagatcttcaggagagaaacaacttctcctacattttcatttcgcatgacttgtcagttgtagagtacatcagtaatcgtgtggcagttatgtatcttggaaatattgtggagatggcagataaaaatgaaattttcgacaatccgctgcatccatatacaaaagcgctgatgtcagcgattccggtgccggatccgacaagaaagagagatcgtatcattttgagcggagatcttccttctccgtcgaatccgccgtccggatgtaaattccgtacacgctgtccatatgcgacagagaaatgtgcacaggaagcaccggagtacagagatgtaggaaatgaacactttgtagcttgtcactatgtataaaatcttttgacaatacaaaaaatgtaaggaaaacttaaatttcgcccccggtaatcgcatcgggggcatttttcaaagagggcattatgaaaaatctattgaaactgggacagggaccaaggccggatctgctgtttgaagaggaagaaaaagcgaaaaagtcagacacacagccggatggacaaaagaagaaaatcgaatttgaaaaaggtcttcgcacagtcagaaaagaagccaaaaagaaagcgcgtgaagaaaagaaaaagcaggaaccgatcgagatgagccgaaaagacaaactggcagttattctggcattctgtgaacttctgcttccgcttgcaatcggagtgatggcaatttttgcatttcttatctggtttttaggaaaattctggctgcatgcatggtaaatggaaaaagagaatacaagaggggacaggcacttccgtgggaggtgctttttattttatacgaaaagctgcagccggtctgcatggaaatagaatttccaaaagaaaatcagaaagagaaaccagacaactgcaccaaaaaagaaacaagaaatgggacggctcgtatggacttttacaactaatcgagatataatgagattacatgtaaaaaattcgttttacaatgtaatttcgaaggaggaacaagaaatggcaagaaaaatgaaaaccatggacggtaaccaggcagcagctcatgtctcttatgcatacacagaagttgcagctatctacccgatcacaccgtcatccgttatgccggagcatattgatgagtgggcaacagaaggaagaaaaaatattttcggaacaactgttcatgtaacagagatgcagtctgaggcaggtgcggcaggagcagtacacggttctcttgcagcaggagcgttgacaacaacatttacagcatctcagggattactgctgatgattcctaacttatataaagtggcaggagagcagctcccgggtgtattcaacgtatccgcacgtgcacttgcaagccatgcgctttctatctttggagatcactctgacgtttatgcatgtcgtcagacaggtgcagcgatgctgtgtgaatccagtgtgcaggaagttatggatctgacaccagttgcacactgtgcagcactggaaggaaagattccgtttatcaatttctttgacggattcagaacatctcatgagattcagaagattgagacatgggattacgaagatctggaagatttagtaaataaagatgcaattgacgaattccgtgcacacgcactgaatccaaaccatccatgtcagagaggttctgctcagaaccctgatattttcttccaggcaagagaagcatgtaatccatattacgatgcacttcctgcaatcgttcagaattatatggataaagtaaatgagaagattggaacagactataaactgttcaactactatggagcagaagatgcagagcacgtgatcgttgcaatgggttctgtctgtgatacgatcgaagagacaatcgattatctgatggcagccggagaaaaagtcggtgttgtaaaagttcgcctttacagaccattctcagcggaagcactgatcaatgcaattccggattctgtgaagaagatttctgttcttgacagaacaaaagagccgggagcacttggcgagccactgtatctggatgttgttgcagcattaaagggaacaaaatttgatgcagttccgatttatacaggacgctatggattaggttctaaagatacaacacctgcacagatcgttgcagtatatcacaacgatgaaaaacagaaatttacaatcggtattgaagatgatgtgacacacctgtcactgaaagctgacgaacctctggtaacaacaccggaaggaacgatcaactgtaaattctggggacttggagctgacggtactgttggtgcgaacaaaaactccatcaagatcatcggagataacacagacatgtatgcacaggcatattttgactatgactccaaaaaatccggtggtgttacaatgtctcacctgcgtttcggtaagtcaccgatcaaatcaacatatttaatccgtcaggcaaactttgtagcatgtcacaatccttcttatgttgacaagtacaacatggttcaggaactggttgatggaggtacattccttctgaactgttcatgggatatggaaggactggaagagcaccttccgggacaggttaagagctacattgcaaatcacaatatcaagttctacacgatcgacggtatcaagattggtaaagaaatcggacttggcggacgtatcaatacagttcttcagtcagcattcttcaaacttgcagcgatcattccggaagaggaagcgatcgatctgatgaaagcagctgcaaaagctacttacggaagaaaaggtgacaagatcgtacagatgaactacgatgcaatcgatgcaggtgcaaaacaggttgtagaaatcgcagttccggaaagctggaaagatgcagcagatgaaggtcttacaactcctcacgttggagaaggcggaagagcagacgttgtagattttgtaaaaaatatccaggcaaaagtaaatgcacaggaaggaaatacacttccggtatctgcatttaatgaatatgtagatggttctacaccatccggttcttcagcatatgagaaacgtggaatcgcagtagatatcccgatctggcagccggacaactgtatccagtgtaaccgctgtgcatatgtatgtccgcatgcagttatccgtccgatcgcgctgacagaagaagaggcagcaaacgcaccggaaggtatggatatgatcgacatgatgggtatgccgaacatgaagttctccatcgcagtatctgcttatgactgtacaggatgtggatcttgtgcaaatgtatgtccaggtaagaagggtgaaaaagcactcgttatgggcaacatggaagcaaatgccggaaaacaggatttcttcaattatggaacagagcttccgatcaaaccggaagtggttgcaaaattcaaagagacaaccgtaaaaggaagccagttcaaacagccattgcttgagttctcaggagcttgtgcaggttgtggtgagacaccttatgcaaaactgatcacacagttattcggtgacagaatgtacattgcaaatgcaacaggatgttcttctatctggggtaactcttcaccgtctacaccttatacagtaaacccacagggaagaggtccggcatggtctaactcactgtttgaggataatgcagagtttggatatggtatgcttcttgcacagaatacgatccgtgaaagactcaaagcatctgtagaaaaacttgcagagaacggcgtaaacgacgatgtgaaagcagcagctcaggaatatctggatacattctcagtaggtgcaacaaacggaacagctacagacaagcttgtaaaagctctggaagactgtgactgcggatgtgctgagagagcagaactgctgaaaaataaagacttccttgctaagaaatcccagtggattttcggtggtgacggatgggcttacgatatcggattcggtggagttgaccacgtactggcaagcggtcaggacatcaacattatggtatttgatacagaagtttactccaacacaggcggacagtcctcaaaagctactaagacaggtgcgacagcacagttcgcagccggcggtaaagagacgaagaagaaagaccttgcaggaatcgctatgagctatggttatgtatatgttgcacagatcgcaatgggtgcagatttcaaccagacagtgaaggcaatcgcagaggcagaggcatatccgggaccatccctgatcatcgcttacgctccatgtatcaaccatggaatcaagaaaggtatgagcaaagcacagacagaggaacagcttgcagtagaatgcggatactggaacaacttcagattcaatccggaagctgagaagaaatttactctggacagcaaagagcctaagggagattatcaggaattcctgaacggagaagttcgttacaatgccctgatgagagcaaatcctgaaaaagcacagagactcttcgcgcagaatgaggctgaggctatggaaagatacgaatacctgaagggattggtaaatctctatgacggtacagcaaaagaagactaattcttttgaaaagtaaaattgaatcaatggtttgaaagaaacggcgccggggaaagtccggcgtcgttttttggaaacatgaattatacggttagatagcatttcagatgaatacattggatatttactgaaaaagaaaaaattcttcttcctctttctgtgcaatcgtgttacaatacaggaaagcattatttctggttttctaagcggaaccattccgcatcttttattctaaagtcatatcggaaaatctctatgctttgatatcaacttaaaacagcagagaggtttttagaagaaagatgtcggattgaaaacctcctgtaacgattcaattaaaggaggaagctttatgaagcaaaccacagaactcccggcaaacagactgtacaagtcacgtatttttgccatgctctatcaggataagaaggaattgctcgatctgtacaatgcccatcagtgaggctgtggagcaggcaatccgcgaatgtattgaggaagatattctggcagagtttttgacacaaaaccgagcggaggcgaagcaagtgagtatctatgaatatgatgaagaaaagcatatgaggcaggagcgggaggcatcctgggaagagggatgggaagaaggcagactatccggtataaaggaaggagaagagagaggaaaattgtccggcagacgggaacttctaaaggaactgattcaaaagaaattgctaaagaaaatgtcggtttctgaaattgcagaagagttggaagaggacgaaaagttgatttctgaattgatacaggaattggaataaaagggagaagaaatgtatggcatatgaaaagctttccagacgggcattggggtgcatgtatactgcggaaataatcggcgatgtgatctttattgttttaatcgggatcgtgaatatcttctggctgattccaaaacagattgaaattggaagatggatttcagctgttctgctgatttatgtggcagtctccatgctggtagaaccttatttccgttataacagatatcgatacagtattaatgaggaatgtattgatatacgggaagggtatctctttgtgaagagaaatattgtgccgattgaacgtctgcataagcttgagatatcaaaaggtccgattgatcagatctttcatgtggcaaaagtgactgttactaccgcaggaggagatgtaacgcttcgctttctggaggaagaaaaggcggaaaaaattgcagaaaatctacagaaacgtatcaatgagattgtgaaagaacagagggaagaagatggagaataagatcagatttcgcaatcacatttccgtgatactggagcagttgggagcaacatttggaattctttttgtgttgtcttttacgaacatcgacgatgtaattgattatattgaaaaggggtcatcggaagaattaagtctcacggtatatattggcggcggagtgatattggcggtttttctgctgatatttttatatcagtggatcatctggtcgaagacttacatttcgatctgtgacaacagtatcgtgattgagcgtaatacatggaataaaaagaaaaatacaattggtctcaaaaatatttcgaatgtaaatacagagcagaatttgttggaaatgcttcttggaacatgtaaagtgaagctggatacgaacagtatgtctacatcagataaaacagatgtaaagatcatattgaaaaaggcggaggctgagcagtttcgattatatgtgatgaagttaatgcagggacaggaaggaggctttgaggagaaatattcgaaagaagacaaagatcactgggcgattcaaacgaatatgggggatatttttacacatgggctgttttctgtcaatctgctttccgtattggtagtaattggatgcgttgtcggagcggcagggatggttctgcaagtgatacattctgtcagtgtgggagaaagtattgtaaaaatgctgttaagcgttcttatgctgatcgccatattcagttctgccatatggaatattgtaaaaggatttattcagtattatgattttaaaatcgatcggaatgaaaataaattatacattcgttatgggattttgaaaaaagtaaattacacaattccggcagagaaaatcagcgcactgaagttaaagcaaacattttttgcaagactgaccgggagatatacagcagagatcatcaatatcggaatgggggatgatgccgcggaaacccaatctttttttcttccgtactgtaaacgaaatcaaatggaagagcggattcgcttattacttcctgaattttatgaagcagtacagatgcagactgtacggcagccaatagcaacatggattgcctggatttggccggcagttctttttgcattgtttcttgtcgcaggagcactgctttctgtttattattttccggagttccaaaaggaaattattttgggagtgcttatttttagcatatggatgatattgcttgttcttgcatatttcctgacggcgggaagcactgtgggggtaagccatatggcgattgtaaatggatattttggaagagcaatttgttacatatcttacaaagatattcaatatgtagaattttcacaaaacatatttgccagagtggtgaagcttcaaaaaggagaggttcatctgcttgcatcgactgcaaaccggaaacaggagattccatatatctcgatggaaaacggagagacaatcaaaaaacggcttttgaatcggtgaaaggatcttgagacaggttttatagtacaacaaaaagaaatacaaaaaatggaggtgagagagtgattcggattgcaattgcggatgatgatgcagcgtttttagcaaaaattgaaaaatatatacaaaaatatcagaaagagaatggtgaggatattcagttgactgctttttcagatgcgaaagagctgattgaggggtacagtcccgtttatgatattgtgattctggatattgagatgcccgggatgaatgggatggaagccgcggagaaaatccgtcaggcagatgaagacgttgtactgatgttcatcacgaatatgatccagtatgcaattcgcggatattctgtgggagctttagattttgtcatgaagccggtaaattactacaccttttcattgaagcttacaagagctatcgggcggattcagaaaatagaaaaagagattctcttaaagcagcaggattcggtcaagaaggttcctgtggaggaaatctattatgtggaaatacagaacagaatgttgtattatcacacgagtgaaggcgaatatgtggtacgtgggacgataaagaatgcgttggatatgctttccccctatcactttgtaaagtgtaaccactggtatatcgtaaatttgaaatatgtgacagaggtcagggacagtacggtgattgtagcaggaaaagagctggagatcagtcagcgtaaaaagaataccttcctgaatgcactgatggactacgtaggagaaggaaattaacgatgagttggattgtgaatatactggcgacattgatctatcttggatttggtattatttatgcagtaggtttttcaaaaagaaagcattttcgatattctattgtagtgacagcggcagcaatttttctggcacaggcagggatgcttttattgtttcaggtggaaaactggtttggagcgatgatgtggatggcactgggatatgtgatgatgctgctgtcactgtgggtgaatgtaaaaatgacgatggcggtcgcatcttattatgcagtatgggcatcctgtacctggtgtcttgcttatgaactcagtatggtattctgctggctactgcgaaaacgctgggagatcccggcagaagtatttccgattgttttgctgctggtaggaacagccggggtgattgtctgccgttacacagtggcaatctggattccggaaaataagcggtttatgattgggccgagacagctgacctcagcgctggttttgctggctatgcagggatacctgtttttgtggtttgtaaaacagtgtgtgaacaaccgaagcggaggactgcagggaggaaactggttcagtgttttgcagatgcagatattgtgtgtggttgtattgtatctgcagaatgagttatttaaaaagagtgccatgcgtcaggagcggctggtttcggatcttctctggagacagcaaaaagagcactatcggatcgcgaaagagaatattgatatcatcaatcgaaagtgccatgatctgaaacaccagattgcagcattgcgggacatgtgcaccaaggaagaacgggaaaaatacatcgaagagattcaggattccattcagatttatgaagcaatggtaaagacgggaaatgatgtgttggatacgatcctgacagagaagagccttgcatgcaaggagaataatattgtggtttcctgcgtggcagatggaaaaggtctggagtttttgcatcctatcgatctgtatacgatctttggaaatgcaatggataatgccattgagtgtgtgaaaaatttacaaaaacaggaaaaacgtcaaatcgatgtactgatccacagacaacatcagtttctgatcgtccagatcatgaatccggtagaggaagagctggaatttgaggacaatcttccggtaacaacaaaacatgacaaggcttatcacggatatggactgcgcagtattaagaacagtgtgaaaaagtacaatggggtatttcaggtaaagatcaaggatggatgtttttgccttaaaattttatttccgataaaagaatagtatcaaaaagttccaatgcatttcggacattggaacttttttgcacttatgcgtgcaaaaataccacttagtcaaaagcggttgagtaaaaattgtggaattgttaagatagtatcaatgcgaaaagaatgctcttatgttttaagctaagagtgcaattgggaggaattgagtaatgaatgaaacaaaacaagagaaaaaagtgcgaaagaaagcctatcgcaaggcgcgcagaaaagcaacacgtccgtggaaggggctgacgttttttagcgggatcatttccattgtactgattccgatattagtatttttgtcgatgtttgacaatacagttgcagcgtttgtcggcggttcattctggaagttgaagaatgaagataaaaatgcagtatactatgaatctgattttgaaacaacagaagaaattgaataatccggcttccgtgtccatgctgtccggac

SEQ ID NO: 6959 - DNA, 125155 bp, Unknown
  gut microbiota DNA sequence
ttagatttttgtcttgacaactgaaccactatacacctacgatcagggaaacacggaattctttaaacatgacccggaacagatcagaaaaacgaatctcgccgagtgcaattccgcggatgatcaatgtagaactctgagaaccgcagtttccgccggtatccatcaacatgggaataaaggatacaaggagcgggattgcggcaaatgcatttttatatttggtaatgatacttccggtgatggtagaggaaaacatcaggatcaaaagccaggcgatccgatgtttggcatgcgcagcaacagaagtatcaaaataagtcgtttcactcgggctcatggcagccattttggtaatgtcttcagtcgcttcatctaccataacatccatggcatcatcgaatgtgacgataccaaccattcgttcatcctgatccagaacaggaatggcaagaaaatcgtatttagtgaacagttgtgcgacttcttctttatcagtgtgcgttgtgacggagatgatctctgtctgcatcagatcccggatcagaatgtcatcagctgtcgtcatcaggtcttttgcactgacgattccaagcagtctgcgctgatcggtgacatagcaggtatagatcgtctccttgtggattccggtctctttgatatgtgccatggtctgggcaacggtcattgtctcccggatatcgacgtattcagtcgtcataatacttcctgcactgtcatccggataattgagaagctgattgatcagattccggtcagattgattgacagtgtccagaatacgattgacaagattagctggaagttcctccagcagatccactgtatcatccatgtaaaggtcatcgagcagttcttttaactccttttcggaaaacatctctaccagataagtctgcatggaattattcatattggcaaatacttctgcggctttatcctttggaatgagacgaaaagcaagtgcaagttctttgtcttccagatcggaaagaagtgaggctatatccacttcgttcatcacatccagaatgcttctgacagctttgaactggcgctgcgcaaggagttttacaaaaatttctttgttcatagttcattactctcctttttctatttaattttctgaaaaatcccgaaggatgactggctccagcgtccataacctcaccaccttttgtcgtgtattaaaaatatctgcaaaagaaaaagcgtcattgttgtagcaatgacggtgtgtgcagcaaattttcgcttttattctatctcaaaaaaagacaggatgtcaagaatattgttactgtgaacaggaacagaacatttgcgaacagtaacggaaacaggggttattgatttacagtttcaccttgttatgctaaaatgaaacaacaggaatcagcaaaggagcagaaaaatggatgcatatacaagttttgcggcagtgtatgatacctttatggataatattccatatgaagaatggaaaagctatctggaggaattgttaaaagagtatggcgtgcaggacggtctggtgcttgatctgggatgtggaacaggaaccatgacggaacttcttgcagcagatggctacgatatgatcggagtggacaattccgaggaaatgctggagatcgccagagaaaagcagatcaagtcaggacatgagattttatatcttcttcaggatatgcgggagtttgaactgtatggtactgtgggtgcggtatttagtatctgtgattctctgaattacattacagagccggaagaattgaagcaggtatttcgctgggtgaataattatctggatccgggcggaatttttatttttgattttaatacagaatataagtaccgggaggttctgggggatcagaccattgcagaatccagagaggactgcagttttatctgggataattattattatgaggaagagcggatcaatgaatacgaactgaatctgttcatcagagaagatgcggaaagtgagacagagggtgatctctatcgcagattccgggagacacatttccagagagcatatacgttagaagagatcacaaggattgtggaagaatccggactgcagtttgtgactgcatacgaagcgtttacaaaagaaccgccttctaagaacagtgaacgaatctacgtgatcgccagagagcagggaaaggtacctgtgaaaaaagcagaatagaatcattataatagaagaaacaggagagataagatgaaagattatattgtaagagcaacagcagcgaatgcgcagatccgtgcgtttgcggcatcaacaacagagcttgtggaagaggcaagaacaaggcataatacaagtccggttgcgacagcagcacttggacgacttcttacagcaggtgcgatgatgggaagtatgatgaagaatccgacggatgttttgacgctgcaggtgcagtgcggaggtccgatcggagggatgacagtgacagcagacagtaagggggaagtgaaaggatatgtacacaacccggatgtgatgcttccgccgaagaacggaaaactggatgtaggcggtgcgcttggaccaggatttttaaatgtgatcaaggatatgggactcaaagaaccatattccggacagacgattttgcagacaggagagatcgcagaagatctgacctattattttgcaacctctgagcaggtgccgtcttctgtgggtctgggtgtgctgatggaaaaggacaataccgtgcgatgcgcaggtggatttatcgtacaggtgatgccgtttattgaggaggaagtgctcagcaagctggaagaaaacatcaagaatattcagtctgtgacagcaatgctcgacaatggccatacaccggaagaaatgctgaaccacgttctggagggattggatgtagagatcacagatacacttcctgcaaaatttgactgcaactgttctaaagaacggattgaaaaagcaatcatcagtgtcgggaaaaaagagattcaggagatgatcgacgatggaaaggatatcgaagtaaaatgtcatttctgtaataccgcctatacattttctgtagacgagctgaaggaacttttgaaaaaaagcagatagaagtgatgtgtccaaatagggaaagtgaggcagtagaatgaaacagggatttatcaaagtggcagctgccacaccggatatccgggtggcggacgtgccgtttaatacaaaacagatatgcagtgccattgaagaagcacagaacaatcaggcaaagatcgtggtatttccagaattgtgtgtcacaggatatacatgcggggatctgtttacacaggatgtacttttgcaggcagcaaaacaggcactgcttgaaatcacagagtttacaagagagaaggacatgcttgtgtttgtgggcgtgccgcttgtggtggatgcaaagctctacaatgtggcagcagctctttgcaggggagaaatcctgggactgacgacaaagacatttcttccgaactatggtgagttctatgagatgcgtcagtttacggcaggaccggatgtgccgggagaaatcctgtttaacggtaaaaaagtgccgtttggtccggggcttttgtttcaggcatcctctatggaagagctgatcgtatcggcggaaatctgtgaggatgtgtggtcgccgattccgccgagcatccgtgcggcaatggaaggtgcaaccgtgatcgttaactgttcggcaagtgatgagacgatcgggaaagacagctacagacgggatcttatcaaaggacagtcagcgagactgatcgcgggatatatttatgcaaatgcaggcgaaggggaatccacgacggatcttgtatttggaggacacaatctgatcgcagaaaacggcagtatcctggcagagtcaaagcgatttgaaaatcagatcatttatacagaactggatatcaaaaggattgtcggtgagcgtcggaaaaacacgacatttacgatggaaaaagagaaagtgctgccaagaatctcatttcctctggatgtgtgcgagacaaaactgacaagagagtttccgaaaaagccgttcgtgccgcaggatgaaaaagaacgtgctctgcgatgcgaagagattttgacaatccaggcaatggggctcaaaaaacgtctgctccatacccacgcaaacacggcggtagttggtatttcggggggattggattccacattggcattgattgtgacagcaaaagcgtttgacatgatcggaaaagataaaaaagagattcttgcgatcaccatgccttgctttggaacaacggacagaacgtatcggaatgcctgcaaaatggcagaacagctcggagcgacgctgcgggaagtgaaaattgcagattccgtaagtcttcattttcaggatatcggacatgatccgaaagaccacagtgtaacgtatgagaatgcgcaggcgagagagcgtacgcaggtattgatggatattgcaaatgcgacaaacggaatggtcatcggaaccggagatatgtcagaactggcgcttggatgggcaacctacaatggagatcatatgtcgatgtacggagtgaatgcttctgtaccgaagacgctggtgcgtcatcttgtcaaatatgcggcagacgtgactgcggatccaaaattgcaggaagtcctttatgatgtactggatacgccggtcagccctgaactgcttcctccaaaagacggggatatcgcacaaaagactgaggatctggtgggaccatatgagctgcatgatttttatctgtatttcatgctgcggttcggatatgagccgggtaagatctatcggcttgcaatgcagacatttgaaggggtatatgagaaagaaacaattttaaaatggctgacaacattctgcagacgatttttcaaccaacagtttaagcgctcctgtctgccggacggaccgaagatcgggacagtggcactctcaccaagaggagactggagaatgccaagcgatgcgtgtgcccaagtgtggatgcgtgatctggagaaaatttccttataagcattgaaaagagaggtgtttagaagtatgaaactgatcaagaccgaggatgcagtgggctgtatgctttgccatgatattacgcagatcatcccgggggtagtaaaagatgcggtttttagaaaaggacatgtagtgacaagggaggatattccggttctcctttccgttggaaaagagcatctgtatgtgtgggaaaaacaagaagggatgcttcatgaagatgaggcggcagagatcctgcgcagcgtgtgccagaatgcacagatggatgcgtcaaagccaaaagaaggaaaaatcgagctgacggcacagtgtgacggggttctgaaagtggacaaggagaaactgtgtaggatcaatgccatgggacagatgtgtatttcttcccgacacggaaattttccggtgaaaaatggcgataagatcgcaggaatgcgtgtgatccctctggtgatcgaagaagaaaaaatgaaacaggtaaaggagatagcaggagagactcctgtttttgcgctccttccgtttcagaagaaaaaagcagcgatcgtgacaaccggaagtgaagtatatcacggaaggattcaggataaatttactccggtggtccggcagaagctggaagaatatggagtagaagtgcttggaaatacaatctgcaatgatgaaccggatatggtgacagaggcagtcaatgactggatcaaaaaaggtgcgcagatggttgtgtgtaccggaggaatgagtgtcgatccggatgataagacaccgctggcaatccgcaatgcttccgatgaagtgatcacatatggcgtcccggttttgcctggtgcgatgtttatgctggcctataaaggtgagattccgatcatgggcctgccgggctgcgtgatgtatgcaaggcgtacaatcttcgatctggtactgccaagactggtggcaggagaacggctgcaggatcaggatttttacagactcggagaaggaggactgtgtctgtcctgcgaggtgtgtacgtttccaaattgcgggttcgggaaagggtaatgaaaaaggagcgtgaaaggatgagtgaattttataattctctcgcagaaaaaatgcagagtggttcctgtgttgttatgacagtattagagggagaatcggcaggaaagaaattacttgtgacagagccggtggagcaatatgagggacatgcagtgttttgtgagcgtgcaggttctcagcccaggctggtgatctgcggaggcggtcatgtgtccatacctatgatccggatggggaaaatgctgggatttcaggtgacggttcttgaggatcgtcccaaatttgcggacaatgcaagagtggcaggcgcggatgtggtgatctgcgattcttttgagcatggacttgaaagcatatcaggaggagaagatacatattttattattttgacaagaggacaccggtatgatgaagtgtgtctgggagcaatcgtagagaagccaaatgcttatattggaatgatgggcagccgccgcagagtggcgatcgtcaaagaagagctttttgagcagggacatgaacgtgagaagctggatgaggtgtacacaccgattggtctgaagatcggcgctgagacaccggaagaaattgcggtgtctgttatggcagaaatcattcaggtgaaacatgaaaaagcagaaggatgcggatattccaaagaattgttggaggcgctgtgtgatgaggactgtaaaaagcagaaaaaagtacttgcaacgatcatttccagaaaaggatctgcaccgagaggcgtgggaacaaaaatgctgatcctggaggatggaacactgatcgacacgatcggaggcggatgcgcggaaagtgatgtgatcacaaaagcactgctgatgatgcgggaagaaaaagtgcggtttcagatttgtatggtggatatgacaagggaagctgcagaagaggaagggatggtctgcggtggacggattgaagtaatgctggaacgagtttagtatccgttactgttcacagtaacttcgtataccggattcatttttcatggaagagctgttgacattcaaaatagggaatgttaatataaatttaacatagtgaaagcaataattgtgcgaattgcataaaatggtgcttatataggttcataattggttggacgtatctaccagctgccgcaaacagctgactataagcagagtgggatgggaaagtcccggtctgtagtcgggcggaaagagtaggaggtcagtcaatgaatgaacctgtttttatattaaaagggaatgttgtatacagcaaaaataaagatgaactaaggatcttaaaggatcactatctgatcagcgaaagcggtctggtcaagggggtttttgagaaagtgcctccagaatatgcacaggtatcggtatctgattatggggagtgtctgattattccgggactgacagatctgcatgtgcatgctccgcagtatacattccgggcaatgggaatggatatggagcttttggaatggctggagacgaatacgtttccggaggaggcaaaatatcaggatctggagtatgcccggcgtgcatatcgtatctttactgacaatctaaagagaagtgtaacgacaagagcatgtatttttggaacgatccacagagacgccacactgcttttaatggatcagctggaacaaagcggactggtgacgtatgtgggaaaagtgaatatggatcgcaactgtccggattatctcagagaggaatcggcagaagaatcagggattcagacagtggaatggatcaaggatgtattgcataaaaaatatcagaataccatgccgattctgacgccaaggtttacaccgagctgcagtgatgaactgatggagaatttaaagaaaattcagatgtattaccagattccggtacagtcacacttatcagaaaatccgggagagattgcctgggtgaaggagctttgcccgtggtcggagttttacggggatgcttatgacagatttggattgtttggggcagactgcaaaaccgtaatggcgcactgtgtgtattccggaaaagaagagcggcagcgaatgaaagaaaacggagtatttatcgcccattgtccggaatccaatatgaacttgtcatcgggggtggcgccggttcggacattcctggaggaaggaatgcatgtgggaattggaagtgatgtggcagggggctccacagaaaatttgttcaaagcaatggcgcttgcaatccaggcttccaagctgcgctggaggatgcaggatgacagtttaaaaccactgacattggaggaagtattttacattgccacaaaaggcggcggtgaattctttggaaatgtgggaagctttgaaccgggatttgaactggatgcagttgtcctggatgacacaagaattgtgcattcgcaaaatctggatgtgagagcacgtctggagagaatgatttatctggcagatgagagagaagtacgtgcgaaatacgtgcgaggcagagaaatctgtctgcaataaaaattgggaatgtcaaaataaattgcggaggtgacgtatcatggaggaaagagaacatgtggtcggcaagagtgtaacgagagtggatgctttggaaaaagtgaccggacgggcaaaatatacggaggatctgtgtgataaaagcgcttatattgcgcgggtactgcatgcggatatcgctcatggaatcgtaagatcagtggataccagtgaggcgcaaaaactttccggggttgtaaagatcgtgacttgctttgatgtgccgaaatattatttcccgaccgcgggacatccgtggtctacggatcctgcacatcaggatgtcaaagaccgcctgcttttaacggagcatgtgcggttttacggggatgatgtggcagcagttgttgcggagaatgaagtggcagcagctcaggcgctgcggctgatcaaggtggagtatgatccccttccgtttgtgctggatgtacaaaaggcaatggaagaggacgctccgcagcttcatgaaaactatccgggaaatgtattgaaacacacttcgatccacaaaggggattttgaaaaagcaaaagaagagccggggctgatcaaagtggagggctggtatcagacaccgaccgtgcagcattgtcatatcgagaattttatctgttatgcgtatatggaacagggcaggtacgtgatcgtctcttctacgcagattcctcatatctgcaggcgggttgtcgggcaggcgcttggaatcccatggggaaatgtgcgagtgatcaagccatacataggaggcggttttggaaacaagcaggacattctatatgaaccattgtgtgcatatctgtcacagacagtcggtgggcggcttgtaaagctggatgtgtcacgggaagaaacgtttgtatgtaaccgggtacgccatgctatcaggacacatctgatctcttatgtgcgtccaaatggtgagatcgctgcaagaaaagcggagtgcttttccgatcagggggcgtatgcatctcatggacacagcattggagcaaaggctcttggatctttcccgcagctgtatccgtgtgagaactttgagggagatgtgtacacggtatttaccaacaaaccggtatccggagctatgcgcggctatggaattccgcaggcgatgtttgcgatggaaagccatacggatgacattgcggtgaaacttgggattccaccgtatgaatatcgctggaaatatctgatgccaaaaggatatacggatggattttcaaaaaatgtcaattattatgataccttcagggaatgcatggaaaaaggcagtgtcagtgtagattatgagcgaaaacgtagagaatatgcacaacaaaccggggatatccgcaaaggaatcggaatggcggcattctggtacaataccggtgtctggccgatttctctggagacatcctcctgccgtatggtcatgaatcaggacggttcgattcaggtgcaggtaggggagacggagattggacagggcgcagatactgcatttgcgcagatggcggcagagacactggggattccgtttgatatggttcatgtgatgaccatgcaggatacggatatcacaccgtttggtcttggagcctatgcgtccaggcagacctatatggctggattttccattcggcagacagcagagctgttaaaaagtcatgttttggatacggcagtggagatgacgcggcagatgaaagaaaatctggatattatagatggaaacattgtgcgtgcgacagacggcagtgttctgatgtcattgggtgagctggcaacagaaaaactctacagcctgactaactgcggacatctcacggcagagagtacctatcagatcaaaaataatgcctactctttcggctgtacctttgcggaagtagaggtagatattccgggatgccgggccacactgacgaatatcgtcaatgtacatgactgcggaaggctgatcaatccggcgctggcggaagcgcaggtgcatggaggcatgagtatgggaattggattcggactttccgaagagctgaaatttgatgagaaaacgggaaaacctttgaacaataatcttctggactataagatggcgacatttgaagatcatcccgatctgcacggggagtttgtggaaaattatgagcccaccagtgcttacggaacgaaagctctcggagaaccgccggtatgttcggttgcgccggcaatccgcaatgcgattttaaatgcaaccggatccgggctcaatgagcttccgctgaatccgcacaggctgtttgcaaaattccgggaagacggattgatttaatggggaaaggtcgtgaacgaatatgtatgatatcaaagcgctctatgaagcagaaaatgtacaggatgccatccgccttctgacagagcatccgcaggcacagatcattgcagggggaagtgatgtgctggtccagatccgtgagggaaagcgggcaggagtggaacttgtcagtatttatgggctggatgaattaagaggagtgagtctggaagaagatgagacgctcagaatcggatcactcaccagtttttcccatatcacaaaaaatgaactcatccagaaatatattcccgtccttggggaagcggtggatatggtgggaggtcctcagatccgcaatatcgggactatcggaggaaacacatgtaatggtgtgacttccgcagattcggcatctacgctgtttgcgttggatgcgatcatagaactgacaggcccggaaggcatcagaagacttcccatccgagagttttatatcaaagccggaaaagtggatataagacagggagagcttcagaccgggattttgattccaaaacaatcatatcagggataccggggacattatattaaatatgccatgagaaacgccatggatatcgcaaccctcggatgttctgccaatgtaaagctttcagaagataagacggtgatagaggatgtcaggattgcgtatggtgtggcgggaccgatcccgatgcgtgcagtccatgcagaagaggcaggacgaggaaaagaagtatctgcacggatactggaggagattgcagagcaggtgctttttgatatccatccaagagacagttggagagccagcaaggcatttcgggagcatatcgcaagagttttatgtcagcgcgctttaaaagaggcgattgtcaggacaggaggtgtcatccatgagtgagaagcagtataaattggtaaaatgcaccatcaacggagaatacagggagaccatggtggatgtccgcgcatcactgacggatatgctgagaaatgattatcggctgaccagtgtaaaaaaaggctgtgaagtcggagaatgcggagcctgtaatgtgatcattgacggcgagtgttttaactcctgtatttatctggcagtatgggcagacgggaaaaatatccggacactggagagccttctgggaccgaatggagagttgtcagatatccagcaggcgtttattgatgagactgcggtacaatgcggattctgcacaccgggagtgatcatgagtgcagtggagattttagagtcaggcaaagaatatacaagagaagaattacggaaacttttatccggacacctgtgccgctgtaccggatatgaaaacattttgaatgcggtacaaaagaccatgtacaaacgactgggaaaaactgaaaattaggatttaggtgctgtcgcataagttctttttggaaatctggacacaatatctgtaaaaagaaaggacagattatgaaaaagaatatggctggattgattctggtactatttgcgatagcactttttatgaccggatgtgagaaaaaagcgcaggaaaaagaagaagcgcaggaggcgtctgccagacagctggtgatccagaaacagacgcagacagaaatcgcagaaaaaaagatcgaagaaaaaagacgagagctgcccaagcaggcacagatcgaaatggaagtgatcctgcagaagccggaactaccgaccgggtgtgaaagtgttgcgctgaccatggttttgaaacagaaaggatatccaatcgaaaaaaccacgattgcagaagaatatctgatctacaatcgggacaactatgcatccgggtatgtgggagatccctctacgtatggaggagtgggcatctatccgccaggacttgtaaatacggcaaaccgctttttgaaacagcgatatcagcagcatacagcgtatgatgtcagcaagctgagtctggaggagctgtttccgtatgtggcagctggaaatccggtgcttttgtggctgacatcagatctggaagatccctatttttcgagccagagtgtagagtatggaggggattcatatcgatggtactggaatgaacactgtgtggtgcttggtggatacaatctggaaaagcaaagcgtgacgttgtttgatcccctgaaggggaaagtagaggaatctcttgagcgggtagaggaaatttatgatcagacagggaaatatgcaatgacggtatactaaaaaacatctgtggagaacaaaaaataaagttcttcacagatgtttttttatggtctgctgtgtgattcaatatgatttttgatcgcttcaaaactttctttgctgatgatgtgttccatgcggcaggcatcttctgcggcaatagcttcatctaccccaagttgtgtcagccatgcagtcagaagcttgtgacgctcataaatcatatcggcaatggcttttcctgattcggtaagatagataaatccttccttcgtaaccgtgatatgttctttctcacgaagattcttcatggcaacactgacgctggattttttgaatcccagttcttcagcgatatcaacagagcgtacaaccggacgtttctgacttaagatcagaatcgtttccagataattttctgcagattcgtttgtcttcaatgtatgcacctcgtttctcgttaaattgtctttagtatatcatattttagaagagacggcaaacactataatgttattgacaacttatgaatgttagaatatactaactaatgagaaaaaatagtcagtaacagattcaaaaggaaaggggagcggactgtgaatgatgtgaaaatgcaaagagagatgattttgcagagattgaaagagcagggatgcaggattacaaagcaaagattggcgctcattgacatcattttagaaaatgagtgctccagctgtaaagaaatttattataaagctgtcagaatggatgagaagattgggattgccacggtatacagaataataaatatgctggaagaaatcggagcgatcagcagaagaaacatgtataaagtagaatgtcccggagcttgtccgaaagaagatgcctgcgttgttgtgttggatgatgaaagcgtgtgccggatttctccccagaaatggaaagctatcgtagaagaggggctgcaggcatgcggatatcttcatgaccggaaagtggtatctatttcttttaatccggaacagtgcatgaagggcatgatctgagagaaaacataaaaaagagattgacaaatgaaagggataagagtaaactgaatattgttagaaacgcctaacgtataatagttttaaaatataaaagttagtagtgattggaaaggagagattatgatgcctttgacgatggcagcagcaaacgaaatcaattatattaagaaagtcggaggaaacagtgaagtgaaacgtcacctggaaactcttggatttgtagccggaggagaagtgcaggtgatttctcagttaaatggaaatctgatcgtaagcatcaaagattccagagtcgcgatcagcaaagagatggcaaacaagatcatggtctaaaggaggaagagggaaaatgaagacattgcgaaatattgccgtgggtgagactgcaaaagtgaaacgacttcatggcgagggggccttaaaacgccgtatcatggatatgggaattacaaaaggcagccaggtttatgtacgcaaggtggctccacttggtgatccggtcgagatcacgatccgcggatatgaattgtctttgcgaaaagacgatgcggactgtattgagatggagtaaagaaaggaaagggagagagtgatggcgattaaaattgctttggcaggaaatccaaactgcggaaaaacgacgatgttcaatgctctgacaggtgccaatcagtatgttggaaactggccgggagttacggtggaaaagaaagaaggaaaatgtaaggaaaataaggatgtaattgtaacagaccttccgggaatttactctttgtctccatatacactggaggaagtggtaagccgtgactatttattaaaagaaaagccggaagcgatcatcaatctggtggatgccacaaacattgaacgaaatctgtatctgacaacacagcttttagagcttggaattccggttgtaattgcgctgaatatggcggatctgctggaaaagaataaaatcagcatcgatacaaaagcgttggaaaaagaactgggatgtaaagtagtcaaaacttcagccttaaagggaaccggaattcgcgaagtagtgaaagaggctgtcacagcagcgaaaaaagaaagcattgtttcaggagaaataaagttttcaaaggataccgaagcggctgtttccgagatggaaggacagttgccgtcatccgttttagaagaacagaaaagatggtatgcgatcaagctgctggagcgcgatgcgaaagtactggagcagttaaaactgactgcatctgtacagaatcaagtagaaaaaatcgctgccaaactggaagaaaggctggatgatgacacagaatctattattacaaatgagcgttatgaggcaatcacatatgtagtagaaaaatgtgtaaagaagccaaaagaaaaactctcgacttcagataaaatcgaccagattgtgacaaacaggatactgggacttccaatctttcttggcgtgatgtatgttgtatatgcgattgcagtaatgaccattggaacttatgtgacggactggaccaatgatgtactggtagtagcgattcaggacgcggcggcatccggactgcaggcgatcggtacagcagcatttctggaagatctgatcgtaaacggaattatcggtggactgggtgcagtacttggattccttccgcagatggcgattttgtttgtattgctctctattctggaagactgtggatatatggtcagagttgcctttgtcatggaccgtattttccgtaaattcggactttcaggaaagagttttattccacttttgatttcatccggatgtggaattcctggaattatggcatccaagacgattgagaatgacaatgacagacgactgacgatcatgacatctacatttgtaccttgtggtgcaaagcttccggttatcgctttgatggctggtgtgatcggttcagaggcgacaggatttccggcaggatccctgacatttatcatgtacgtgattggtgttgcgacagtgctggtttccgcaattattctgaaaaagacaaaaccgttccacggagatgcggcaccgtttgtaatggagcttccggcataccaccttccacaggcgaagacagtactgctccatacatgggaaagactcaaaggatttatcagaaaagccggaacgatcctgctgctagcttgtatcgtaatgtggttccttggaggatatggatttatagatggaagctttggggcagtagaggattctgcagacagtattctggcatccatcggaagtgtgatcgcagtgatctttacaccgcttggatttggaagatggcagccggtggcagcttctctttccggattctcagcaaaagaagcaatcgtaacgacaatgggagttctggcaaatgtagccggagatacagaagacccggcagttgtagcacacggtgtcgcaacatggttcccgtcagcggcagccggattcagtttcctactctttaaccttttggattcaccgtgtctggcagcgatcgctaccatggcaaaggaactcaatgacagaaaatggttctggtttgcaatcctgttccagaatgtatttgcatacgtagtaacatttatggtatatcagatcagtggtgttgcgacaggtgcgcttacatttggagcatctacagtagttgcaatcctgctgctggcagttgtcttatatctgttattcagaaaagatccatataaaggaaaagcagtgagtgtaaaacgttctgtggcagaagcctaaaggagaaaaaatgggcggaataaaatcggtagtatctatgggatacgcggtattgtttgtaatacttctttatttagttggcattggaatctcgagtctgatacaatatataaaaaagaaatttagaaggtgataatcgtgaatgcagcaacatgtattattttgatcattttaattgtaattgtttcgttttcaatccgtgcgacgattcgtgatcggaaaaaaggcggatgtgcagggtgctccggatgcggcggaagctgcagcggatgtcatagtgaagtggaacagacaaagaaatccgagtaaataagagcagaatgaaaagtgtggtatcagcagagtgtaaaatcttgaaaaaatgcactgtggtaccacacttttttgatagaaaaattgataaaatttatcgataatcggatttttgattgacgaatgaaaatcagggttctagaatgagtgtaatgtaaccagaaagtacaagtgatcgatggattgtagaaagaagggaaacagatgaaacaacaccgattttgggcgtgggcaacagtatgctgcgcagtaatggtattttataccggttacaaacataagtaagatagaaaaagagaatcagtttacaggaggaagaaaagatgttagatgtatttaaaatgaaaaaattagggatttttgcaggtggtgttttattcggaacagcaggagtgaagctgttgtcaagcaaagatgcaaaaaaagtgtatacaaattgtacagctgcagtgcttcgtgcaaaagattctgttatgaagacagcatccactgtacaggaaaatgcagaagatattctggcggaagcaaaacagatcaatgaagagagagcagcaaaagaagcagctctggagcaggaagcagaagaagtaacagaagagacagtggcagacaacacagattttgcagaagaggcataagataaaaagagggatttgattgaagtttataattaagcatgaaataccgggaagaatacgggtgcatatggtgcagccgaaaatgacgtttgaagaggcggatattctgctgtattatctcgtaaacctggaaaatgtgacaaaagcaaaagtatatgaaagaacacaggatgcggtgatctattatgaaaaggaccggcgggaaatcatcaaggcactgcagaagtttgggtatgatcgggtgacagtgccggaggggctgactgagcattccggaaggcagatgaacgcagaatatcaggaaaaactgctcatgaaagtcgtgatgcgttttggtgggaagcttctgataccggcaccggtacgggcggtctggacaggtgtccgttctctgaaatatctgcagcaggggatcgcgagtctgaaaaaaggcagactggaagtggcggctctggatgccactgcgatcggtgtttccatcctgcgcagagatatgaataccgcaagttcgatcatgttcctgctcggcatcggagaattgctggaggaatggacacataaaaaatctgtcggagatctggcacgcgacatgtccctgaatgtggggaaagtctggattttaagagaggaacaggagattcttgttcccgcaaaacagattgaaccggaagatcttgtagtagtccgcatgggaaatgtgattccatttgatggagtcgtatcccgtggtgaggcaatggtcaatcaggcctctatgacaggagaagcagttccggtgaaaaagacagcggaaagctatgtatatgcaggaactgttgtagaagaaggagaactgatcatctgcgtgaaagcggtgagcaaagcaacccgttttgaaaaaatcgtgaccatgatcgaagagtctgaaaaattgaaatcaaatctggaaagtcatgcagaacatctggcagatcaactggttccgtatacactggcaggaacgattctgacctggctgctgacaagagatgtgaccaaggcactggcagtactgatggtagatttttcgtgtgcactcaagctggcgattccaatttcggtactgtctgcgatccgggaggcgggcgcacataatattaccgtaaaaggcggaaaatatatggaagctgctgcaaatgccacaacgatcgtgttcgataagacggggacactcacagaggcgcgaccgacggtacgaaaggtggtttctttctgtgagcagagtgaggatgagctgctgagaatggcggcctgtctggaggaacattttccacattccatggcaaaggctgttgtggaagccgccagaaaaagagggctggagcatgaagagatgcacagcaaggtcaattatattgttgcacatggaatttcctccacgatcgaaggaaaacgcgtggtgatcggaagtcatcattttgtattcgaagatgaaaaatgctcggtcagagaaccgtggatccgacagtttgaaacacttccggaagaatgttctctgctctatcttgccattgagcatgagcttgctgcagttgtatgtattgaagatccgctgcgcaaagaagcggcagatgtagtgcgtgctttgaaggcaacagggcttgagaaagtcgtgatgatgacaggagacagtgaaaaaacagctgcttctgtggcgagaagagttggtgtggatgcatattattcagaagtgctgcctgaggataaggcaaaatttgtggaacaggagcgcgcatccggccgtacggtgattatgatcggcgacgggatcaacgattctccggcattgtcggcagcaaatgtgggaattgcaattcgtgacggtgcgcagatcgcacaggaaattgcggatatcacaatctcggcagaaaacttgtgggaaatcgtaatgttgagaagattaagcgaggcgctgatgcggcgtatccagaaaaattacagaagcattgtcgggatcaatgctactttgatactgcttggagtcacaggaatcctgcagcctacgacgtctgcactgcttcataatatgtctacgctgacgatcagcctgaccaatatgaaaaacttactggatgaaaactagttattgagaaaaaatcgataataaccctcttgattttttgaaatagttcctatagaataaaactaaggttagttacaactaacaaacgggaacacacaggaaaattcaggaggtgcgtatgagtattgttattatcggaggacatgaccgaatggtctgtcagtataaaaaagtatgtcagaaatatcagtgtaaagcaaaagtgttcacacagatgtcaggaaatctgtccaaaaagataggaactccggatctggtcgttttattcacaaacactgtttcgcacaaaatggtgcggtgtgcagtggaagaagcaggccgctgcaatgcagagatcatccgctgccatacaagcagcaaaaacgcactggaagatatcctggaaactgcctgtgcagcagtgtaaaaacgatcagcttcaaaagagcaagatagaagagaaatatagaaaaatgtacaaaaaagagagtatacgatacgaaatatgtatggtatactctcttttgatatgaaaaaatgagggatgagggacatgaacatcagaaaaaactataatcatacattgaatgcctgttaccttggctatattacccaggcaatcgtgaacaattttgcaccgcttctgtttctgacatttcagagtacatatgagatttcgctggataagatcgcacttttggtatcctttaattttggggtgcagttgatcgtggatctgctggccgcaaaatatgtggacaagatcggataccgcaacagtgtggtggcagcacatattttcggagcagttggcctggtgggactggcagtgtttccgtccgtttttccggatgcgtatgcaggactgcttctggcagtattttgttatgcaattggaggcggattgatcgaggtgctgatcagtccgattgtagaatcttgtccgacagagcgaaaggctgctgcgatgagtcttctgcattctttttactgttgggggcatgtaggcgtgattctgatctcgactgcattttttgccattgcggggattgagaactggaggatactggctgtgatctgggcaatccttccggcgttgaatgcagtatattttggaatggtaccgattcaggcagaagaggaagacgttgagggaattcctgtgcgagaattatttaaaatgaaaattttctgggtgttggtactgctgatgatctgtgcaggggcatctgaacagggaatgtcccagtgggcgtcagcatttgcagaatcagggctgcatgtagaaaaggcagtcggggacctggcgggaccatgtctttttgcactgttgatgggaagttcaagactgctctatgcgaagatgagtgagcggatctcattgccaaaaatgatgctctcaagcgggattttgtgcattgtgagttatctgcttgccgcattgtctccaaatccggtgctggcgctgctgggatgtgggctttgtggattttctgtgggcgtattctggccgggaacctttagtatggctgcagcatcctgtccgaaaggagggactgcattgtttgcacttctggcacttgcgggagatcttgggtgttcttccggtccgggagtggtaggcgttgtatcaggagcattttcagagaatctgaaggcaggacttttggcagcaatcgtatttccggttctgctgatcattggactgcaattgttgaaagaaggaagtcgagagagaggggaagtaagatgaaaaaagagatgacaaatgatatgactgtcggaagtccgacaaagctgatcattcagtttatgattccgatgtgtctgggaaatgtgttccagcagttttacaatattgcggattccatcattgcagggcagtttttgggtgtcaatgctctggcagcaatcggaagtaccggttcattgatgttttttgtgacaggatggctgcagggactgaccagtggatttgcaattctggtatcgcagtggtttggagcaaaagatatgaaacggatgcgacattatgtggcaatgtccatttacctgacgattgcgtttgctgtggtgatgacgatcggatttgaatttgccaatgagccgattttaaggctgatgaattctccggaaaatctgatggcagatatcaaaggatatatggcagtcatctatggtgggctgatcgtaactgcggcatacaatgcacttgcggcagtgctgcgggctttgggcgattccaaatcaccattatactttctgatcatttccgcgattatcaatgtggttctggatattgtatttatcgtgaattttggaatgggcgtggaaggctgcggatatgcgaccgtgatcgcacaggctgtttctgcattgttgtgtctgatttatattgtaaaaaaatttccgatcctgcggctttcggaagaagattttcggatttcctttcagagcatgggacggcttctggcattgggaattcccatgggactgcagttttctattacggcgatcggaacgatcattgtgcagggagcggtcaatatttacggagcggtatatatggcaggattttcagctgcaggaaaactgcagaatattattgtgacagtatttactgcgtttggcgccacagttgccacatatgtgggtcagaaccgcggagccgggaaaatggatcgtgtacataagggagtacgatacacgcagatcatggtatttgtctggagtgcggtcacaatggttttggtgtacttctttggagaagagatgacattgttgtttgtgagcaaaacggagacagaggtacttcatgcagcggaagtttatttccggacggtgttctgggcatacccgtttttaggaagtatttttatctatcgaaatgcgctgcagggaatgggctacggtcttgttccgatgcttggtggtgtgtttgaactggcggcaagagcgctgatcgtacttttggtggcaggaaagacgagctttttcggtgtttgccttgcagatccggcggcatggatttcggcattgattccattgattccgtattacatttatgtgatgaaaaaatatgaaaagcagaaacagctggagggatagtgcataagagaggagacaacaggtggagaacattcatctgttgtctcttttttgtcagttgtgttgtgaaatgtgcaagttgtgcaaaaaaactcaaaaagagaaggacatgtggtaaagtatgaacatagaaagccggccggcactatagagaatatgagaatacgggaggaagaaaaatgttagcgattaacatggcggatgtggtaaatgtattgaatacatgtaaaccttatctgattggatttggtattgtgcttgcaattgcactgattgttctgattgcggcatttaaactgaaaaagacaaaaagaaaactggtacgttcacaggctggaattgcaattctgttagcattggtgatcgtagtaaatatgatttgctggggaccgatgtcaagcatgatctctcttgcaaccggaaacggaacaatttcagaagagacatcaaatgaggcaaccaaactggtagagaagattgcggaagaaggaattgtgcttttaaagaatgaagacaatatgcttccgatggaaaataataaaaagttaaatgtatttggatgggcatcgacaaatccatgttatggtggaacaggttccggttctttatctgatgcatatgagacagtatctttacttcagggactggaaaatgcaggatttgaactgaactcagagctttctgatttctacaaagactaccgtgcagagcgtccggaagtcggaatgtgggagcaggactggacacttccagaacctacagtagattcttacagtgaagatttgatcaagaatgcacaggatttttctgatacagcactggttgtgattacacgtgtaggtggagaaggtgcagatcttccgacagatgtaagcaaagtgacttatacagataactcaaaagactacaaagactttgagccgggagagcattatctgcagctgagccagacagagaaaaatatgctggatatggtatgctctgattttgacaatgttgtagttgtatacaatggtgcaaatgcaatggagcttgaattcttaaatgattatgagcaaatcaaaggtgcagtatggtgtccgggaacaggacaggcaggattcaatggtcttggcgtgattttaagcggagaagtgaatccgtcggcaaaaacaagtgatacatttgtaagagatctgactgcaacaccgacagcacagaactttggaaactttacatatgacaatatggatgagtataaagtaacacagacaggctttacaggaaaagaagagacaacaactccttctttcataaattatgtagaaggaatttatgtcggatatcgtttctacgagacagctgccagtgaagggctcatcgattatgataaaacagtactgtatccgtttggatatggattatcttacacaacatttacacaggaaatgggcaagattacagaaaatgacggaacaatttcctttgatgttacagttacaaacacaggcgacacagcaggaaaagatgttgtagaagtatactataacccgccgtacacaaacggaggaattgaaaaagcatctgcgaatctgatcgcttatgacaaaacaaaaagcttagagccgggtgaatcccagacactgacaatttcctttaaagcagaagatatggcatcatatgactatcagaaagaaaaaggatacgttctggaagccggtgattatgagatcagcatcaacacggattcacatcacatcattgaatctgaaacttatacagtggatgaaacagtgaagtatacaggagacaataaacgttcgactgaccagacaactgtggaaaatcagtttgactatgcggcaggagatgttacatacttatcccgtgcaaacggatttgcaaattataaagaagcaacagcagcaccagagagtctttccatgtcaaaagaggcaaagaaagaatttatcaacaacagcaactataatccggaagattataacaatgaagaagataaaatgccggaaacaggtgcaaaaaatgatattgaactggcagatttaagaggtgtcgactatgatgacgcaaaatgggatgaactgcttgacaatatgacaatcagtgatatggatactgtaatcgctctgggcggatatcagacagcagcagcttccagcgtaggaaaaatacagacgattgactgtgacggaccggcatctatcaataacaactttacaggaacaggttccatcggattcccgtcagcggttatgatcgcatgtacatggaatgatgagattgcaatggaattcggagaaagcatcggtaaaatggcagatgaaatgggggtatccggatggtatgctccggcaatgaatattcaccgttctgcatttgcaggccgtaactttgaatactattcagaagatggactgttatccggaaaaattgctgcaaatgcagtagtaggtgcagaaaaatacggcgtgtatgcatatttgaaacactttgccctgaacgatcaggagacaaaccgtacaagtatgctctgtacatggtcaaatgagcaggcaatccgtgagatttatctgaaaccatttgaaatctgcgtgaaagaaggaaaagcaaaagcagtgatgtcttctttcaactatatcggtacaagatgggcaggaggctcagaagaactgtgcaataccgtactccgtgacgaatggggattccagggatttgttctgacagattactttggtgtatatggatacatgaactctgaccagggtatcagaaatggtacagatgcaatgcttgttgcatatgatacagaaacaaaccatgtaaaagatcagaagagcgcaactggtgttgaagcaatgcgtcaggcttgtaaaaatattatgtacactgtagtaaacagtcgtgcatatgatgcggaaaatctggaaacaggtctgatgacatggcagattgcagcaattgcagcagatgttgtactgggtgtgggaattcttgcacttgaaatcgtggcaatcaaacgcttccgcaaacgccttgcagaagagaaggcagctgtagcagttgagaactaagcaatagcgaggagatagaaatggaaaacacggcaaagaaaggcttctgggggacttttaaagaaaaacacccggcagttgcacagtttatcgtattctttattatcagcaatggagtgacagtacttcagatgatcatgatgccggcaattaaatatgcgtttggttttacatcccttgtcaatacgaattttcagattctgccaatcggacataatctggacggcagcgtctactatgtatttgattatgcttccggagcaatcagctccggaggcggcggaggacttgcatatttccttgcagtggagatcacactttttctggcgcaggttatcaattttttcctgcagcggaacgtgactttcaaatccaatgcaagtgtagtcaaagcggcagtatggtatttcattgcctgggtattgatctctgtaggcgcagcggcactgcagggactgtataaaacaccaatctatgatttctttatgggaatgatgggagaaggtgcgggaatgacagtagctgatattatcacaatgctgatcaactgtgtgatttcgttctgggtattcttcccgattatgaagatcatatttaaagagaaagaagcataaaaacagagagttattgcaatcgggcaataactctttttttagaaaaaatttttattttatttatagattcaccagaaattctatgttagactatagctatatcggatgccaaacacgctgatatcacagcagtcgaaaaatctttcaggcgtattgccttatcttaagcatccagattcaaatcagtattctgattcaagagcagtttcaaaataatcaatcaatcaacaaaaggagaagtatgtgtatgtcagaaacattaaaacaattatttccgaatattcggaccgaagaagcaattataggagagatcaagagtgatgagaatctgctcgcagaatatgagagctggacagaactacagcagagagattttctgaagttctgttcagggatgcggggagtcaaggtgttgtatgacgggtttggaaaggagatattaagcccgatctatcatccggagcgactggaggagctgttgtcctgtatcctggagacagaagtgaagatccgtcaggttataccaagtgacggaacgagaattgcagatgagcagagtcttgttattatggatattgtggtagagctcatggacggaagtctggcgaatgtagagattcagcatatcggatatctttttccgggagagcggtgtgcgtgctattccgccgatctgcttcttcggcagtataagagtgtcaaaagtagaaaaaagagaaattttacatatcgtgatgtgaaaaatgtatatacaatcgtatttatcgaaaaaagtacaaaagaatttcaggaatttccgaatacctgtatccatcgggcaaagcagcagtttgataccggactttctgtgaatctgctgcaggaatacgttttggtgccgcttgacattttccggaaaaccacgcacaataaaattatcgaaaacaagcttgatgcatggcttacctttttaagtaatgatactccggaaaaagtaaaagagctggtcgaaaagtatcccgaatttagagacatgtatcaggaaatttatgacatttgtgagaatgtagaagaggtggtacgtatgttttcaaaagaattgcaggaactggaccgtaatacggtgaagtttatgattgaagagcaggagagagaaattaaggcgcagaaggagcagctaaggcagagtgaagaagagttgcagaagaatcaggagcagctgaagaagaatgaagaagagttgcagaggagtcaggagcagctgaagcacagtgaagaagagttgcagaggagtcaggagcagctgaaacacagtgaagaagagttacagaagaatcaggagcagttagcacaaaaggatgcacagattgccagacttctggctcagattgaagagaaagatacgtagttgttggtccatttatgatgatagaacaaccagttgtgcagaaatctccccgtttctacggatttgtgatagagtagtcttcagaaaaatgaagagataaagaagtgaaaggtgagagatatgaaacacgcagaaatcattgcgaaaatgacagttgaagagaaagcagcgatattgagtggagcgtccgagtgggagtcaagagagatcaaacgacttggaattccggcggcgtttttttcagatggtcctcatggagtgaggaaacaggaaggagaaggagaccatctcggattgaatgcatctgttccggctacctgttttccgacggcagctacgattgcgaacagttgggacgaatcgttgggtgaagagattggaaaggctcttggagaagaagcatcagcattaggcgtagatgtacttttgggaccgggactgaacattaagcgcagccctctgtgtggaaggaattttgaatatttttctgaagatccttatctggcgggaaagatggctgcatcttatgtaagaggaatccagagtcagggaatctatgcatgtccgaagcattttgcggttaacagccaggagcttcgcaggatggcaatgaattcggtattggatgaacggacactgagggagatttatctgactgggtttgaaattgcgattaaagaaggaaaagcaaaatccatcatgaccagttataacgaggtcaatggagtctatgcaaatgaaaatgagcatttgttaaaagaaattttaagagaagagtggggatttgacggacttgtagtcactgactggggggcttcgaacgaccatgtaaaaggagttgcctgtcgatctaatcttgagatgccggcgccgggactggatgcggcacgagaagttctggcagcgttagaagagggaagcctttccatggaagaactggatcagtgtacggacgatcttctggatgcagtactgacactggcaaagaacagagaaaagcgtgtgcgtgaatttgacagagaagctcaccatacgcttgcgaaaaaagctgcaagagagagtattgtgatgctcaagaatgaagaaaaaccgttccagctgcttcctctcaaagaaaatacaagagtggcactgatcggagactttgcatctgttcctcgttaccagggggcaggttcttctctggtgaatccaacgaaagtagaaacaatggagcagatgatcagcagctatccgattcagtgtatcggtacagcgaaaggatatcagagaacaggagaagcagatgaagtactgaaaaaggaagcagtgaatcttgcaaagatggcagatgtggttatttactgcttcggtctggatgaattgagcgaatcagaaggtctggatcgtacgcatatgcggattccgcagaatcaggtggagcttctggaagcaatggcaaaagtaaactccaatattgtaggtgtattaagtgcgggatctgcagttgagatgccgtggcattcctgctgtaaggcattgctgcacggataccttggcggacaggcttctgcaggagccatgctggatgtgctgaccggaaaagccaatccgtccggaagactcagtgagacatatccggttcgctatgaagatactccggcatttaaatattttccaagtacagagcgtaattcggaatatcgggagagtctgtttgttggatatcgttactatgatacaagtaaagtgagagtgcagtatccgtttggatatggtctgtcgtatacatcgtttgaatactcagacttgagagtaacggcggatggagttgaatttgtactgaccaataccggaaagatggatggtgcggaagtagctcagatgtacgtatgtgcaccgaaaggaaagatcttccgtccggataaagaattaaaaggattcgcaaaagtattcctgaaagcaggagaaagcagaaaagtacagattttgtttgatgataagacattccgttactggaatgtagagacagacagctgggaaaaggaagcaggaagatatgaaatctgtattggcgcatgtgcattggatatccgattgagagagacactggaaatagaaggaacaactgacacaatgccatatgacgctgaaaagatgccgtcatatttttcgggaattatcagagatgtaccggatgcagaatttgaagcacttctgaagcaaccgatcccggatggaaagtggagcggtgaactgggaatgaatgacgcgatctgccagatgtattatgcaaagagcagactggcaagaatgatctacaagattctcacaaacctgaaaaagaaaagtgaggataagggaaaaccggatctgaatatcctgtttatttataatatgccgttccgagggattgcaaagatgacgcatggggcggtcagcatgaaaatggcagagggtatggcggaagtggtcaacggacatttcatgaaaggtatgaaaaaagtactcggcggtttctttgagaaccgaaaagcaaataaagaatatgagaaaaagctgggaaccggaaaataaggaacttgcgaataagcaaaaggagaaagccaaatcaggactttctccttttgtgtttaagattctacaggaatcagcacctgcagggtaaaccagttgtcttctgcgtgaagtgtcatagagccgccatatttgcgggctgcctgctgaatgcttttcagtccgtatccgtgataacctgcgttttgctttgttgtagtcggaagttgatccggttttaaagaaagcgaagtttccgtatagttttcacattgaatcatcaataattgatttttctgatacatagacagtgtgatcagacgcttttcagggtcatcaaactgggaaacacattcaattgcattgtccagtgcatttccaaagatagagcaaatatctttgacatgcataaaagaaatcagttttccgtcagccatgcaggtgaatgtaatatgcttctgcatacagtaagtgcttttggtagtcagaacgacgtccagtacgctgtttcctgtatttgtgagcgcttcctgtgtgtggatcgcctcctccatttccagaagatactgttcttttttcttgggatcctgttcagaacggatcgcgatcatataatgtttcagatcatgaaattctcttcgtaaaagttcaatattatcgatggaaagccgatactggtcatactggcgctggagaacaatattcatggcctgattttcacttctcatacgaagttcttcccgtttttcctgcatggaaaaaagcatgacaagtcccccgaaatctaccagtgtccgcacatacaagatggaacttgtggcactggaaaacggcgtatttggcatgacgaagctgatgttgctgatggcaaatgctccaagtgcaatgagaattgcgcttaggagttcttttccattgaccagcaggcgctcgtcagtcggaaaatgtcctctttccagaaagtaatatccgatataaatgcctgtgtataagagcagcatggtcaaagtcgagaataaccgactgtttttggcgtaattcaacgcccaccagacataaagctgccagtgaaaggacgcggtaaattctgccagaaccagtgcctgtgcgcagcagaatccggcatccagccaggtagtatcgcagagcagatgcagaaggaggcacatcagaaatgcggctccgatcatgcagggaatccaaaaataaataggaagagttcctgcaaattcctgataagcgataaatacgagcaagcttccggcaagggaaaccggcagtttccacccggttacctttcgccgtaagagaaggacgtacaggatgcaggcaccccattcagcaagggcggtataaatccggggagtgtccatcagtgcgtctaaattcatcggtgtacacctcctatataatcagtcaaagcttccagaaacactttcttttttgcacggctgacaggaagtgtcgtggaatcagataacaggacattgttttgtacaataccggtcacatgcatcaggtggataagatatgcgttatggcatttggaaaatcctttgtcttttaaaagcgcttccacctttttcattggaccgacagtgagaaaatcccctttttcggtatggaacagaatgttgtggcgctggctttcgatgtaataaatctgactgatatccaggcgcatctgtccgccttccacttcgatcgtcatataatctttttgctgtttttgcttcacctttttgacagcttttccgagaatctgagaaaatgcaagataggcgaccggttttacaacatatcccagggcgtctaccagatatccctgaactgcgaactggatcgtagaggtaataaagataaaagatacatcttcatccagttcccggattttttcagcagtcttcatgccgtccagatgtttcatctggatatcgagaagaatgatatcgtagtctgctttatattcacttacaatgtccagaccatcgtgaaagacggaaatctggaaggaaagggaatgttcggtttcatattgtttcagatacccggtgagtacctgtacataagaatcttcatcttcaacaattgcaattcggatcatagtctctcctttttgttttttatcatttattggaaccagtactattttatcggaatccggcaaaaaaagcaattcttgttacgattgcgcatggataggcggggattggtgtgaacaggaaagaaagcaggttgaaattcctaaaaaagccaagtataataaaaatactgaaaaacaaagaagagaggtttttgagtgaaggaggtaagtatggccgaacaatatcatggtatggcaattggaatatttgaactggacagtgagtgcgtatgttttgtggcactggatgcggcggcaaaggcagcagcagtacagattcagggagtggagagaaaccgtctgggagcaggtgcctgtgtaaagatgcggggaagtatttcggatgtgaaagctgcgatggaagtggcgatccggacggcagagccaatcgcaaaggttgtttcacacacggtgatcgcatccccgtcagaggagacagaaacggcgattgcaatgacgattacaaaataaggagagattaatatgacatacggagcatttggactggtagaagtccttggggaggcaaatgcggttctggtactggatcggatgttaaagactgcagaagttttttatgaaacacaggatacaaagtgcggcggacatgccctgatttttgtaagcggaagcgtatcagctgttacagcggcagtggagagtgtaaagttggcaccaccgtgtaaagtatttcagacggcggtgatctccaatccatcccaggagatggttcagattgtagaaggtttcaaagccagaaataaaaagtaaaagagcgtatgaaaaaggacagcagccgtatgggaagctgtcctttttcgattttatgctgctttggtaaggtcggacaacggacggaaggtatatcccatttcctcccattttgagaggagctcctccataatttctccgttggtctttgatgtattgtgaagcagtacaaccgctccgggatgaacgcgggaaagcagtttgtcaaaggcttcttcatgagtaggctgatcatcctgctgccagtctacataggcaaggctccagaaaaatgtctggtatcccagctgttgtgccattttcagattttcagtactgtagataccttgtgggggacggtaatatttgatcatgtcagtgccggtgatttctttatagagagattctacgccggaaagttctttttgaaaattttcgacagaggaaatcttagacatatccggatgactgagcgtatgattggccactgtatgcccttcttctgtcatgcggcggatcaaatccggattatcccggacaaagtttcccacaacaaagaaagcagcaggagcctgatgttttttcagcgcatctaaaatagctggcgtagcgccgttttcatacccgcagtcaaaggtcaaatataaaattttttcatccgtatcctgcgcgtagtaagcatcatattgcttcagctcttcaatcgaagcgttggcagtggggagtgttccttcctctggaaaactaaggccccagttttcagaggatgagaggaccgggccggataccggatgaatgccaagggaaagttcggcttttccggcgagagaaccgagtaaaaaggcaagtgtaagaaataaaagacgacgaaaacagacaaacaggatttttttgtcatgcgtgctaatgttcatagaaaagctccggaacgttgtttttgctactatattcgagaaaacagggaaatatgcttacagtagacttttggagaaaagagtgatacagttaatgcagaaaatgaatggaaaatcagaggtgacatatgaaaaaagcggcattattttttgatattgacggaacgatattaagtgaaaaaacaaaagagattccaaagagcgcgatcgaggcacttttggcggcgcagaaaaaaggacatcttttatttatcaatacagggagaactatgtgctcgattccggcacagttaaagcagttcatgtttgacggatatttgtgcggatgcggaacatatctgacgtatcatgatgaggtattgttcacaagaaatattgacaaaaaacggggaagagaaattttaaataaaatggcggaatgcaatttggacgggattgcagaaggaacggaagatatttatattccagagaggattaccaggtttgaacgtctggagacatccagaagatattttcagtccaatggtcttggattggaatgttatctcgaaaaagatgatttcatttatgacaaggtgttcatttatgcagatgagaaaagcaatcttcaggaattttttacgtttatcgaggaagatatggaagcaattgaccgcggaggcaatacctatgaaattgtgcagaaaggctacagtaaagggactgcctgcgatgtaatcctgaaaaaattcgggatggaactggatcgggcatatgtatttggagacagtatgaatgatctttccatgtttcagtatgcgaagcatacgattgccatgggaaatcatgcaaaaggactggatccttttacagagtatgtaacagcagaagtagagaaagatgggattgctcaggcaatccgtcattacggtttagattaaaaaggagcggcttatgaaattatttgtatacagttacaggacatttgatgaggatgtgtatttccgggaattttcaaaggaatatggggtagaactgggaatctgtcatcagggaccatctatggaaaatgcacatctggcagaaggatatgactatatcagtattcttaccagcaaaattaacgcagcactggtaagacgattccgggaactgggagtcaaaatgatctctacccggacgatcggttatgaccatatcgatctggatgcagcgagagcgtgtgggatgaaggtcagcaatgtgacatactcaccggaatgtgtggcagattatacgatgcttttaatcctgatgtccattcgaaaaatgaaacggattctgcagcgggcagagctcaacgacttttcactgccgggaatccagggaggagaactgcataattttacagtgggcgtcatcggaaccggcaaaatcgggcaggctgtcatccgggatctgagtggatttggctgtaagatctatgcgtatgatgtctatcgttcagagagtgtaaaagaatatgcagactatgtggaaaacgtgcaggaaatttatcagaagtgtgatctgatcacactgcatatgccattatttgagtccaatttccatatgatcgatgaaaaggcaatggcgcagatgaaagatggtgtagttctgatcaacacggcaagaggcggtctgatcgataccaaagcgctgatcaaaggtctggaaacaggaaaagtcggtgcagcaggtctggatgtgatcgaggatgaatttggattgtattataaggatctgaaatcgaagtgcttaagtaagcatgatctgtgtatcctgagaagttttcctaatgtagttgtgacaccacatatggcattttataccgaccaggcagtcagtgatatggtgaaaaattcgattttgagctgttgtctgaatgagcggggagaggaaaatccctgggaagtaaaataataaaaacggaccgtgcatgaaaaaaggttcgtgtacggtccatttgagtttaagaaaaatagagctctttaatcttctccacaggcatctcctgcccggtccacagcttgaatgcctccgccccctggtacagcagcatatagagtccgttgaaagtcggacatccggcttctctggcaaggcgcagcagttttgtctctttcggattgtagatcacatcggaaacgatcaggtctttatggaaaaaggacggatcgttgatgatggaagcgtctgtattcggagccatgcccacagaagttccgttggtcaggatatagctgtctgcaatctctcttcgaaggatggaatcatcttcaaaatcaaacagttgtaccttacaatttgttcgctcatttaatgtctgaacaatctgctcggcgcgcacataaaactggtcatggatactgaatacggaaatctctgacaatccgtccagtgctgcctgaaccagaatggaggtggcagctccgcctgcgccgagaagtgtcatcttttttccaatcagatcgtatccggcatcctttgctgcgagcaggtatccggtaccatccgttgtatgtccagtcagaattccgttgtcattcacgacggtattgacagcctgagagatttccgcagccggagagagtcggtcacagagctcacacattttatttttatccggcatggttaggttgaagccacgtacgttcatggcgcgaagtccatccacggcagcggccagtttgtcggttccgacatcgaatgcaaggtagacataatcaagtcccagatgttcaaaagaagcgttgtgcatcatgggagagatgctgtgtgcaacagggcttccgaacagtcctgtcagtccggtgtgtccggtaatctgtttcataagtgggttcctcctgttttaaatttcgtctgcctggtcaaagaatgtaagatcggcagggtatacataactgtcaccgatctggtgaaggagcaccagatttaagtgattgttcagatttttcttatccagtgagatggcgtccataagatcactcatcggcagatggcaggtatccggaagaccgtaggcattcaaaatcagccggatcttttgggcagtacctggctggcacaagtttttttcttcggcgagcttactgatctgatacataccgatgccgacggcttccccatggctttcccgctcatagtggaaatactgttcgatcgtgtgtgcaagcgtgtgaccgaaatttaaaagcatccgctccccggtatcgaactgatcgttttccacaacctgacgtttgatgtccacacagcggaaaatgatttcaggaagaatgtcctgcaggttttcaaaagaaccacgttcttttaatgtctcaaacagggcagcgtctctgatacagccgtatttgatgacctcgcccattccatccataataaagtgttcaggaagagtgcgaagaacctgaggatcgatcagtaccagttttgggtgataaaaagctcctaccaggttttttccctgcgggagatctaccgcaacctttccgccaacggaagaatccacctgtgcaagcagggaagtcggaatctgcacgaaacggatccctcttaaataactggatgcggcaaaacccgcgagatctccgatcacacctccgcccagagcaatcaccagatcactgcgggaaaacttctgctttagcagtgcattgtaaagcgcggggagtgtctcaaaggctttggtaggttctccgtgtggaaggaccagctcgtgtacctcatagtcaccgagggaagttttcaacttctctccgtaaagtgggaatacattgtcatcagagatgatcataatcttttttccggaaaagcaggaggaaatataagaacttgccttgtccagaatgttgttttcaatataaatcggatagctgttttttcctaaatttactgtcagtttcaaaaatatccctcccgtatatcaagttaaacctgttttccgacaacctgggcgatctgtccgatctgtgccagaagagccgcatatttttccggtttcagagactgggcgccgtcacagagtgcgcactccggatcgttgtggacttcgatcatcagtccgtcagcgcctgctgctacagatgcttttgccattggttctaccagccaccattttccgccggcatggcttgggtcgatgatgaccggaaggtgtgttttcttcttcagaacagggatgctctgcagatccagtgtgtttctggtataagtttcaaaagtacggattccgcgttcgcagaggatgacattctcgtttccggctgccatgatgtactctgcggacatgatccactcttcataggtcgcgttcaggcctcgttttaaaagaattggacgatccagctgtccaagctgtttgagcaggtcaaagttctgcatattgcgggctccgatctggatcaggtcgactttttcgttgaagacatccaggtgatccggagacatcagttctgttacgatcggaagtccggtctcctctttgactgcacagagaatgtcaagtccttccagtccgagtccctggaaagaatacgggcttgttctcggtttgaaagcgccgccgcgcagcatattggctccggcagctttgacagattttgcgattccaagaacctgctcgtaggattctacagaacacggacctgcaatcagtgccagattgtctccgccgactttgacaccggatacatcaataatagaatcctccggatgaaaggcgcggttggaaagcttataaggttcctgtacatgcatgactttgtcaacggaagcgtctacttcaaaaagacgtgcatccaggcgggtcgtatctccgatacacccgatgatagtcatctcctgtccacggacaatgtgagtatccagaccgtttcgtttaatctgatgttcaactctggcaatatctttgtcagaggtatttggctttaatacgataatcataaatcgatcctccagttatttgaattaatactgtaaaattttagttgtttaaagtgtgaaactaaaaatatcataaaacaatcagggtggattgtcaatgttttccggggaattttcgattttattttgggaatggcagaaaacgtggtagaataaaaacgtgaatgagaaaaaaaagaatgagagaagggacgttatgaaaacgaatgatgtgtggaaacgcgcacgtagaatacctgttatgctgatcacagaagggctctgcgtcggtcttgtcggcggatttgtcgtgctgctttaccgagtggcgctgacttttgcgggagactggcttgtaaagattctttcttatatgaaaggaaatccatttcgatgtgtggtgtggtttttgattttggcagcgcttgcatggattgtgggaaaactggtgaagtgggaaccgatgatctcaggaagcgggatccctcaggtggaaggggagatagcagggaggctttcccaaaactggaaacgcgtgctgccggcaaaatttgcaggaggctttttgtgtatgctgggtggtctttctcttggaagagaaggtccgtcgatccaacttggagccatggcaggacaggggatatccagagctttgggacggggaaaaagagaagagaagtttttgatgacttgtggggcgagtgcgggactttctgctgctttccatgcaccgctggcaggtatgatgtttgcggtagaagagatccataaaacattttcaatcccgattcttcttcctgtcatgacagcttcggtgacggctgattatattgcttcccacattcttggcctagatccggtatttcgatttcagatcacgaaatatctgccgcaaaactattactggcttttgatccttttgggaattttggtaggtgtatccggtgtgttttataattgggggatgttaaaggcccaggaattgtatcgcaaaattccgtttatgaaagaaacaggccgtctgttgatcgcctttctgactgcgggagtattggggattgtgatgccgtgggtattgggaagtggttcgggcttgattgtcagcctgacacagggtgaaatggtattggggatggttgtgctgacgctggttatgaagtttttattttccgcagtcagctttggctccggagcgccgggaggaattttctttccgcttttgatattaggcgctttgatcggagcagtatttgccatggcgggggtcgaattttttggcttggctccggtgtatgtcaacaattttgtactgcttgggatgaccggattctttacagcgattgtaagagcaccgctgacggggattatcctgttatttgaaatgtccggaagtatcagtcagatgctttccctgtcgatcgtgtcggtaacggcatatattgtggcaacgctgatgcgctcagagccgatttatgacagtcttttgaagagaattctcaaagcggatactatagtgcatgacaaatgaaacaacttatggtatacttcattttagaatatgcgtatgtggcagagatgccggataccaaagagatttgaaggagccagacagatgaaaagagtattgttaaaactgagcggcgaagcacttgccggagataaaaagacaggatttgatgaggcaacctgcataggagttgcaaatcaggtgaagcagcttgtagatcagggaattcaggttgcgatcgtgacaggcggcggaaatttctggagaggccgtaccagtgagacgatcgaccgtacaaaagcagatcagatcggaatgcttgcaacggtgatgaactgtatttacgtgtctgacattttccgccatgtggggatgaagacagaagtgtttactccatttgtatgtggagcgtttacatcgttgttttccaaggatgcagcagtggaagcgctggaagaaggaaaagtgatcttttttgcaggaggaaccggacacccatatttttcaacggatacaggagctgttctgcgtgcgatcgaaatcgaggcagatgcgatgcttcttgcaaaagcaattgacggaatttatgacagcgatccgaaagtaaatccggaggcgaaaaaatatgatgagatctccattcaggaagtgatcaatcagaagctggcagcagtggatctgacagcatccattctctgccttgagaataagatgccgatgctggtatttggactgaatgaagaaaacagtattgtagagaccatgagcggtacatttaccggaacaaaagtgacagtataaggaggacaaaaacatggatgaaaaattaaaagtatatgatgacaagatgacaaaaacaatcaacaatctgggaagtgagcttgcagccatccgcgcaggacgtgccaatccacatgtattggataagctgacagtggattactatggagtgccgactccgatccagcaggcagcgaacatatccgtaccggaagcacgcatgatccagatacagccatgggaaaagagcatgttaaaagaaatcgaaaaagcaatcctgatgtctgatatcggaatcaatcctacaaacgatggaacggtggtacgcctgatgttcccggaactgacagaagagcgaagaaaagaactggtaaaagatgtgaagaaaaaaggagaggcagcaaaagttgcaatccgcaatatccgtcgtgacggaaacgatgcattcaaaaaactgaaaggaacagagatttcagaagacgggatcaaagacttggaagattcacttcagaaactgacagacaaatacattgcagaagtcgataaagcggtggaagcaaaatccaaagaagtactgacagtttaggatacagcctgtgtgacaggccaatattacgaaacagcaggaggggcagatgtgaagaagcctctcttttccatcttctggatggaaagacctgcaagaaggaggaaatacaatgaacgtaccgcagcatattgccatcatcctggacggaaacgggagatgggcaaaagccaagggaatgccgagaaattacgggcatgcacagggcagtaagaatgtagagcggatctgcgaagaagcctggagaatggggattaaatatctgaccgtgtatgcgttttccacagagaattggaaccggccggaaagtgaagtcagcgcgctgatgaaactgctgcgcaattatatgaagacctgtctgaagaccgcggcgaaaaatgatatgaaagtgcgtgtgctgggagacattgaggcgctggatgaggatatccggaccagaattttggaactggaagaagccacaaaggataacggtggcttaaactttcagatcgcgctgaattatggaagccgggatgagatgatccgcgctgtgcgccgccttgcaagagactgcgcagatggaaaggttgtgccggaaacgatcgatgagacagtgtttgagtcttatctggatacccatgggataccggatcccgatcttttgatccgtaccagtggggaactgcggctttccaattatttattgtggcagctggcatatacggaattttattttacagagattccatggccggattttacaaaagaggaattagaaaaggcaattgcgcagtataataaaagagacagaagatacggcggtgtgaaggaggaagaagatgtttaagacacgtcttttaagtgggattctcctggtggtgatcgctctgatcacagtgatcacaggaggaaatgtactgtttgcaactttgtttttgatcagtatgatcggagtctatgagttgtacagagtgtttgagattgaaaataaagcagttgggatctgcggatttttgtttgcagcaggatactatggtctgttgtatgccaaaccgctgcttccagatacaacggattggttcatgctgttatttatggcatttgtgatctgtctgatggcagtgttggtattttcttatccaaaatatcggacagagcagatgttggcagcgtttttcggagtattttatgtggcagtgatgttgtcttatatttatcagacaagaattctgccgggcggtgtctttcaggtatggctggtatttatctgtgcctggggatgtgatacctgcgcatattgtgtggggatgctgatcggcaagcataaaatggcaccgaagctgagtccgaagaagtctgtggaaggcggaatcggcggaatcgcgggagcagcgctgatcgcagttctctatgcacttgcgatcaaccactggggcaatgcaggagtcagtgtggccagctttgcaataatcggtgcagcaggcggtgcgatttcccagatcggagatctggcggcatccgcgatcaagagaaatcatgacatcaaagattacggaaagttgataccgggacacggtgggattctggacagatttgacagtattattttcacggcaccgatcattttttatctttccgtgcttctctaagaaagaaggaaaacagatatgaaaaaaatagcaatacttggttcgaccggctctatcggaacccagacactggaagtcgtaagagaaaatcgggatatcgaggtcacggcgctggcggccggaagtaatatcgggcttctggaagcgcagatccgtaagtttcatccggtgctggcagcggtgtgggacgaggcaaaagccaaagaactcagagagaatgtcaaagatctggatgtgaaggtagtatccggaatggacggactcatagaagtggcagtacagcaggatgcagaaatcctggtgacagcgatcgtaggaatgatcggaatcctgccgacgatcgagggaatcaaggcaggaaaggatatcgcactggcgaataaagagacactggtgacagcaggacacatcattatgccgctggcaaaggagtacggagtttccattcttccggtagacagtgagcacagtgccattttccagtctttgcagggagggcagcacaaggcgctgcataagatcctgctcacagcgtccggtggaccgttccgcgggaaaaagcgggaagagcttcttaatattcaggtggaagatgcgctgaagcatccaaactgggagatggggcgcaagatcacgatcgattcctccaccatggtcaataaaggactggaagtgatcgaggcaaaatggctgtttgatgtgtctgtggatcagatccaggttgtcgtgcagccacagagtatcattcattccatggttgaatatgtggacggcgcggtgatcgcacagcttggaacaccggatatgaaacttccgattcagtatgctttgtattatcccaagagacggtatcttccgggagacaggctggattttgagacactttcccagattacgtttgagcgcccggatatggagacgttctatggattgaagctggcatatgaagccggaaaaacaggcggctctcttccaacggtattcaatgcagccaacgagcgtgcggttgctatgtttttgaatcgggagattggctatctgcagattccggagatcattgccggctgtatggagatgcacaaagtgattgcagatccaaccgtagaagagattcttcagacagagcaggaaacttatgaatatatcaaaaacaggtggtagtatatgggtattattttagcaattcttctgttcagtttgatcatcatcatccatgaactgggacattttacactggcaaaattaaacgggatccgtgtagatgaattttcattgggaatggggccgactctgtttggcaaggagtttaaaggaaccaaattcagcttaaaacttctccctctgggcggtgcctgcatgatgggagaagatgatgcagacgatacttccgaggggagctttaacagcaagtccgtgtgggcgagaatttcagtgatcgcggcaggacctttgtttaactttatcctggcgcttctgatgtcagcgattctggtgggagcagccggctatgcggttcctgtgatacaggaagtcgaatccggttcctcaggaagtgagcagggattgaaaaaaggggatgtgatcacagagatcaatggaaagaaaattcatatttatgaagagttccagctgtacaatctgacacacagtacatctgacacggcagagctgacctttgagcgcgatggaaaagaacatacgatccagatggaaaaacgacagtttggggatgagaccacaaagagaatgggatttacctattctgcagaggtggagaaaccgggatttttcaaaagtatccagtatggggcatacacggcaaaatactgggtagagtacacgctggagtgcctgaagatgctcctgacgggtgaagtaggtgtgaatcagttgtccggtccggtaggaattgttgaggtagtcaatgatacctatgatgcggcagcaccgtccggctggtcggcagtcatcttaagtatgatgaacctgggaattctgatctcagccaacttaggtgtcatgaacctgcttccaatcccagcactggatggagggcgtctggtatttcttctgatcgaggcggtgagaagaaaacggatcgctccggagaaagaaggtatggtgcattttattggatttgcagcattgatggcactgatggtgtttgtgatgtataacgatattatgcggttgttttgatcaaaaagaatacagtataaaaaaacgtttctgcgaaagcaggagcgttttttttcgatcatccagtgtccgttattttttatgaatactttgcatatagttagaagaaactgtgaaaaaggaaaatggatatggattacagtagaaatcaaaggaggaactcacaggccatccgaatgcagcaggagcacatagacaagggaaaactccagatccagattacatcacaagtgacggcttttcccatccagaatgcgcaggtttccatttcttataccggagttccggaaaatactctggaaaagctgcagacagattcatccgggcagacagaagaaatcgaactggcggcaccgcccatcgagtacagcctgaacccggaatcggatcagcagccctattccgaatatacactgaatgtggaggcggaaggatttgaaccggtgagtatctcaggggcggagattctggcagatgtgacggcaattcaaaatatttctatgcgtcctcaggttacacaggaagagtcgggagaagtgttcgtgattcctgcacatacgctctacggggaatatccggcgaaaattgcggaggatgagatcaagccggtcacagagtccggagagatcgtgctcagccgggtagtgattccggaatttgtggttgtccacgatggttctccgagggactccacggcaaaaaattactatgtgagatatcgggattacatcaaaaatgtggcgtccagtgagatttatgcaacctggccggacagtacgatccgcgcaaatgtgctggcgattatgtcatttacattgaacagggtatacacagaatggtatcggaataaagggtatgattttacgatcacatcgtctacagcatttgatcacaagtggattccggaacgaaatgtgtacgatacgatttcggcggtagtggatgagatttttgcaaactatctgtcccgtccgaatgtacggcagccgattctgacgcagtattgtgatggtaccagggtgagctgtcccaactggatgacacaatgggggtcaaaggagctgggagatcagggatatactccgattgagattctgcgttatttttacggaagtgatatgtatatcaatacagcggaagaaatttccggaatcccgtcttcctggccgggatatacactggaaaatggatccagcggagcaaaggtacgtcagcttcaggaacagctcaatgtgatcgcgggggcgtatccggcgctgccaaagattcagacagacggagtgtatggaccggcaactgcggaggcggtcagaaagtttcaggaaatttttggtctgccgcagacaggaaccgtggattaccggacctggtataagatttcacaaatttatgtgggagtttccagaattgcagaattgaattaaagtggatacaatgtgaaaaattcttgacagaggaaaaagtcttttttataatcaactggtactaccagttggttataagggagaatgagaaaatgaaaatattgagacaatttgtaatcatcctgctgatttcttttttaggagaactgttaaaagctgcgctgccattgcctgttccggcaagcgtgtgggggcttatccttatgctggcggcattgaaaacaggggtgctcaagctgagtcaggtttctgatgcggcagtctttttgattgagatcatgccggtcatgtttattcctgcaggagtcggtcttttgaatgcatggggagtgctgaagcccgtgtggatcccgatcagtgtgatcacggtcgtgactacggttctggtaatggcagtgactgcaaaagtgacacagactgtcatacacaatagtaaaaagaagaaagagaaagcagaacaggagacagtaagatgaaagagtttttagtacattccgtatttttcggtgcagcagtcagtctgatcggttacgaggcagggctgcttttaaaacgaaagttcaagatggcaatttttaatccgcttttgatcgccattttgtgtgttatggcgattctgacagtaggggatatttcctatgatgattacaatcagggtgcacagtatttgagttacctgctcacgccggcaaccgtttgtctggcagttccgttatatcagcagttaaatctgctgaaaaagaatttaaaagcagtagcggcgggaatcttatccggagttttgacaagtatactcagtgttcttggcctgtcttatttattcggactttctcatgatatgtatgtgacactgcttccgaaatcaattacaacagcaatcggaatgggagtgtcggaagaactagggggaattgttacgattaccgttgcagtgatcatcattaccggagtactgggaaatatgatcgcagacgtggtgtaccgggtatttcggatcaaagaaccagtagcgaaggggctggccctgggaacagcatcccatgcgatcggaacagcaaaagcaatggagatgggaccggtagaaggcgccatgagcagtctggcgattgcggtagccggacttttgaccgtaattttcgcatctgtttttgcaggatgtttataagggaggaagaacaaatgaagcgtatgatcattacaattggaagacagtccggaagcagcggaagaaaagtcggggaattactggcagagagactttctcttcctctttatggaaaggcagaacttcaaaagattgcagaaggtacggatgattatgaagaggtgcaggcattttatgaggaagagccggtaaacagtttattatatgccattgctatgagccagtttgaacaggaggtcggacggattccgtttcaaagaatccgggagctggcgtcgaaagagtcctgcattataataggaagatgcgcaggccatattttcagagaagatccggaagcagtccgtgtctttatccatgcagatcccaagatccgtgtgcagagaatcatggagcgggaaggactttccgagacaaaggcaaagaaatttctggaggatacagacagcagacgagcttctttccataaatattatacaaagcaggagtggggactggcacaggattacgaactgtgtctggacagcggcgttttggggatcgaaggtacagttgaggtattgacagaatatttaagattcagaggttttttagggaatgaatgagaaaacatatgagagagtgatcgaatatctgaaacagcagatacaagaaggaaaactttcctgcggaagcaagatcccatctgagcgggagctggcggcaagtctgaatctgggacgaaattctgtccgggaggctcttcgcacaatggaacataccggaatgctggagagcagacagggcaaaggaaattttctggtgaatatgccgcagaaaagtctgggaaatgtgttttccatgatgctgctcaccggacagagcaactacagggaagtcagccgaatccggcgaatcctggagcaggaggcatttgtacaggcagtgcggttgaaaaatccggaagttttaaagaggctgaaagcagaaataaaagagatgcagataccggaaaagacggcagagcatgaccgaagattccatcaggagctgatccgtgcaggagagaatcaattgcttgtcgcagtgatggaatctttgtccggtctttgtgaagaagaaatcgcacatgtacaaaaggaagcaaaaaatgaggactggtgtcagatccatgaagaaatcgtaaatgccctggaagaaggaaatatggaaaaagggctgaaatggattcgcaggcattacgataaaattgatgacactttaattttctaaaaacaggttgaaatattcccgggtatgtagtataatctttacaatttgagaaaatttacgaagggataaggtgaacagatgaaggcatttctgattttagaagatggaaccgtgtttacaggaacaagcattggttcgacaagagatatgattagtgaaatcgtgtttaatacctccatgacaggatatttagaggtgttgacagacccttcttatgcgggacaggcagtcgtaatgacgtatccgttgattgggaattatggaatcacaccggacatggaatcaagaaaagcatggccggatggttatattgtaagagagctgtctcgtatgccaagcaatttcagatgtgaaggtacgattcaggactttttgaaagagcaggatattcctggaatcgcaggcgtggacacacgtgctctgacaaagattttacgggaaaaaggtaccatgaatggtatgattactacaaatgaaaattacaatctggaagagattcttccaaagctgaaggcctacacagtaggtgatgttgtttctaaagtaacatgcagcgagaaatatgttctggaaggaacaggaaagaaagtagcactgctggatttaggagcaaaaaataatattgccaaatctttaaatcagcgtggttgcgaagtgactgtatacccggcccacacaactgcagaagagatcatttcatcgaatcctgacggaatcatgttgtcaaacggccctggagacccggcagactgcacctctattattgaagaaatcaaaaaattgtacaatacagatattccgatctttgcaatttgccttggacatcagctcatggctcttgctacaggtgcgactacacacaagttaaaatacggacatcgcggtggaaatcatccggtcaaagaccttcagacaaatcgtgtatatatttcttctcagaatcacggttatgtggtagatgcagaaaatgtagatccaaatgtggcagtgcctgcatttacgaatgtcaacgatggaacaaacgagggacttgcctatgtcggaaagaacatctttaccgtacagttccatccggaagcatgcccgggaccacaggattccggttacctgtttgacagattcattgagatgatgggaggagcgaaataatgccaagagacagtcgtattaaaaaagtattagtaattgggtccggtcctatcattatcggacaggcagcggagtttgactatgcaggaacacaggcatgccgttctttgaaggaagaaggaatcgaagttgttctgttgaactccaacccggcgacgatcatgacagataaagatatcgcagataaagtatatattgagccattgacagtagaagttgtggaacagctgattttaaaagagcagccggacagcgtacttccgacactgggaggacaggctggtctgaacctggcaatggaactggaagaggcaggatttttaagagaacacaatgtccgcctgatcggtacaacttctgagacaatcaaaaaggcagaggatcgtctggaatttaaagcaacgatggaaaagatcagagaaccggtcgcagcttctctggtcgtagaaaacgtagaagacggtcttgcatttgcaaataagatcggatatccggttgtacttcgtccggcatacacactgggaggaagcggcggcggtatcgcacatgattctgaacagctggtggagatcctggagaacggacttcgtctttcccgtgtaggacaggttctggtagagcgctgtattgcaggatggaaagagattgagtacgaagtaatgcgtgacggaaacggaaactgcattacggtatgtaatatggaaaatattgacccggttggtgtgcatacaggagacagtatcgttgtggcaccgtcacagacgctgggggacaaagaataccagatgctgcgtacttccgctttaaatattatcagtgagctgaatatcacgggtggatgtaacgtacagtatgctctgcatccggagacatttgaatactgtgtaatcgaggtaaacccgcgtgtcagccgttcttctgcgctggcttccaaagcgacaggatatccgatcgcgaaggttgcagcaaagatcgctcttggttatacactggatgagatcaaaaatgcgatcacacagaagacatatgcaagctttgaaccaatgctggactactgtgtcgtaaaacttccgagacttccgtttgataagtttatcagtgcaaagagaacactgactacacagatgaaggcaaccggagaggtgatgagtatctgcgacaactttgaaggtgcgctgatgaaagccatccgctctctggagcagcatgtagacagcctcatgtcttatgatttcacagatctgtctgtggaagaactgacagagcagctggagatcgtggatgatatgcgtatgtggagaatcgcagaagcaatccgccgaggtgtaagctacgaaaaaattcacgagatcacacagatcgatgagtggtttatcgataaatttgcaattatcgtagagatggaaaacgcactgaagtccgaagagctgacaccggaactgttaaaagaagcaaaacggatggagttcccggataacgtgatcgcacagctgacaggaaagacagagcgtgagatccacgatatgcgtcatgcaaacggcattgttgcagcatacaagatcgtagatacgtgtgcagcagaatttgcggcagagacaccgtactactattctgtatttggaagtgagaatgaagtagaagagactcgtgacaagaaaaaagttctggtacttggatccggtccgatccgtatcggtcagggaatcgagttcgatttctgttccgtacactgtacatgggcatttgcaaaagaagggtacgagacgatcatcgtgaacaacaacccggaaacagttagtacagactttgatattgcagacaagctgtattttgaaccactgactccggaagatgtagagagtattgtagatatcgaaaagccagacggtgcagttgtacagtttggtggacagacagcgatcaagctgacagaagctctgatgaaaatgggtgttccgatccttggaacttctgcagagaatgtagacaaagcagaagaccgtgaattattcgatgagatccttgaagagtgcgagattccacgtccgacaggaggaacggtgtttactgcagaagaagccaaagaagttgcaaacagacttggatatccggttctggtaagaccttcttacgtattgggtggacagggaatgcagatcgcgatcaatgataatgatatcgatgaatttatcggaatcatcaaccggatcgcacaggatcatccgattctggtggataaatatttacaggggaaagaaatcgaggtcgatgcagtttgtgacggcgaagacattctgattcctggaatcatggaacacattgagcgtgcaggaatccattccggagacagtatctctgtatatccggcacagagcctgacacagaaagcaaaagacaagattgcagagtatacaagaagacttgcaaaatctctccatgtcatcggtctgatcaatattcagttcatcgtatgtggagaagatgatgtgtatgtgatcgaagtaaacccacgttccagccgtacggttccttatatcagtaaagtaaccggaattccgatcgtaccgcttgcatccaaagtgatcatcggaaacaagatcaaagaactgggatacacaccgggactgcagccggaagcagattacgtggcagtgaagatgccggtattctcctttgagaagatccgtggtgcagatatcagccttggacctgagatgaaatctacaggagaatgtctgggaattgccaagacatttgacgaggcactttataaagcattcctgggtgcaggaatcaagctgccgaagttcaaaaacatgatcatgactgtccgtgatgaggacaaaccggaggcagtggagatcggacgcagatttgaaaagatcggataccgtatctttgctacaaagagcacggcagaagcgctgaacgcagcaggcgtgaaagcaattccggtccgcaagatcgagcaggagtcgccaaaccttctggatctcattttaggacacgagatcgatctggtcatcgatattccggcacagggggcagagcactccagagacggatttgtcatccgaagaaacgctattgagacaggtgtcaatgtactgacagcgatcgataccgctgaggcgctgatcaccagtcttgaaaatacagatattaaaaaactgacactgatcgatattgcgacagtgcagtaaataaggaagcccgggagaatgatctcccgggtttttgatgttatgtcctgtgattctgacgccagattcttggcgattccccatatacatttttgaaagcacgcgaaaaatgcagtggattggcatacccaacagcgtttgaaatctcactgatggagagttgagtaagttttaaaagttccgtagcttttaccatacggtaattcattaaaaattcctgaggtgaacgccccagagtctctttgaaaatctttccaaagtagctgcggttcagaccgcatacctcagcaatatcttctacggatatatcattttgaaaattctgttcaataaatgcaattgcctcatggatatagaaatcccgcagtctgccggcagagtttgtctgttcacgtgtgcaggagcgggtgagcgcatccataaaaaggtagagatggccgatcagatgaaaaggcggctgttcgggattacgtgcaatatagagcatttcttctttcagaacttcccgcatttctttggaatgtgcatgatagattggtgcagatttagtcagtcctgccagttccagaatttcttttacgcgaagtccgtcaaattcgatccacacatattcccagggaagcttctggtcggcgatgtaggtggtgatctgctgcgggaagatcataaatccctgtccgcttttgacagaataggtctgtgttattccggaagtatcatcggccatcagtgtaccggttccggagatcacataatggaacagataatgatttctggcagccggaccgtaggagtgggaaggctgacactgttcccagccgaactggtacaggctcatatcaataaaattttcgtttggaaaaacagaaaagagtatattactcataaaagtctcctttcctgacttgttgtaaaagtgaggtgtattttcattatataccaaaatgctagattatttcaaatatagaatataaaacaagcattaagatataaaagtgcaaaaattatggtattcatagtcgcaaaatggaatgttataatactaataaagaaaaacatgtacatgaaaaaagaaaaaggagcggaaatattgatgaaaaaaagaagaaatatatcaataagcgttttactgatttttggaatgtttgtatgtatgttgacaggctgcagtggaaaaagcgggaaagaggaggaagtcacagaaattgaaatcctgcagtataaacaagaggcagcggcttattttgaaaaagtggaagaaaagtttaatgctacgcacaaaaatatccgcctgaagattgaatcaccgaatgatgcttccacgatcatgagaactcgttttatccgggaagattatccggatattatcgggatcggcggcgatatcaattattcctactttttggatgccgagatcctgatggatatttcagattacaaaggactcgatgagattaaagagtcttataaagaaattgacaaaaatctggaatttgtcccgacagacggtgtttatgcagtaccgtatgccggaaatgccgcaggaatcctttataataaaaagatttttgaagaacacggatggaagataccgcagacatggagtgaactgatgaacctgtgtgacgaaatccaggccgcaggactgcagcccttcactatgggatttaaggacacatggacctgtcttgcaccatggaatggcctggcagtagatctggcgccgtcagatgtatgccgccaggtaaaccagggcaagacaacttttacggagaattatcgcgaagtggcggaaaaaatgctgcagctgctttcatacggaccgaaggatccgtttgcttataactacaacgatgcctgtacagcgtttgcaagaggagaggcagtcatgtatccgatcggaagctatgcggtacctcagattcagtcagtgaatcctgacatggaaattgactcctttgtatttccgggaagtgacaaaaaagaagagaatacattaaattcgggaatcgatcttcaattctgtgtgacaaaagaatgtaagaataaagaagcagcatatgaagtgttagattttcttttggaagatgaaaatgtgcaggactatctgaatgagcagaacagtgtaccgtgcaaagagggagagtttgaactctcaccgatgctggacggtgtcagacaatatatcgaagaagaaaatatggcagattatcaggatcactattatccgtcagaaatggcagtcgatgcgcagatacagacacttctgatcgacaaagatgtagatgcatttctgaagaaatttgacaaagactggcagagatataatcgggatatcatacagaaggtgcagaaatatgaagcagaacagacacacagtaaatagggagaggtgaaatgagcatgaaaaagatgaatgagagaaaacggacatttttgttgatgacaataccggtcgtggcactgtttttctgttttaatacattgccgttactcaaaggcgtgatgtacagttttacgaatttcaaaggatttggttcttatgactgggtgggagttcggaactatatggatctgtttcaggatgtaagagtgggaaattcttactggttcacctttaagctggcaatcgtaacgacaattgtagtcaatgtgatcagtctgctgctggcaatggctctgaacagtaagatccgtgccaagagctttttcaggggagcttatttcctgccgaatattctgggagcgctggtagtcggttatattttcaactatttctttacatacatccttccggcagtgggagagatgatcggatgggaaacgctttcttcgagtctgctttccagtaagaacctggcatggatcgctattgtgatcgtttgtgcatggcaggcgatcgcgatgaatacaatcatctatatttccggcctgcagaccgtaccggaggatgtgtatgaagcaggcgcaatagatggagctaccggatggaataagttcaaaaacctgacatttcctctgattcttccgttttttacgatcaatatggtgctttgtgtgaaaaactttctgatggtctttgatcagatcatggcactgacaaaaggcggacctgcacagagcacagaatccatttcctatctgatctatcagaatggtatggcaggaggacagttcggatttcagagtgccaatgcggttattttcttccttgtgatcgttgcaatttcagtgacgcagatgacagtattagggaaaaaggaggagcagttatgataggggcaaatacaaaaacaaacaaaccggccatgattttcttagtattagggctgatcaccattgcatttccgttgtatctgacggtagtcattgcatttaaacagccgtcagagatgaccaacagtatttccggaatcttgtcactgccaagctcctggagtctggaaaatttccgggaagctatgcgggtgacggatttctggaattctcttggcaacagtcttttcatcacattggtcacagttgctctcagtattgtgatccattccatgatcggatatgccattggaagaaataaagcgcacagtaaagggtataatctggtgtacttatacattgtcagcgggatgtttgttccgtttgcgattcttatgatgcctctggtgaaacagacagcacaaatgggactgaataaccgttttggagtcattcttctctatgttgtgttttatatgccgatgaatgtacttttgtataccggatatctgaagaatattccaattgcactggaggaggctgcctgcgtggatggagcaagtacgtggacaacttactggaagatcgtatttccgatcatgcgtccgatgcatgcgacagtagcagttctgacagcgcttggaacatggaatgatgtgatgacacctcttgtgatcatgtcaggaggagaacagaatacgcttccgttggcacagctgacattccagacccagtttggaacaaattacaatctggcattcgcctcctatctgctggcattacttccgatcttgatcttttatctgatctgtcagaaacagattttaaacggagttgtgaatggagcagtaaaataaaaagaaaaggaacgagtaatatggcaattatttttgatgagcagaacaagacatttacaatacatactgagcactccacttatcagatgcagatcgatccttatggtgttctcttacatttatactatggaagaaagaccaaaggctgcatggactatcttctgcaaaaacaggacagaggattttccggaaacctgtatgatgcgggaaatgacagaacctattctctggatgtgctcccgcaggaatttccaacatggggaacaggagattacagaagcacagcgctgatcgtaaggggacaggatgggactactgcctgtgacctgcgttaccggggatatcggatcttgtcgggaaaatacggactatcgggacttccggcagtgtatggagctgagaaagaagcacagacactggaagtggtgctggaagatgggcggaccggaattcaggtgacacttctctatggggtactgccaaaatacgatgtgatcacccgaagtgcgcagatcatcaatacaaaagagaacatcatttatcttgaaaaagcggcttctgcgtgtcttgattttgtgacaggaaaatatgatgtgatcagtttttacggacgtcatgcgatggagcggaattatcagagaattccggtatctcatggaaattatgtgatcggaagcagaagagggacctccagtcatcaatacagtccatttctgattctgacagaagagggaacaacagaagatgcaggggcatgttatgccatgtcctttgtatacagcggaggatttcaggcggaagtggaaaaagaccagttcgggcagaacagaatgctgatggggttgcagccggagcagttttcgtatcctctgaataccggagaagtctttgtcataccggaaaccgtgatgacctacagcagaaacgggctggcagagctttcccagaatctgcaccggtgttttcggaacaatctgtgcagggaccctcataaagaaaaggttcgtccgattctgatcaacagctgggaggcatcctattttgactttgatggggagagtattttaaaactggcagaagaggcaaaagagctgggaatcgagatgttggtgttagatgacggctggtttggtaaacggagggatgacaaccgggcactgggagactggcaggtcaatgaagaaaaattaaaatgcagtctgggagaactttccgcgaagatacacgctatgggattaaaattcggactctgggtggaacccgaaatggtttcagaagacagtgatctgtacagagcacatccggactgggcgcttcagattccggggaaaaatccggtgcgaagcaggaatcagctggttttggacttttccagaaaagatgcggtggactttatttttgattcgattacagaagtgttggattatgcagaggttgaatatctgaagtgggatatgaatcgcagtctgtgcgacgtttattccgcagcagctggatatcaggggaaagtactgtatgattacgtactgggtgtttatgatttcctggaccgtctactgaagcggtatccgaatcttttgattgaaggatgcagcggagggggcggaaggtttgacgcaggaatgttgtattacacacctcagatctggtgcagtgacaacaccgatgcattggaccggctgcagattcagtacgggacgtcttttggatttccgatcagtgcagtcggatctcatgtgtctgcggtgccaaaccaccagacaggaagaaaaacaccactctcaacgagaggcgcagtggcaatggcaggtacatttggatatgaactggacttgggaaacgtgaccgaagaagaaaaagaagagatcagacaacagatcaaggaatataagcagctggcaccgttgatccagaccggattgtattaccggctgagcaatcctgtgacggatgaagttgcagcatgggagtttgtatccgaggatagaacacaggcgatgatgcaggcagtgatgacacagattcatggaaatatgacaggaaatgcagtgaaatggaagggacttgaggaagaagcctgttatcaggatgcagaaagtggagaactgtattatggagcggcattgatggaaaccggaattttacttccgatcaaaagcggagcttatcagaccttccggatattgcttcgaaaagtaggatcctgacccaacaattggatatgtttttccaacattacagtctggcagtctccctcgaaatctttataataagaaatagaaacaggagaggagaaccagaaatatgagcatttgttatcacgaaggatcccgggaatttcatctttccaacagggatatcagttatattatcacagtcttaaaaaacggacagttaggacagctgtattttgggaaaaaactgcatgacagggagagttttgcccatctgctggagctgcgtcaccgcccaatggctgtatgtacttacgaaggagattccacattctcgatggaacatatcaagcaggaatatccgtcctatggagcaggggatatgcggtatccggcggtggagattctgcaggaaaacggaagccggatcacggattttgtgtatcagacacatcggatttatgacgggaagcccgcgcttgcaggactgccggctacctataccgaagattccaaagaggcacagacactggaaatcgaactgaaagatgagctgattcacaccacactgatcttgtactatacgatttttgaagagcttccggcgattacaagaagtgcaaaggtgatttaccacggaacagagaagatcgtgctggaacgtgcaatgagctgcagtgtggatctgccggatcacgactatcaaatgatcgagctgacgggagcctggggaagagagcgtgcggtgactgagcgaaagctgcagtatggaattcagggaatttatagtatgcgcggatgcagcagcagtaactttaatccgtttctggcactgcgtcgggagaataccacggaagcgtgcggggaagtgtatggcttcagtcttgtttacagcgggaattttctggcgcaggcagaggtggatacatacgatgtcacaagagtgacgctgggaattcatccggaccggttttcctgggaaatgaaaaacggagatgagtttcagacaccggaggcggtgatggtctattccaatcgcggactgaacgggatgagtcaggcattccacagtctgtatcgtgcacgcctggcaagaggatactggagagaccgaccgagaccgattctcatcaataactgggaagcgacttattttgatttcaatgaggaaaagattctggagatcgtgcgcacggcaaaacagcttggaatcgaattgtttgtactggatgacggatggttcggaaaacgggaggatgatcattcttctctgggagactggtatccgaatctggaaaagctgccggatggcattgcaggaatcgcgaagaaggtagcggcggaaggcatgaaattcggtctctggtttgagccggaaatggtcaacaaggacagcaatctctatagagagcatccggactggattttgtctactccgggacgtcatatttcccatggaagaaatcagtatattctggatttttccagagccgaagtggtggatgccatttatggacaaatggaaaaaatcctggaggatgcgccgatttcttatatcaaatgggatatgaaccgctgtatgtcagaagtatactctcatacagccagtgccgcagatcagggtaaggtcatgcatcagtatattctaggtgtttatcggttatatgagaagctgacgggcagatttcctgaaattttatttgaatcctgtgcaagcggcggttcccgttttgatccgggattgctgtattatgcgccgcaggcatggacatcggatgatacggatgcagtggaacgttgtaagatccagtatggaacgtcccttgtctatccagtgagcagtatgggatctcacgtatcagcagtgccgaatcatcaggtgcttcgcaacacatctttgaaaatgcgtgcggatgtagcgtatttcggaacattcggatatgagctgaacccgaacagtctgacagaggcagagcgggaggcaatcaaaaagcagacggcatttatgaaagaacacagaagcctgatccagtatggaacattctatcgacttcagagcccgtttgcaggaaatgaaatggcatggatggttgtgtctgaggacaaaaaagaagcgattgtgggctggtatcgcttcctggagccgatcaatatcggatatcggagcgtcagactgcagggactggatccgaagcttccgtatcagatttcggatatggaaatggcattgtacggagatgagctgatgcaggccggactgatcgtatcagacgtggcgtccggacaaaatccggagcagtataatggagagaacggagatttccagtctcgtctttatctgctgaaagcaaaggaagaataaaaaatgaaggggtggggatgcaaaagaattgattttttcatccccctcttttttgcttccgatactcagaaggacttagaccgttcactttacggaatgccttggaaaaagaaaagctgctggaatatccgcaggaataggcaatattctggatggacaggctgcttgactggagcagctcttcggattttgtgatccggtaccgggtgagaaactgctgcggggaaagttgtacggtttttagaaacagttccgtcagataactccggttcaaagacaaatagtccgcgatttcctgtacagtgagtggattctgataatttttatggatgtaggagatcgcctgattaatatatacgctggatgtattctgctgaggagaaaccgtacatccggcgtcctccaccagaagggcgagaaactgcatcagaattccctggatgtaaatctcatttgcggcacttaaggcgtgatgcttcatcatgtccaggatataggattttgcggtatcgatctgggtacaggaaaaaatcggatttctggcagaaagaccggcaagccgcagatatttttctgcatcatgaccgccgataccgacccagagatagctccagggattcactgaatcggcctgataaaaagtcagcttaccgggatgaatgagaaatccctgtccctgtttgatcggatagcgttcttcaccggagtaaaatacaccttctccctccagacagagatgaagcaggtagcagttccggactgccggcccgaaggaataggaaggggggcagtcctgcattccgcaaaagacagtgtaaatgtctgagaagatactgtgataaatatcggattgtgaataagaggacataggggactcctttcgtgtgaatgtctgtgatattttatcatgtttcgatatctctgacaacttatatacccatttgaatcatgaaaaagcacgaatgataatagagatgaaagccaaagagcagagattttttattgcgcagtttttgcggggaggggtataatataataggagaaattgcagattacggtttgaaatcaagaaggaatgagggaaaatatgaacacaatcgtagaaatggaccatgtgaccaaaacatacagcagaaaaatcaaaagcgggaaaggaatcttcaaaagcagtaaattcgagacaaaagaagcaatcaaagatatttcgtttcagatcaaagaaggagagatggtcggaattgtaggactaaacggtgcaggaaaatccacattgatcaaatccatgctgggaattctttctccggacagcggggaagcgaaaatgttcggaagggacagttttcagttccgcaagaaaaatgcagaatatatcggggcaaattttggacagaaaagttctcttgtatgggatcttccctttatttactctctggagttaaacaagaaaatataccgggtatcggacgaacggtatgaggaaattatagaagaactggaacagtttttgcagattggggaactgttaaacgatcgacatttaccatgccgtgatccgggtagccgtcagtgcgctgattccgatcgctctggcgaattattatccgacagtctgcatgctgggagagggcagcagcgggattttgctgtatatagcaggtgcctgtgtcatattgggggtcattgacgttctggtgtggaagaaagggatgaaagcgtatcagagtaccggggcataaagataaaccaaaaccttcttgcggcgggaataaaaattacatataatagaagtaattgataaaaagaggcgttcgatggcagaaaaagagacatggaggaatcagatatgagttttcaaatttacaattggctggaaaaatatgtgcatgaagtggtaagtacatttggataccgcatctggtttatcggggtacagggcagttatgccagaggggaagccacagaagagagtgatattgatgtagttctgatcctggatacgcttcttccggcagatctgaggatctacagagggatgctcaatcgtcttccgtaccgggaaaagatctgcggatttatttccggccgagaagagctggagaactggtctaaagcagatctttttcagttttgtcaggacacgatgccgctgaaaggaagtctgaatgagatcgtggcaaagctggatatggcagacgtgagacgggcggttcatacgggagcctgcaatctgtatcatgccgcctgtcacaatatgctccatgagcagagtcgggaagttctgatggaattatataagacatcggtatttacaatccaggcggaatattttttaaagaccgggaattatctgagaagaaaagccgagctgtttccgaagctgaacggactggatcgggagattttgtatattgcgatcgagatgaagcagaaaagcggaaaagtgaaaggcagttttgatgagctttctgaaaagctgatcgtgtggtccagcggactgatcagacaatatcagggagaaaaatgaatgaatacatataaattgcttcaaaaataggcgcgttccaatgaaaatatgcgggaaaatgcagaaaattgcaagaaaggattgacgaaacatcaaaaagtcgatagaataacaaccagtgataaaagaattggaggaatcttgcaatgacggcgtataaggatttgacgaaggaagaattattggaactaaaaagcgggcttcaggctcagtttgaagaggtaaaagccagagggctgaaactggatatgtccagaggaaaaccggcagcagcacagctgaatctgtctatggagatgatgaacattttaaacagtggaacagatcttgtctgtgaagacggtgtggactgcagaaattatggtggcctggatggaatcgcagaggcaaaacagcttctggcagatatgatggaagtaccaaaagacaacgtgatcgtattcggaaattccagtctgaatgtgatgtatgatacagtagcccgtgcgatgacacacggaatcatgggaagtactccatggtgcaagctggataaagtgaaatttttatgtccggttccgggatatgacagacattttgcaatcacagaacattttggaattgagatgatcaatgttccgatgacagcaacaggtccggatatggatctggtggaaaaactggtcagtgaagatccggcgatcaaaggtatctggtgtgtaccgaagtattccaatccacagggaatcacatattctgacgagacagtgtatcgttttgcaaacttaaagccggcagcagaggatttccgtatcttctgggataatgcatattgtgtacatcatctgtacgaagacaaacaggattacctgctcgagattctgatggaatgtaaaaaagcaggaaaccaggatatggtatacaagttttcttctacctccaagatcagtttcccgggttccggtatcgcagcaatcgcggcttctgatgcgaaccttgcagacatccgcaatatgatgaaagtgcagacgatcggccatgacaaagtaaatcagcttcgccatgtcagattcttcaaagatattcatggaatcgtcgagcacatgaaaaaacatgcagatatcatgagaccaaaatttgagacggttatcaacacattagagcgtgaactgggaggactcgagattggttcgtggatcgctccgcgtggcggatactttatctcctttgatgccatggaaggatgtgccaaagcaatcgttgcaaaagcgaaagaagcagggcttgtgatgacaggcgccggagcaacattcccatatggaaaagatccaaaagacagcaacattcgtattgctccgtcttatccgacaccggaagagctggcagttgcagctgagatttttgtactcagtgtaaaactggtcagcatcgataaattgctgaaaaatttataagattgtttcatgaaaaaggacaactgactttgagtacagccctcaaaatcagttgtccttttttctgtggtcatgcgttatttctctgtttttacggcatgttttttcggcagcgtgaatccatttccatgcacttcatttacctttccgatgatcataaatgcagtagggtcgatttccataacgagctgattgagttttgaaagctcccggttggaaatgacggtcaggatcatattttgtctggaatgaagatatccggtttctgtatgaagcagcgtagatccccgatccatcttccgcgtaatggcttcattgatttcatcggatttctggctgatgatcttgacctgcgtctgagcctggccgatgacaagaattttatccagtacaatggtgtaggtcatgacaagaagaattccgtacagaatggcctctttgtcacagaacaatgcctgaccgatcaggatcaaaaagtcaaatacatagagcattacagaaacaggcagtccgaattttttgttcaggatcaacggagggatatccatgcctccggtagaagctccgcaccgtatgacgattcccagtgaaaatccgataaagagtccgccgaagatgctggataacatccggtcatccgtgattgtggaaagcgaagggatattttggaaaaatccaagtgcaatcggatagtaaaaggtactgatcagtgtggtcagggcaaaatcaaatcccagtatcagcgcaccgagtaaaaacatgatgcaattgaagataaacacaaagacagaaatcggcagatgcagataatgatctatgatcagagaaagtccggtggttcctccggtcatcaactcgttgggaagaacaaacatgacgattcccagtgccatggtggtgttgccaaggaaaatcatgaaaagattttttggcctaaaaatattggttttcatggttttgacactctcctttgaaataattatgcgttaagctactatggtaaagcgaaaaaaaacaggctgcacatcagcctgtctgtcgattatatgaaattgaaaaagatgttctgtcagatcttttcatttgcgttcgcttccttttttgatttccgaaaaacagtatagcataatttcagggaaaagtacaagaagaaagtgtgaacaatacggagaaaaagacataatataaggaaaaaaggatgtgcgtaaaatggcatatgagacatatggacaaataaacggtgtgataagggagattcaaagaggggattcctgctgcagccagattctgcgtctggatacagaaaacggagaagtacgctttaccgtgatggcggatacaatggtgatcgaaaatgtaaggctgcgaagaggaatgcgggttgccgcgttttatgataccagccttccggttccggcaatttatcctcctcaataccgggcagagattgtgacagtgcttcggggagaacagaatgtgatgctgaatttctttgatgaaaatctggtggcagaagataattcacttcggttaaatctcagtcctgtgacaaatatcatgacacagaacgggcagaggtttacctgcagtccgagaaacatggagctgttagtctattataccaatacgacattcagcataccgccgatgacaacgccccagaaagtgatcgtaatgtgtgaaatgtagaaagataagaatttgttattggagaaatcgatcataagctggtctcttttccgggaatgcagtataataaaaacagagcaaaaggggggatgatgtgaatatcaatttaaaacagttggaggcgttttgtgcactggtgcgctcggtgcggcagtgatcggatgtcagaaaatgaaagggaggcagaagaaaagatgagtgacaaagaagagattgtgttttgtaaaggcgggggctgcacggcaaaacttggcccgggaatcctggcaagagttctggaaaagataccgaagacgcgggacgaaaacctgatgatcggatatgacagttcagacgatgcggcagtgtacaaactgacagatgatctggcagtggtgcagacgctggacttttttcctcccatggtggatgatccctacacattcggacagatcgcggcagcaaatgcattaagtgatatttatgccatgggcggagatgtcaaaaccgcattgaatattgtctgctttccggaaaactgggatctgaacatacttgggcagattatgctgggtggcggagaaaaagtcaaagaggcgggcggtgttctggcaggcggacattcgattgcggatacagacgtcaaatacggactttctgtaatggggaccatacacccggacaaggtgtttgcaaacaatggatgccgggcgggggatgttctgatcctgacaaaaccacttggagttggaatcgtgtgtactgcaaaccggatccaggaagcatccgaagaagcaatggcgcaggcaatccgttccatgaccaccctgaacaagtatgcctcagaagtagtgagaaagtatcaggtgcacggctgtaccgatgtgactggatttggttttctgggacatctcctggagatgctgggagatgcatattctgcccgtgtcgaaagcagtcaggttccatatattccggaggcgttcgactatgcaggggaattttacctgaccgcagcagcccagagaaacagaaaccatgtgggagaaaacgtgcagttttttgatgttccgtttgaaatggaagagattttatttgatccgcagacatccggcgggctgcttgtcagcatagaaaaaagtgatgcggagcagtgtctggaagagttgaaggctctgggactgccctgtgcgattgtgggagaagtcacagaaaaaagagagaaaaaaatagaagtgagatagaggtgcagagaacatgaaaaaatatatggtagatgcaagaggaaaacagtgtccgattccggtagtggagacgaaaaaaatgctggcacagatggcagaatcagatatcgtagagacactggtggacaatgcgattgccgtgcagaatctggagaaaatggcaaaacaaaaacagctggaatgttcctgggaacaacaggatgaacatacatatcgggtttttataaaggcagaaggcgctgtggatgaagagggggaagagactgcagaatgtatcccgtgtcagccggtctccgaaaaaacaggaaatacaatcgttgtgttatcttctgactgcatgggagagggggatgaagttcttggaagggcactgatgaaaggctttatttatgcgctcacgagtcaggaagggcttccggatacagtcatcatgtataatggaggcgccagacttccggtagaaggctccgaatccctcgaagatctgaagcttttggaatcgcagggagtggagattttgacttgtggaacgtgtctgaatcactacggactgacggagaagctttctgtgggaggtgttacaaatatgtatgtgatctgtgaaaaaatgctgcaggcagaaaaggttgtgaagccatgatttatctggacagcgcggcgaccagctactatcgtccgagagaagtggcgcaggcagtgtatgatgcgatcctgaccatgggaaatgcaggcagaggaagccatgcatccagtctgaacagtgcccgcatgatctatgagacaaggtgtctgctgaatgaattatttcacggaccaggaccggagcaggtagtgtttaccagtaatgctacggaagctcttaatattgcaattcaggggctgacagctcccggggtacggatggcggcgacagcaatggatcacaacagtgtcttacgccccgtgtatctggcaaaagagagagggtgcagcctgcagatcctggatgtggatgagaaggggcggctttccctggaaaagctggaagaattgtttcaaaatggtgtcgatatctttgcctgtacccatgcatccaatgtgacaggaaacttaaatccactgacagaaatcggaaaactgtgcaaaaaatacggcgtgttgtttctattggatgcgtctcagacagcaggagtatttccaatcgatatggaacgagattttattgatatcctctgctttaccggacataagggcctgatgggaccacagggaacaggggggatgatcgtacaaaaatctgtacacctgcctgcgtttaaaaccgggggaagcggagtgcagagctttctgaaaacacagcccaaggagatgccgactgtactggaagcggggacgttaaacgggcatgggattgccggattacatgcagcattaaactacattttgaatgtcggaacagaacagatcaaaaggattgaatgtcagagaatgcggcagttttatgagggaatcaaacatctggatgctgtaaaaatctatggagacttttcaaatatggagcgggcgccgatcgtcgctttgaatatcggaaattatgactcttctgcagtcagcgatgagctttccgaggtgtacgggattcagacgcgtcctggggcacactgcgcacccctgatgcacagggcacttcatacagaggaacagggaatcgtacgatttagtttttctcattttctcagtgaagaacaggtggaggaagcggtacaggcaatcaaagaaatgacagcaggagaagagatatgagaccaaaagaattacgtatcatagtgacatttgaaacgacaacagctgcgatggcatttgaaagcgaggcaaaaaagcggcagatcgggggaagactgatcccagttccaagggagatcacatctggatgcggactgagcttttcagcaccgatagaagagaaagaacagatttacaatctgatacagcagctgcagtaccaacaggtgctggaactgataatataaaagaagagaagcagttcaggtatgatcctgatcgcttctcttcttttttgtttattcttccggaggtgttacggtaccggaatctccattgctgtttccgttattatttccgttgttgtttccattgtttccggaattgttgttgttatcaccggactgatcggaatttccggaatcctcattatcttcggaatcctggctgttctgagaatcggaatcctctttgtacttatcgtcatcatcctcgtcatcctcttcttccttatagtggccggagcagctctgcgtcggaccggttccttttgcgaaatattccgtgtaggacggacaactgctgaccgccagaagaccagtgacagaacatactgttttctgctctacagatgcaggcatggtaaagttctttacctgaagaccgagtgtagtgttgacacggtccatgatatttttccatattatttcgtgccaggtctgatcatagatatcttccataggtttgtttgaatcatatccaccccagacagagcatgtatagtacggtgtgtaagcagcaagccagaggtcagcactgtattcggaagtaccggtttttccggatgaaggcattccatttgcaagtcgggcatgtgtacccgtagcattaggatttgtgaatacatcctgcatagcattggtaagaagtgcggctgtggaatcctttacaacctgatgtgtctcaggagtactgttgtccagaatgacattgccgtcatgatccaaaacctttgtatataagatcggttttgtgtatactccattgttggccagagcagcataggcagcggtcagttcaatgttataaacaccgtctgtggtaccgccgagtgcggtggactgattgtaatcgttttttgccggattttcttctttgcttaccagtgtagaaaatccaaagttctcaagatatttcataccggtatcaattccgatatctgtaaatgtccgtaccgcacaaacattcatggagcgaagaatcgcatagcggacagtagcctgtccaatatacttgccatcccagttgttgaccggagtcccgtcgctgtatgtgtacggagaatcttcgatcagagaagccagagtatattttccggtatcgatcgccggagcataaacacccagcggcttgaaacaggaacctggctgccggtgagaatcggtcgcacggttcagcgaaaagctggctgttttttccccacggccgccgacaatggctttgacttcaccggtgtactgatccatcacaacaacagaagtctgaggctgtggtggaatggtgatactttcggttacagtatctccttcctgaatgttcagtgtgcttttgtattctgcaactgcctgattggcttcctccggggaagaatagtccaatggatattcacgtccccatgctgcctgaatataatctcctacattgttctggctgtagttttcaacagaaccgtcagcacgtgtaatagtcagtgcgtattgcagaccgtattcgatggtagacggatagttgctcggatcggcaacctcttcatcgcagatctgctggatcgtcggatcctgtgtcgcataaatcgtcagaccgccgctgtacagcagattatgtgcctgtgttgcagtgtaagatttacgctcctgcaaatcgtttaatatctgttctgcaagctcatcgataaaatatgtgttcggtttttccgcatcagagccgactgcagtaggctgaatcctgtcatagacagggtctgccttggcctcatcaaattcctgctgggtgatgtagccctgttccagcatgttgttcagtacaatgtcccgccgtttggcattctcctccggatgagtcacgggatcgtatcttgtcgggttctgggtgatcccagcgatgactgcacactccgaaagtgtaagctctgagacatctttgttaaagtagcgctttgcggcagactgaacaccgagacagttctgtcccaggttgatggtgttcatgtaggcttccagaatctcttctttggtcatctgcttttcaatttccagagcaagatactgctcttgcagttttcgctccagactgtcgaaaaacgttttttcattcgtgaaattcgggaacacgttatttttgatcagctgctgggtgagcgtactggctccttctgaaaagtccccgcttgtgatacctacaagaccggcgcgcagaataccctgcaggtcgattccgttgtgctcgtagaaacgttcgtcctcaatcgctacaaatgcattggcaagatattttggaatggtgtcaatggtcttgtagacacggttggatccggcttctcggaactgccccagattctgaccgttagatgctgcaaccacctgggatttatatccgcttggtttgacactggcaggagtgatctctggcgcatcgtcaatgatcttcttgacgaaaagaccgccgcctacggcaccgatgatgcagatgagaaggaagcagatgacaacggccttaaagacacggacgccgacccgtttctttttcatatttttctttgaagatacattttttttcttcttcgaaaggctttcttttccgtaattcatgaataatatcctcctttattcattctactcattatatcaaatttgctcttttaaagcaaaggaaaaagaaaaagttcatattcttataaaaaaattttaagaattgcacagtttttcttgtgtttgttccaaaggcatagtatatataattgagaaagaacaggcagaaaaaacctgaaacaaacaaaaggcatggaaaaagcaaggtgggagacagatggaatacaggacagtatatcagggcggcaagggcgagatcgtggaaaaaaagtcccggtttatcgcggaagtatttttggtgcactcggaggaggaagccatgcagtatctggaacaggtacggaaaaagtactgggatgcaaggcatcactgctgggcctatgtaatcggagaagaacgcgtgacagagcgctgcagtgatgatggggaaccgagcggtacagcaggcaaaccgattctggaggtcatccggggagcgggacttcacaatatttttgtagttgtgacacggtattttggcgggacacttctcggaacgggaggtctggtcagagcgtataccgagtcagcaagagaagggatttcccacagtcagattattaccaaaatctatggatttaaactgaatcttacaacagattataccggattggggaaaattcagtatctgctgggacaaagagggctgacaatcctggacagtgtgtatacagagaaagtagatctgactgtcctgattccgaaagaggaggagtcaaagctgatcgctgagatcacagaagcgacaaatggtcagaccggaataaccagaacaggagagtgctggtttgccaacgtagatggtgagatggtcgtatttgaataagtgacaataaaaaagctgccggttggggcagcttttttatcttatgaaaattctggctcgatcagtccgaaagaaccatcttttcttttgtagacaacattgacttcgtctgtctctgcgttgcagaatacgaagaaagcatgtccaagaagatccatctggatgcaggcatcctccggatacattggtttgatgccaaagcgttttgtacggacaatgcggatctcatcatctacagaagtgtcatcttctgattcgaaaaattcttttttaaagttattgccggaagcggaaggatgtccctggcttctggcaaccagtttgtttttatatttgcgaagctgtctttcaataacctcttctacaagatcaacggatacatacatatcatcgctggtctgctcagagcggataatgtttccttttacaggaatggtcacttcaatcttctgacgttctttttccacactgagtgttacgataatttctgtttcaggagtgaaatacctttcaagttttcctaatttctgttcaatagcgtcctttaaacctggtgtcacatcgatgttttttccactaataataaagttcatactggtcaactccttttgtttatattgtacaaagaacttgtccttataaagtgttctttgtactatgtaaacattatagcacggaattcctctattgtatagaacgaattacttcaattcgggtaatttttccatcggtgatcttaacgatgcgcagaccgaaatcagaaaagtaagtgcaggcaccgactccgatctcaatttcatcttccttcatcttctttaacagcacatccagcagtgtctcatcattctcataaggaatgtggacatggatcagacgattgatatatttgactttctgagaggaacggaaaataatcttttcagactcatcaaaagtcataaacaaaaattttcttgtggcaaataaaattgcaatggcgattacgccgatcagactgttgagcggtgatccatgctcgatgatgatctgtcttgcgatggcaaagagcagaacctcaaatactgtgatcggggtgtggagatacagcatacgtatcatttccacaccgatgatcaggttaaaacaggtagtcagcatatcgtcataatttggatactgattcaggtctgacaaatgctgaaatgagaggatcagctgaaaggtcatgatgataattgtaactgcaaggatcaaagcgatgacaacttccaggattgaagtgatccatttcaaaaaggcattggcatattttttcatggttgtctcctgattatttcaaattgctgcgtttacgcattctggaatccaggatttttttgcggatacgcagtgtttccggtgttacctccagaagctcatcggtatcgataaagtccagtgcttcttccaggctcaaaatacgaggcggtgtcaagcggagcgcttcgtctgcactggaggaacgggtgttggtcagatgctttgtcttgcagacgtttaattcgatgtcttctgcttttccgttctgtccgatgaccattccggcatagactttttcaccaggtccgataaacaaagtaccgcgttcctgtgcgctgtagagtccgtaagtgacagactcaccggtctcaaatgcaatcagagatccctgtttgcgatactggatatctcctttatacggcgcatatccgttaaagcttgtgttgaggattccgtttcctttggtatcggtcataaattctccacggtatccgatgagtccgcgggcaggaatcagaaattccagtcttgtataaccgccgctggaaacgcccatgttctgaagctctccctttctctgactcagtttgtcgatgacagttccggtaaattcttccggtacatccacgtaggcaagctccattggttctaattttttgccgttttcatctgtgtgatataaaacttctgctttgcttaccgcaaattcgtatccttcacggcgcatattttcgatcaggacagaaaggtgaagctcgcctcgtccggatactttaaagctgtcggcgttctccgtctcttccacacgcaggctgacatcggtgttcagttcgcgcagaagacggtcgcgcaggtgacgggaagtaacgaattttccttctcttcctgcaaacgggctgtcattgacgatgaactgcatggagatcgtcggttcggaaatcttctggaatggaatggcttccggattctcaggagagcagagggtgtctccgatggaaatatcggaaataccggaaatcgctacaatagaaccgatcgtggcttcttttacttctactttgttcagaccgtcaaattcatacagtttgctgatcttgactttctgctgcttgtccggatcgtgatggtttaaaaggagcatatcctgattgacacgaatcgttccgttgtctacttttccgactccgatccgtccgacgtattcattgtaatcaatggtactgatcagcatctgtgtcggtgcctcgggatcgccctccggagccgggatgtattcgaggatcgtctcaaacaatggctgcatatctttttcttcgtcagaaaggtcaaggaccgcaattcctgattttgcggaagcatagacaaacgggcagtccagctgctcgtcagaagcatccagttccatgaaaagctccaggatctcatcgatcacttcatccgggcgggcttccgggcggtcgatcttattgatgcagacgataaccggaaggtctaattccagtgcttttctcagtacgaatttggtctgcggcatggcgccttcaaaggcatcgactacaagtacgacaccgtttaccattttcaggacacgttctacttcaccgccgaagtccgcatgtccgggcgtatcgatgatgttgatcttggttcctttgtaatagactgcagtatttttggagagaatcgtgattccacgttctctttcaatatcgttggagtccatgacacgttccgcaacatcctgattttcgcggaatacaccgctttgttttaagagctcatccacgagtgttgtttttccgtggtcaacatgagcgataatggcaatatttctaacatcttcacgttttgttttcataattttacactctttcctacttatgttaatgtgtgttctcttgttacaactttttcattctatcataaatttcagattttacaagtactcttgtgacaggcaaataaaaaaattgtcgatagattttgtcgaacggtttttcggacaatcgggtctaaactgcggtatgatgtcatagacttaagttgactcaaaaatataaaataccacatacgaggaagggagtactacaaattatgtcagataagattattgaaaacaatcaggtaaccatcatgggagttgtggcatccgggtttacatacagccacgaggtgttcggagagggattctatatggcggatgtgcttgtgaagcgtctgagtaattcaaatgaccggattcctctcatgatctcagaacgtctgatcgatgtgacgcaggattatacaggagaggcgatcaaggtatccgggcagttccgttcttataaccggcatgaagaacagaaaaaccgcctggtgctgtctgtgtttgtaagagaggtagaatttattgacgaggaactggatggagcgaaaacaaatcacattctgctggaggggtatatctgtaaaaagccggtgtacaggaaaacaccgcttggacgggaaatcgcggacctgcttctggcggtgaaccgtccgtacggaaaatcggactacattccgtgtatctgctggggaagaaatgcacggtatgcgtccggatttgaagtgggagagcatgtacagatactgggaagaatccagagcagagattatgtgaagaaaatttccgagaccgaaacacagacacgaacagcctatgaagtatctgtgagcaagctggagtgcatggaataggacgtttttcacattcccatcgttgacatcacttctgaataatgataaaatttcataaacattactgagtagagaatcgacaaggtcaggaggataaatatgtcaatttttacaggagcaggagttgcgattattacaccatttcatgcagatggaagtgtgaattatgaaaaactggacgaattgatccagtttcattgtgataacggtaccgacagtattgtgatctgcggtacaacaggggaatcgtctacattgacggaagaggagcatatggactgcatcaagtttacgatcagacagacgaaaggacggattccggtcattgcaggaacaggttccaactgtacacggactgcagtcgagatgtcaagagaagcagccgagagcggtgcagatggcgtacttcttgtaaccccatattataataaagcgacacagacgggactgattgcgcattataaggcgatcgcggccgagacaaaagcgccgatcatcttgtacagcgtagcgagcagaaccggagtgaatattgagccatccaccgtagcgacactggcgaaagagactgacaacattgtggcagtcaaggaagcatccggaaatatctcacaggtagcgaagatcttgcagctgacagacgggaaagtggatgtatattccggaaatgacgatcagattgttccgatcctgtcactgggcggaaaaggtgtgatttctgtattgtccaatgtggctccgagagagacacatgatatctgtgcaagcttctttgcgggagatattgcgggaagcagggcattacagctgaaggcacttcctctgattgaggcactgttctgcgaagtgaatccgattccggtgaaaaaagcagtgaatctgatgggaatggaagtcggcggattgagaatgccgctgacagagctgagtgaagcgcataccgtgcagctgaaaaaagcaatgcaggagttcggaattcagttagcataaaaaattgttaaaaggatatcatagattgagcaaatagccagaatgtgatatccttttttgtatacccatccgggtaaagtctgtcttttgcaggcgtgtattgaaaagtccggatcggtatagcgtgaaagaataacgttttccggtgtggaaaatgaaagatacagaacgaggaggaaatcaggatgataaagataatcatgcatggctgcaatggaaaaatgggacaggtgatcacaaaaattgcggaagcagacagtaaagtggagattgtagcaggagtggatcagtttcagggagtgcagaatccgtatccggtgttttcatcgatggaagcgtgtgatgcagaggcagacgtagtgatcgatttttccaatgcggcagcagtggacggacttttggactattgtgtgaacagacggcttccggtcgtactttgtaccacgggactttctgaagcacagcttgaaaaagtagaaaaagcagcagagcagacagctgttttaaaatcagcgaatatgtccatggggatcaatctgctgatgaagctcttgaaagatgccgcaaaagtactggcgccggcgggatatgatattgagctggtagagcgtcatcacaaccagaaagtggatgctccaagcggtactgcactggcgcttgcggattctgtcaatgaagcactggatcatgaatatacgtatgtatatgacagaagccagtaccgcaaaaaaagagaagagaaagaaatcggaatttcagcggttcgcggcggaacaatcgtgggagagcatgaggtgatctttgcaggaatggatgaagtgatcgaatttaagcatacagcatattccagaagcgtgtttggaaaaggcgcggtggaagcagccaagttcctggcgggaaaaacagccggcatgtatgatatgagtgatgtgattcagttttaatcagagtttgagtaaagagcggggagtgtcatgaaagaattagagacaagatatctggagcggctgtcggatctgtatccgacgatcgcggcggcttctacagagatcatcaatctgcaggcgatcttgaatcttccgaaaggaaccgagcattttctgacggacattcatggggaatgggaggcgttttcccatgtgctgaagaatggatccggtgcggtgcgaagcaaaatcgaggatgtatttggatatacgcttgggaagcgggaaaagcaggaactggctactttgatctattatccaaaagagaagacagagcaggtaaagcggaccgagaagcatatggaagactggtataaaattcagctgtaccgcctgatcgaggtgagcaaacgggcagccagtaagtatacccgttctaaagtacgcaaggcacttccgaaagattttgcttatgtcatagaagaactgatcacggaaaaggcggagcttcatgacaaggaatcctactataatgagatcattcagacaatcatccggatcggcagggcagaagaatttatctgtgcgatcgcagatctgatccagaggcttgtgatcgatcatttacatattgtcggtgatatttatgacaggggaccgggcccgcatattatcatggataagctgatgacctatcattcagtggacattcagtggggcaatcatgatgtgctctggatgggtgcggcagcagggcaaagaggttgcattgccaatgtgatccggatctgtgcccgttatgggaatctggatattctggaggacggatacgggatcaatcttctgcctctggcgaattttgcacttcgcatttatggggacgacccctgtacctgtttcaggcgcaaaggaagcgaacgcctgcaaaaggcggagatggagatgaatcttcggatgcacaaggcgatttccgtgatacagtttaaggtagaaggaaaactgattcttcagcatccggaatttcagatggaagaacgtgcactgctgcacaggattgattataaaaaaggcacgatcctgctggatggaaaagaatatccgttaaaagatgatagctttccgaccattgatccggcagctccgtatgaactgaccgaagaggaagaggagattatggaacgcctggaaaaagcatttgcaggatgtgaaaagctgcaggatcatatgcggtttttgcttgcaaaaggtggattatacaaggtgtataacaacaatcttttgtatcacggatgcgtaccgcttagagaggacggatctttaaaggaagtacagctctgtggaaaaagctaccgtgggaaaagtctgtatgatgcgctggaaggctatgtaagaaaaggctttttcgcgctggatgaacaggaaaaagagcagggaaagaatatcatgtggtgtatctggcagcatccggattctccgctgttcggaaaagacaagatggcgacctttgagcggtattttatcgaggcaaaagagacgcatctggagaaaaagaatccgtattacgaacttctggaaaaagaagcggtggtagacgagattctggaagagttcggactgcacccggagggagcccacattgtcaacgggcacgttcctgtaaaatgtaaaaacggagaaagtccgatcaagtgtaatgggaaagttctggtcatcgatggaggtttttccagggcgtatcagaaagagacgggaattgcagggtatacccttgtctacaactcctatggtcttgttctggttgcccatgagccttttgagtcgaaagaggctgcggtggaaaagggaagcgatattcattcggattacatggtagtgaaacgggtgacagaacgccgtctcgttggaaatacagatatcggcaccgagttaaaagagcaggtagcagatctggagtcgctgcttgcagcctacagaagcggtcaggtgattgaaaaactataagcagagacttacgtgaaaagaaaggcatgaaaatatatgagtaaagagatagaaaaggaactgttggaggaagaactggatctgggagcagaaacagaggatctggtgccggattcggcggatatgacggaaccgttaaagatttatttaaaagagatcggcaggatcccgctgcttacagcagaggaagaactggagcttggcagacagatcgcagaaggagatacagaagcacgacgaaagatggaggaagcaaatctgcgtctggtggttgcggtggcaaagcattatgccggaaaaggaatgcagtttatggatctgatccaggaaggcaatatcggtctgatgcgtgcagtggaaaaatttgactacacaaagggcagtaaattttccacctatgcggtatggtggatcaaagaagccattctgcgggcgctggattctcagtccagagagattcgtgtgccggtccgtgtggctcagaatatgaataagatcagcaaaacagagcggaagatggaacagacactcgggcgtgaagttgctgcagaggagattgcaaaagagctgcatatgacaacagaagaagtagagcgcatgcagagctatatcaagaatccggtttctctggagactccggtgggagatgaagaggacagcaatctggaagactttattgaagatacacaggagccgactccggaggaggctgttgcggcactggtacagaaagaagaagtgcaggagatgctttccacgctgacagaaaaagagcagaaaatcttaagactccgctacggtctggaggacggtaatgtacatacgctcgaagaaaccggacagatactcggcgtgaccagagaacggatccgtcagctggagtcaagagcattggaaaaactgaggaaatcagcaggaccaagagcataaaaaagaaaaaaattccattcataaaatattaaaaaaaggaaaacttaacagtgtaagactatattttatgaaaggaagaagattatgaaaaacagaaaaaaactgcttgtattgctgatgtgtacctgtatgcttctgggcacgactgcatgtggaaacagaagagatacacagaacgatacaacaatgaatgatgcaactgacaaaacaaaggacaacaatgacaagacagacagaaatgaaaaccgtacagatgacaacagtaacggaaaagcagacaacgtggtagatgatgtcacagacggtgtgaatgatgtagtggatggtgtgaccaatggagtggatgatctgacaaggggagctacggatgcggtagatgatgctgcggatggaatgaccaaagatcataacacacagaaccgggagaataacaagtaggttttgaataccggataaacaagtgctgcagaagaagtttttgcagcacttttctataaaaggagaattgtgatgaagttcagaccttgtattgatatacataacggaaaagtaaaacagatcgtcggcggcagcttaaaagatgaaggcgatatggcacagaccaattttacttcagaacaggatgcagcctggtatgcagaaaaatataaacaggatggactcaaaggcgggcatatcattctgctcaactccagagattccaaatattttgaggcaacgaaagaacaggcgctcctggcgctttcggcatatccgggagggatgcagatcggcggcggcatcacggcgggaaatgcagaagaatatctggatgcaggtgccagccatgtgatcgtaacctcttatatatttcgtgaaggagaggtgaatcgcagccgtttgagacgactgaaagatatggtcggaaaagagagaatagttctggatctgagctgccggaaaaaggggaatgactattatatcgtgacaaaccggtggcagacgtttaccagagaaaaactgtcagaggaattgcttgatgaaatggcgcagtactgtgatgaatttctggtacacggtgtggatgtggaaggaaaatcttccggagtggaaggagaacttgtggaactgcttggcagatgggaagggattcctgttacttatgcgggcggaatcggaagtatgaaagagctggaaaaatttaaaaaacttggacatggaaagctggattttacgatcggaagtgcactggatctgtttggagggacaattccttataaaaatctgctccgtttgtaaatgaaatgtaaacaaagcggaacaaaaacatgaattggttgaattcatggaaagttagtgatagaatggtaggcagagtaaatttagacaaggagcagattgcagattatgggtttaatggataaaattttcgggactcacagccagcacgagctgaagagaatctatccgattgtggatcgcattgaggcgctggagccagagatgaaagcgctttcggatgcggaattaaaggataagacaagagagtttaaagaacgtctcaaagagggagagacactggatgatattctcccggaggcatatgcagttgtaagagaaggtgcatatagaagtatggggatgcgccattaccgggtacagctgatcggcggtatcatcctgcatcagggacgtatcgcagagatgcgtacaggtgaaggtaagacactggtatccacacttccggcatatctgaatgcgctggaaggaaaaggcgttcacattgtcacagtcaatgattatctggcaaagcgtgatgccgagtggatgggaaaagtacacgaatttctgggactgacagtcggtgtggttctcaatgatatggacaatgatgagcgccgcgcggcatataattgtgatattacatatgtaacgaacaacgaactgggatttgattatctgagagacaacatggtgatctacaaggaacagcttgtacaaagagggctgaactttgcggttatcgatgaggttgactccgtattgatcgatgaagccagaactccgctgatcatttccggacagagtaataaatctacaaaattgtatgaggcatgcgatattctggcacgccagctggaaagaggagaagcaagcggtgagttttccaagatcaatgcgatcatgggagaagatattgaagagtccggagattttattgtcaacgagaaagaaaaggttgtcaatctgacagaagacggtgtgaagaaggtagaaaacttcttccatatcgagaacctggcagatccggagaatctggagatccagcacaacatcattctggcgctgcgtgcgcataacctgatgttccgcgatcaggattacgtggtgactcaggagggagaggttatgatcgtggatgagttcaccggacgtatcatgccgggaagacggtattcggacggactgcatcaggcgatcgaagcaaaagagcatgtgaaggtcagaagagagagcaagacactggcaactattacattccagaacctgttcaacaagtatgagaagaagagcggtatgacaggtactgccttgactgaggaaaaagagttccgtgatatttacggaatggacgttgtagagatcccgaccaaccgtccggttcagagaaaagatctcgaagacgcagtatataagacaaaacaggaaaaataccacgcagtcgttgaagccgtgaaagaagcgcatgcaacgggacagccggtcctggttggtacgatcacgatcgaggtttcagagctgctcagcaaaatgctgaaaaaagaaggaattcagcataaggtattgaatgccaagtatcatgaactggaagcagaaatcgtggcagatgcgggacagcacggagcagtcacgattgcgaccaacatggccggacgtggtacggatatcaagctggatgatgctgcaagagaggccggaggtcttaagatcatcggtacagagcgtcatgaatccagacgtattgacaaccagctgcgcggacgttccggacgacagggagatccgggagaatcccgtttctacatttctctggaggatgatctgatgcgtctgtttggttctgaacgtctgatgagtgtattcaacacacttggtgtagaggacggagaacagatcgagcataagatgctctccagtgcgattgagaaagcacagaagaagatcgagggcaataactttggaatccgtaagaatctgctggaatacgatcaggttatgaatgagcagagagagatcatttatgaggaaagacgtcgtgttctggacggagagagcatgcgagataccatctacaatatgatgacagaatatgtagaaaatatgacagaccgctttgccgcaccggatgcagattcggaagaatgggatctgtcaggactggagctgacacttcacggggagattccgatgctgaagatgccggatgcagaggaagtcaaggacatgagacagaaagagctcaagcatacattgaaagagcgtgctgtaaaagcatacgaggagaaagaagcagaattcccggaagcagagcagctgcgtgagatggagcgagtggtactgttaaaggcaatcgatacacgctggatggatcacatcgatgatatggatcagctccgtcagggaatcggtcttcaggcatacggacagagagatccactggtagaatataagatgatgggatacgatatgttcggcgagatgaccaattccatcgcagagacgacgatccgtaccttattccatatccggatcgagcagaaggtagaaagagagcaggtggcacaggcgaccggaacaaacaaagatgacagcgcatcacacactccgaaaaaacgggaagagaaaaaggtttatccaaatgatccatgcccgtgcggaagtggcaagaagtacaaacagtgctgcggaagaaaatagtaaccaggtaagtgcctgaatattttgttgactgtgtgtatactgcatcagacattgtgctgcaatatatacacagtcaatgttgatttaaaacagatttttgaaaaaagaaagaggtgatcaaggtggttttattagatgaactgaaagtaagactgagtgcatacgaagagccgctgaaagatttgagggattcactttgacttagcgtcaaagaaagaacgaattgaggaattagaaagaacgatcgaggagccgggattctgggataatccggatcagtccagacagacgatgcaggtattgaaaagtcttcaggattcggtaaagcagattgagcagatgtacgcagattatgaggatctgggactgctgattgagatgagtcaggaggaacaggacgaagagacggtgcaggagatcgaggaagaactgctccgttttgaaggagagtttgaagagctgaggatccagacacttctgaccggagagtatgacagagatcatgcgatcgttacgcttcacgccggagcaggcggaacagaatcctgtgactgggcaaacatgctttacagaatgtacaccagatgggcagagaaaaagggattttccgtagaagttctggattatctggaaggagatgttgcgggaatcaaaggcgtgacatttgaagtacgaggagagaatgcttacggatatctgcgctctgaaaaaggggtgcacagactggtcagaatttctccgtttaatgcggccggaaagcggcagacttcttttgcatcctgtgatgtgattccggatattgaggaagatattgatattgagatcaatgatgacgatatcaggatcgacacatatcgttccagcggagcaggtggacagcatatcaataagacttcttcggcaatccgtatcacgcatttcccgacaggaattgttgttcagtgtcagaatgagcgttctcagcacatgaataaagacaaagccatgcaaatgctcaaagccaagctgtatctgatgaagcagcaggagcaagcagacaaagtgtccggtattcgcggtgagatcaaggagatcggattcggaagccagatccgttcctatgtcatgcagccgtatacactggtgaaggatcaccgtacgaatatggagatcagcaatgtgaacggtgtgctggacggcaacctggatccgtttatcaacgcatatttaagtgctccgaaaaacccggaagagtaggacagatgcagaaaaaagaacaggaaggaaggcgaatatggtaaatatagcagttatgggatatggcacggtgggatccggagtcattgaagtattacagaccaataaggaacgaatcgaccagagagccggggatgagatccatgtaaaatacattctggatctgagagatttcccgggagatccgattcaggaaaaaatcgtacatgattttcaggtgatcgcagaagatccttccattcagatcgtagtagaggtaatgggcgggattgaacccgcatatacttttgtgaagaagtgcctgatggccggaaaaagcgtggtgacctcaaacaaagcgctggtggcaaagcacggtgcagagctgctttccattgcaagggagaaaaatatcaattttctgtttgaggccagtgtcggaggcggaattccgatcatccgtccgttaaattcttcaatgacagcagatgagattgaagaaatcacagggattttaaacggaacgaccaattatatgctcagtaagatgttttatgaaggagcagattatgaggaagttttaaaagaggcgcaggaaaaagggtatgcggaacgaaatccggaagcggacgtggaaggatatgatgcatgccggaagattgcgattctttcatctttgatttccggacagcaggtggattttgaagatatttatacagaggggatcacgcagattacaaaagaagatatgatgtatgcaaaggcaatgggaatgacgatcaagcttcttgcatgcagcagaagggatgaagatcatatccatgccatcgttgctccgtatctgctgagctcttcgcatccattgtatagcgtaaatgatgtctttaatgcgatttttgtacatggcaatgtactcggagatgcaatgttttacggaagcggtgcaggaaagcttccgacagcgagtgcggttgtttctgatattgtagatgaagtaaagcatttgaaccggaatattatgacgatgtgggatcaggataaagtggaactgcttccgatctcggatacgagcaagcgtttctttgtgcggatcaagggagaaccacaggcaatgaaagcacatctggaaagtaaattcggaccgattgagattgtacaggtggaaccgttggagggagaattcggatttctgacagaaattatgacagaaggacattttgaacagtgccagaaagaatttccgtccattctccaccggattagagtagaagggtgaggatgcgtatgaaatatgttgttgttttatgtgacgggatggcagatgaaccgttggaagaactgggcggtatgacacctctggagaaggcgcatactccaaatctggaccgcatggcgcagatttcagagattggcatggtgcagactgttcccgacgggatggctccgggaagtgatacggcgaatctttctgtgatcggatatgatccaaaggaatattataccggacgctcccctttggaggcgttgagtatcggggtggatatggcgccaaccgatgtatcttttcgctgtaatctggtgaccttgtccgaggaagaagagcggtatgaggataaacggattctggatcacagttccagcgagatcagcactgaggatgcggctgttctgatggagaccctgatgcaggaaatgcgaagaggtgggtatgagttttatacaggcacgagttacaggcatttgctgatccataaattcggaagtgtagtcgaattgacagcgcctcatgatatcctgacaaagcggattggggagtatctccctcaggatgcggtacttcgggaaatgatggagaccagctaccggatcttaagcaatcatccgctgaatctggagcgaaaggcaaaaggactcaaccctgccaattccgtatggttctggggggcaggtaccaggccgatgctgacctctttcgaggaaaaatatcataaaaaaggagccatgatctcagcagtggatctgttgaaggggattgctgtaggagcagggcttgacaatattatcgtagaaggtgcaaacggaggacttcatacgaactatacaggaaaagcggaggcagcagtggacgcgctggcggcgcaggattatgattttgtatatgtacacattgaagcaccggatgagatgggacatcagggaagtattccggataagattaaggcgattgaaaatatcgatcagaagatcatcggaccgatcgttggggaactggaagatctttgcatggatttcaggacgttagtccttccggatcatccgacgccgatctgtgtccgcacacataccggtaatccggttccgtatcttttatatgattccagaaagaaagcagaaggaatgccggagtattcagaaagactgggcaataagagcccattgttcgagaaagaaggacacaggctgctttcccgtctttttgagatggacaatgaacggtaaacagagaggaagaaaaaatgctgatagtaaagaagtttggcggcagttcggtcgcagataaagagtgtatttttcgtgtggcagagcgctgcgcggaagattataaaaacggacacgatgtgattgtggtcctttcagcgatgggagacacaacagatgatctgatcgcaaaagcaaaagagattaatctgaatccatccaagagagagatggatatgttgttgacaacaggggaacagatttctgtgtcactgatggcgatggcatttcataagctgggaatcccggcagtatcgctgaatgcattccaggtaaagatgcacagcacatccacctatggaaatgcaagattcaagaaggtagaatctgagagaatcctccacgaactgggataccggaagatcgtgatcgtcactggattccagggagtgaacaaatatgaggattatgcgacaatgggacggggcggttcagataccacggcagttgcaatcgcagcggctctgggcgcagatgcgtgcgagatttatacggatgtagacggtgtgtataccgcagatccacgaattgttccttctgcgagaaaattaaaagaaatcagttatgatgagatgcaggagctggcatccatgggggcgaatgtcctgcataaccgttctgtggaaatggcgaaaaaatatggagtacagctggttgtacgttccagcatgaacagagaagaaggtacggtggtcaaggaggtagtaaaagtggaaaaattgttaatcagcggagttgcatctgataaaaatacagcgagaatttctgtcatcggaatcgaagacaaaccgggaacagcgttcaagatcttcaatacacttgcaaagaagaatatcaatgtggacatcattcttcagtctgtaggaagagacggtacaaaagatatttcctttacagtggcagaggatgatcttcaggatacactggcgatcctggaagaaaataaagaagcgctgacgatccaggaaatcaattctcaggagagtgtagcgaagatctcgattgtcggagcaggaatgatgagtaatccgggtgttgctgccaagatgttcgaggcactgacaaatgccagagtcaacatccatatgatttcaacatcagaagtaagaatcacggttctgatcaatgaaagcgatgtagaacgtgcgatcaatgcagttcacgagagatttggactgggagaataataaaaaaaggaaatccgactggagctggcggatttcctttttctttattacaacagttttttcaatagtaatttatcttccggattcatggcccggtatcccttgatcagttcgacttcttcccgcgtaagatagagtgtatcggcagtgtcgatctccatggcatacgtaaagggacctttctgttcgaggatcagtccgtcttttgtacagggatgattgaccagctggtcgagagatactccatagatatcagccagacgcatcagagaatccagatccggtgtccgtttactggtttcgtagttggaataagcctgtctggaaatattgagcaagtcactgatctcttgctgagtgtagtgatgtgctttacgaagacggtataaattttcaacaagctgaatattagacattgctgtacctccatttacagggaattgttaaaagcttagtaaattataacaattttccctataaatagatatctatgcgacaaaacgtagcgaaagaacaaaaagccacaaaaagttgatatcagagtttgctgagtgtactgttatgataggaagaagaaaaggtaacgtcttcgccgaaccatttgggtggagtaaagtgattggcagtctcttcatcaggaaattctacttccgcaagcatcagaggcgcaaggtctccggaaaaaatatcaagctcaataaagagggaatccttaagagggatcacatatctttttttcgtgatgagccgtccgtcgattttttcttttaaatgttcataggattcttttgtcagcggaagattgtattcttcccggatcatcattcctttggatttgtaagtcagaatgtagtcattgttgtcccggcggatacgtaccacaggtgcagtggagagatatccctgttcgatcttgcggcatggatatgatgaaagagcaaaggggacagatgaaatcagatatttgcgctcgatttccatgaaaaactcctttctttgaaaacatcgtttgttgtttgatatccggtatcatcataatatgaaaaacggaaaatgtaaacggggaggcattgcatttttaacagggatttgctacactttttaccatatgaaagaaatgaaaatcaggttcagattttaagtcaggaggaaatgatcatgaaacagattgcggtatttctcgcagaaggatttgaagaaatcgaaggacttacggttacggatctgctgcgcagggcaggtgttactgtgacgaacgtatcggtcacaggagaaaagacagtacatggctcacacggaatcggtgtcgaggcagacgccctgtttgaggagatggagtttgagggaatggatatgctcgtactgccgggtgggatgccggggacaaagcatttgaaagaacacagagatttgtgtgcgctgctcaaagaattttatgcaaaagagcgttatctggcagcaatctgtgcagcgcctactgtatttggagaactgggatttctggaaggaagaaaagcatgctgttatccgggcatggagtcaggactttctcacgcagagacaaatgaagagccggtaaatgtagacgggcatatgatcacaagccggggactgggaaccgcgattccattcgcattgaagctgatcgagctcctgtgcggaaaggaaaaggcagaagaaatcgggcatggagtagtttattattaaaaagtactggaaatattgaagtgactatgctatactaattcaatgactgcgaatatacaatttgcgtttgaatggtacgaatcaaggaggaaatagaaagatgagtttacaggtagaaaagttagagcataatatggcgaagcttacagtagaagtagctgcagaagatgtagagaaagcactgcaggcagcttacttaaaacagcgcaaacagatcaatattccgggattccgtaaagggaaagttccgcgtcagatgatcgaaaaaatgtacggaccggaagtattctatgatgaagcagcaaacaacatgattccggacgcatatgcaaaagcttatgatgaaagtgaactggacatcgtgtctcagccgaagatcgaggttgtacagatggaaaaaggaaaaccgttcattttcacagcagaagtagctacaaaaccggaagtgacactcggagattacaaaggactgaaagtagataaagtatctacaagagtgacacagaaggaagttgatgaagagattgaaaaagagcgcgagcgcaatgcaagaacaatcgaagtgacagaccgcgcagttcaggataaagatgaagtaacattagatttcgaaggatttgtagacggtgttgcatttgaaggtggaaaaggagaagattatccgctgacaatcggttccggatcattcattcctggatttgaagagcagctgatcggagctgagatcgacaaagaagtagaagtgaatgtgacattcccgaaagagtatcactctgaagagcttgcaggaaaagatgctacatttaagtgtacagtacacacaatcaaagcaaaagagcttccggagctggatgatgaatttgcttctgaagtttctgaatgtgagacaatggacgcatacagagcggaagtaaagaaaaacatcaaagagcgcaaagagagaactggaaaagaaaagaaagaaaaccaggcagtagatcaggcaatcgagaacgcacagatggatattccggaagcaatgatcgagttccaggtaagacaaatggcagatgattttgcacgccgtattcagcagcagggtctgactgtagaacagtacttccagtttacaggaatgacagcagagaagatgctggaagagatgagaccacaggctgaaaagagcatcaagacaagactggttctggaagcgatcgtaaaagctgagaacatcgaagtttctgatgagcgtgtagaagaagaactcacaaaaatggcggaagcataccagatggaagttgaaaaactcaaagagtttatgggagagaacgagaagaaacagatcaaagaggatcttgcagttcaggaagcaatcactctgcttgtaaacgaatctgtagagggataatctgttctggtacataacagtaccgtgaatccgcagtgagagggggccgcaggcagcggcagattaagtcagcataataaggaggaaaagcaaatgagtttagtaccttatgttattgaacagacaagccgtggagagcgctcttacgacatttattcaagactgttaaaagaaagaatcatttttctgggagaagaggtcaatgatgtatctgcgagtgtgatcgtagcacagcttcttttcctggaagcggatgatccgaataaggatatccagttatatatcaacagcccgggaggttccgtgacagcgggactggcaatctacgataccatgcagtacatcaaatgtgatgtttctacagtctgcatcggtatggcagcaagcatgggggcattccttctttccggtggagcgaagggaaaacgttttgcgcttccaaacgcagagattatgattcatcagccatccggcggagcacagggacaggcaactgagatttcgatcgcagcagagcacatcctgagaacccgtcagaaattgaacgagattatggcagcaaacacagggcagccattggagacgatcaaggctgatacagaacgtgataacttcatgtctgcagaagaagcaaaagcttatggattaatagatgaggtaattgccaaacattaatgttgtgtcggcaatatgaggtgagagtgatatggcaggaaaagcaagtgatgatatagtaagatgctccttctgtaataagccgcagtctcaggtgagaaagctgatcgcagggccgaacggcgcttatatctgtgatgagtgtatcgaggtctgctcggagattatagaagaagagtttgaatacgatgatgacagaagagaatttgatgatatcaatcttttgacaccagaggagatcaaggcattccttgatgaatatgtaatcggacaggacgaggcaaagaaggttctttctgttgctgtatacaatcattacaagcggatcatggcaggttctgatctgggcgtggatctgcagaagagtaatattctgatgcttggaccgaccggatgcggaaagactctgcttgcccagaccctcgcaaagatactgaatgttccgtttgccatcgcagatgcgacagctctgacagaggccggatatgtgggggaagatgtagaaagcatcctcctgaaagtgattcaggcagcagatggcgatattgaacgtgcagagcatggtattatttatattgatgagattgacaagatcacaagaaagtctgagaatccttccattaccagagatgtatccggagagggagttcaacaggcgcttttgaagatcattgagggaaccgttgcatctgttccgccgcagggcggaagaaagcatccgcatcaggaactgatccagatagacacgaccaatattttgtttatctgcggcggtgcatttgaagggattgataagatcattgagaccagactggataagaagtcgatcggctttaatgcagagatagctaagaagcatgaggaggatgtagatgtactgctgcatcaggtgcttccgcaggatctggtgaagtttggtctgattccggagctggtaggacgagttcctgttacagtatctctggatcttctggataaagaggctttgatccggattctgacagaaccgaagagctctcttgtgaagcagtatcagaagctgatggaattggacggcgtaaagctggagtttgataaagcagctctggatgcgattgcagagacctctctggcaaggaaaacgggagccagaggattaagagccattatggaagatattatgatggatacaatgttccgtgtaccatctgatgataccatcaaaggatgtatgattacaaaagatgttgtggaaggaaaggggcagccattgtatgagtgcgatggagaagagcgaaaatcttttctgacatctgaaagtgcatagataacacaggcgggtgcatagggaggaccatgtacccgcttgttttgattttggataaaacaaaaagcaggaggaaaatacaggtgaacagagaaataaaaagccttccgatggtagctctgcgtggaatgactatcatgccggaaatggtagtacattttgatgtgagcagagaaaaatcaatcgcagcaattcaggaagccatggcgggagaccagaagatttttcttgtggcacaaagatcaatagaaacagacgaccctatacaggaagatgtttacgaggtgggaactgttggaacgatcaaacagatcatgaagcttccaaagcatatcgtccgggtacttgtttcaggagaaacaagaggaatcttaaaacagcttcagcaggatacgccgtatctgcgggcagaggtcgaggtgatcgatgagtccgatcttgtcattcaggatgatttaaatggagaggcaatggcaaggagtcttaaagatacttttctggactatgccgctcgcaacggaaaaatgtcaaaagaagcagtggcagagattttggagatcaaaagcctgaaaaagctggtggatgagattgctgcaaacacgcctttttattatgttgatcaacaggaaatcctcggaaaagtggatttttgggagagatatgagacattggcgtttaagctggtcaacgaagtgcagatcatggatatcaaagatgaactgcagcaaaaggtgaaggaacgtgtggataagcatcagaaagaatacattcttcgggagcagctgaagctgatccgggaggagttgggggatgattctacattgtacgatgcggaagaatttgaaaaagcagcaaagaatctgaaagcgccaaaagaagtgaacgaaaagctgaaaaaagaaatcagcagattcaaaagctcactgaacagtccggcagaaagcggtgtgatacggacctatattgaaacattgcttgagatgccgtgggataaagccgggaaggacaatcaggatatcaaatatgcagaggaagtgctggaagcagatcattatggtctggaacaggtcaaagaacgaattctggaatttctggcagtacgttctctgacgaaaaaaggggagagcccgatcctgtgtctggtgggaccgccgggaaccggaaaaacatcgatcgccaaatctcttgcaaaggcactgaagaagccgtatgtaaggatttcacttggcggagtgcgggatgaggcagaaatccggggacacagaaaaacatatgtaggagcaatgcccggacgcatcgcaaatggaattcgtcaggcaggtgtcaagaatccgttgatgcttctggatgaaattgataaagtcagcacagactataagggagatacgttctctgcgcttctggaagtactggacagtgaacagaattacaaattccgtgatcattatctggaagttccgctggatttgtcggaagtgctgtttattgccactgcaaattcactgcagacgattccgcgtccgcttctggaccgtatggaagtaatcgaggtgaccagctacacagagaatgagaagctgcatattgcgacagagcatttgatcccaaaacagctggagaaaaatggtctgaagaaagaacagctgaaaataagcaaaaatgcagtctggaagattgcatccaactatacaaaagaagcgggagtacgtcagctggagagagaaatcggtaatatttgcagaaaagcagcaaaagaaatacttacaaccgggaaaaagagtgttacaattacagagaagaatctgttcaaatatctgggaaaagagaagtttacgtatcagatggcaaatgcagcggatgagatcgggattgtgcgtggactggcatggacaagtgtgggtggggataccctccagatcgaagtgaatgtgatgcctggaaaaggcgagatcatgctcacaggtcagcttggagatgtgatgaaagaatcagcacggaccggaatcagctatatccgttctgtcagcagagattatcagattgcggatgacttttttgaaaaatatgatatccatgtacatattccggagggggcagtgcccaaagacggtccgtcagccggaatcaccatggcaacggcaatgctttctgcgatcacagaacaaaaggtgcgtgcagatattgccatgacaggagaagtgactctgcgcggacgtgtactgccgatcggaggattaaaggaaaagcttctggctgcgaaaaatgccgggataaaaacagttcttgttcccaaaaagaatctggcagatgtagaagagctttctcaggaaatcacaaaaggactcgagatcctgcctgtagaacatatggaggaagtgctgaaggcagcatttgtgtcagaagatcaggataaaatatccggaggggagtaaactatggtaataaagaatatcaatctggaaactgtttgtggaattacaagtaaattgccggaaaatgaaaaaccggagattgcgtttgcggggaaatccaatgtgggtaagtcatccctgatcaatgcgctgatgaaccgaaaatcgtatgcccggatctctgccacaccgggaaagacacagacgattaatttttataatatcaacgaggaactttatctggtggatctgccgggatacggatatgcgaaggtttccgaaaaagaaaagatccagtggggaaatctgatcgagcggtatctgcatacatcaaaacagttgaaagcagtctttcttctgatcgacatccggcatgacccttcggcaaatgacaagatgatgtatcagtggatcgtcgatcagggatttcagccgatcatcattgctacaaagctggataaattaaaacgcagtcaggtgcagaagcatgtgaagatgttaaaaacaggtctgaatctgcttccgggaacaaaagtaatcccgttttcttcggttacaaagcagggaagagacgaaatctgggatctggctgagcgggaatatctgtttccggaaagatttttggaggatgaaacgaaagaataatttcggagaatgatagagtaaacaggaaaagcacgatgcgggaaggagatttttatggagcgaaagagaccttactggcaagtggcggtaagtcttatgttcagtatactggcaacggctgcgtttattatcctgggcgtaaaagcaatcggatttctcatgccgttcgttgtgggctggatcatttctgccattgcgacacctctggtgaactggctggaaaagcgattgaagatcgtaaagaagctgggaacagcaatgattgttatcatggtcattgggctgatcgttttagtgggatattttgcagtcagcaggattgcagcggaagtgacagatctgattcagaactttccggatatttatgcacagctggaagaggggatgcgtgagattggaaataccttatccggtgcgttcagcaggcttccccggggagtgcagaatgggtggacaacgatagtggagaatctggatacttatatggggaatcttgtttcgaaaatcagcgagccgacggtgacggctgcgggaaattttgcaaaaagacttccgtcctatctgatttctttcattgttgcgatactggcagcttacttttttacaatccagagagaagaagtgatcgcatggtttcataaaatcgcaccgccgtctgtggaaaagaggatgatcctggtgatggataatctgaaatatgcagtaggcggatatttcaaggcgcagtttaagatcatgggtgttgtttttttgatcctgtttgccggatttcttgtgcttggaattcattatgcggttttggttgcatttctgatttcatttttggattttctgccattttttggaacgggaactgcgttgatcccatgggcaatttactccgtatttatcggtgaatataaaattacagccggtctggtgatcatctatgcagtttcccaggtagtgcgtcagcttttgcagccaaagctggtaggtgacagcatgggaatgaatccgctggtgacactgctgcttttatatgtgggatataagatcaagggagtctttggtatgattctggcagttccgttgggactggtattgatcaatatgtgtcaggccggtgcatttgattatattctggatgacgtgaagattctggttgaagggatactgggacttcgcgaagagcttcctcaagggcaaaaagaaaattcagataacacttgattccaagaatgagagtgtttataatatcaacagaaacaaaaaaggggtgcttgcagaaagcaggctgagagaaagctggatcgcttaaaacccgtaacctgatttggataatgccaacgtagggatatacagagaaagtgataggatctgagaagaaaaattgctgctgtaatgcgtttgcgttgcagcagctttttgcatactccgcggcgggcatggaaaggaatgcatatgagaaactatacaacacagatggaagcagcgagaaaacagattgtgacaaaagaactggagatcgtggcacaaaaagaacatatgacgaccgaagagctgatgccgctggtggcagaaggaaaggttgtcatctgtgccaacaaaaatcacacctgtattgatccggaaggaatcggttcgatgctgcgtacaaagatcaatgtgaatctgggagtttcaagagactgtaaagattacgatgtggagatgcagaaggtgatgcaggcagttgagatgggcgcacatgccatcatggatctgtcttctcatggaaatacaattccatttcgaagaaagctgaccagtgagtgtccggcgctgatcggtactgttccaatctatgattccgtgatccactatcaaagggatctggatacgctgactgccagagattttatcgatgtggtccgtcttcacgcacaggatggagtggattttgtgacactgcactgtggcattacgcgtaaaacaatcgagcagattcggcagcataagcgaaaaatgaacatcgtatccagaggtggttctcttgtatttgcgtggatgtgtatgacaggggaagaaaatccattttatgaatattatgatgagattctggatatttgtcgggaatatgatgtgacggtttcactcggtgacgcatgcagaccaggatgtcttgcagatgcaacggacgtctgccagatcgaggagctggtgcgtctgggcgaactgaccaggcgggcatgggagaaggatgttcaggtgatggtggaaggtccgggacatatgcctctggatcagatcgaggcaaatatgaaagtgcagcagtccatttgtcagggagcgccgttttatgtattgggaccacttgtgacagatattgctccgggatatgaccatattacttctgcgattggcggagccgtggcagcatcggcaggagcggcatttttgtgctatgtgacaccggcagagcatctggctcttccgaatctggaagatgtaaaacagggaatcatggcgtctaagattgcggcacatgcggcagatattgcaaaaggagtgcggggagcaagacaggcagatgacaggatggcacaagccagaagaaatctggactgggaagcacagtgggagtgtgccatggatccggagacggcaaaacggatctggaatgagagaaagcctgaacatgaggatacttgttccatgtgcggaaaattctgtgcggtgcgaagtatgaacaaggcacttgcaggcgaacatattgatattttatagaaacagaataatcagaaaaaccaggcaggatatgttcccgtaaaaaggaaggcatcctgcctggtttttattttgaagctattgtgtcttctctgcgtattcagcagcaagtgtatcaaattcttctgcgtgagtcggataccagacgtcaaaggtactgtctgctgcggcaattcgttttccgagagctgcgaaaaattccgggattacagtctccagaagaacacctttttcgatgcccagatgtgctccaggttcttcgctgtctccgtttacaaataatttgaatgcaggttccatttttccatccacccgtttggagtgtccgacaagaccgatacttcccgcctgatggcttccgcagccggaaggacatccggaaatatggatacatggaaggactctgtcggcgaactgttccttgcggacccgctgaatgcaggactctaacagtgcataggaattgcgcagtccgtgttggcagattggaacgccaatgcagctgacactgctttcaaataaagaagcagctccgtcttttgtggcttctaacacagcaggtacttcttttgcagtcagattgatgatatacaaggtgccgtccggtgagatccgaagctcggtttccggcatctctttgatcacggcatacagttcagacggtttttgaggtgcaagccgtccgcccagcggatgataagaaaccgtgtacaggccgttctgtttctgtgggagtacccgtttttctgtcagaagtgcttcggacagagtgccgtcagcagatttggaaatcggatggactggttctacaggccatggagtcatttctttttgcgcgtcttccacaaactggaggaaatagttccggattttttcttcgccaagggtatcctgcagatagcgggttctggattttgcgcgggactcataattgccgtatgtggtaaagagacggatcatggcatggacgtaaagggaaacctcgtttggatctgcattgtctgtaatatgaacaccaagctttggatttggtccaagtccgccggcacagtaaacggaaaatgtcccgttttctttggctacaaatccaaggtcgcggaatgtggcatgaacttcattcgccggggtattggaaaaaccgactttcagttttctgggcatgtgaagtcccggcatcttggtcaggagatattctccggcagcctttgcataaggaaacacatcaaatgtctcatccacagcggtaccagtcagaggacttgccatgacattacgcgggttgtcgcctccgccgccgtgtgtgatgatgccgacttttaaggcatcacgaacaagctgcggaacagagtctgcagacaaatcgtgaaactggatggtctggcaggtagtcagtttgagcagaggaatctgatgttcagaaattttgtctgcaaggaattttaatttctcttttgtaatatgaccgcccggaagacgaagacgcagcatatatccttgttccttctgtgcatagcttccaaagcctccggagatgcctttgaaggtctggcggtcaatctctccattttcgaaagcatgtatgttttcatcaaatcttgtgatattatcttcaaattgctgtaataaatcttttgaaagcatggtaaatgctcctttctttttgatgggtttagaaactctgtactaagtaatgatctctcggaatcttgagtgatcatgccagcaaaactctggcattgaactttgaaaagtaaatattattcttgaacgaaaaaatgaacgcgagaaataaacataactgtcgctatgtttcaaaaaatgagatataataatctacaggattatgctacatccaaaatcatttttttcagggttgattcaggtggcaaatcccatgcatccagatgttgtaacatcaggatgtgatagaggcggcagtaccacatcttagttgagcggtgtctgccgtcttctaatttaaaatctaatttctcgcgtttgttagaacgctcagcagaagttcttgcattgtattcccgtttccattccttactgcttcttggtggatcattaaacaatcttggattatctttcagaaccagatggacggtacgtccgtatttagcatttgaacaagggttttcgcatgtacaggagatacagccaccagcgtgactgatcttaggacatttgaatttcattctgcctttagcaacttcaataccatcacgacgcatacggcatccagaggggcaaacagggactccatctttgtcaatcgtaaagtcatttttataaacagggggtcttccaccttttccattaaggtcgataaatggtgttatattctcgcgcttgaagtattgataataaggcatggcatcatgtgcagaatccaaaagtacttttgaaacagtgtaatcaggaagaaaagatttcatcctgaaaaaagcgtgcaggaatccatgtgaatcatgttttgaagcacagcaaaaatgaggaaataccggtaagtcactttgcgaatcaacaagcatgtatagatcatagccatgataataacagtcgcgggaagaatcccagccgatatcacaatcgggctgggaaaagtagcggtcacatttgcagtcagtaatgccattctctttgcatttacagatacgctttttccgttctctgtgtgaagttacaacaggagttccatcaccggctaaagccaaagcatccgaatgaataagtcctgtggatacagaaacatcaaggaactctttttgatagattgcaaagagagaagaataaggctgttcgtccagtttaaagtcagtatgttctaaaacaggaagaagatcggcaacagtaactttttccacagaatcagctttcgtgccttttgttttaggcttcttaactttggttttaagaggatggatatgtggtgacatatggtcatcatcagaatcccacaagcggtttataaaatcataaaaagtgccaaccccgggagtattaccaggttcaaatccactgaggatggcgtaaagaggattcattttaagctgggcagcccactccgttaatgaagtaaccttaaagtcaatggaaagaaggtaagaacgttgcatgcaagaaggagttcgtggggctggtccgaattttgaatatttatcagtcataaaagtatcggtaaaagataaatcgagattccaaaaccgctcaatgatatcccaggtggaacgagcaagagcatttggattaggataatatttacgaagattagtaacaacaaagttttggtagtctgcatgactgccacagttaacaggtaacataaaaatcgcctccaatcgaaaaatatctgccgccgcgagcgacggttcttattaatcaataggcgcgaagcgccgcatttttcgatggatttgtcaagtgtttttggcaaaaaaagtgggggattttaataaaaaaggaatctgaaagccttatatttactggcttagagattccgagagattatagtataataaacggggaaagagagtacaaggggaatttggagattggtcttgattttctttacggatatttaaatatggaacagtaacgagaataaagatagatttccacactccctgttgttataataaagacaaaacgaaaacaggggaaatagacatggatacaattttgatcatagaggatgacgcagatctcagggaagggctggagtatacattgagtggggaaggctatcagatcctgacagcggaaaatgcagaaagaggacgaaagctatggaagacatcttcctgcgatctgattctgttagactgtaatcttccggatggaaatggcttttcgctgtgcagtgagattcggaaaagcagtgatgtgttcattctgatgctgacggcgagggatacggaactggatgaggtgaaagcactggaaatgggagtggatgattatatgtcaaaaccattttctatcgcggtgctgaaagcgcggatcaaaaagctgctctccagaaagagtgaaaaacagtggatcagctccaatggaatccgtctggacaaaagcagctgtcaggtgatctgcaaggaagaagtgctggagctgagtaagatcgagtacaaactgcttttgtattttctggaaaatccgggacagatattgtcaaaggaacagattttagagcggatctgggacaaaggcggaaagtttgtggatgagaataccgtttccgtcaatattcggagacttcgcagaaagatcgaggcagatccgcagaatccgcagtggatccagacggttcacggacttggatatatctggagagaagaggagaaacgataaaggtatggaatcgatcataacaggaattctatcagcaggatgtgtgtccggtgttttgtttgggatgtatgagtatcgcaggcggaaaaaactataccgggagacagatcggatgctggaatctattctggagggagatccgatccttgtttcggatctgaaggaaggcgaagtgtcagctctttccgggaaaatccgcaaaatccaggaaatgcaggagatgtctgtatctcaggcagaagaggaaaaagagcaggtgaaaagtctgatctccaatatgtctcatcagctgaaaacaccgcttgccaatatccggatgtacgaagaaatcttgagggaagaaaaccaggacgcggagacaagagaaaagtttctggcaaaaatgcagacgcagagtgaaaaactggaatggatcttaaattctctgtttaaaatggtgaagctggaacagaatgtcatggtctttgaggtttcgatgtgcccgattcgaaagaccattctggatgcggtgaatctggtgtatgaaaaggctgccaggaaacagattccgatcaaaacagggtatatcccggatctgtttctttatcacaatgcaaagtggacgtcagaagtgtttgcaaatctgttggaaaacgcagtgaaatataccagtgagggcggagcaattcagattgatcttaagcagtatgaaatgtacgcagaaatccggatcacagatacaggaatcggaatccgaaaagaagagatgccgcggatttttcagagattctatcggagtaaagatgtagaaaatctggaaggaagcgggatcggtctttatttgtccaggctgatcgcggagaaggaaaagggatacattcaggtggaatctgtctatggaaagggaagctgcttttcggtatttctgcggatggaaaaatgacaattttgtaagaactttcttttctgctgtaggatttttgtaagatggggctgttacactgatggtatcaaagagaaaaggagaactggaagagaatgaagattttagaagtacagcatgtggtgaaaacatatggttcccatcaaaatcaggtaacggcactttccgatgtcagctttgctgcagaacagggagaatttattgcaatcgtaggaacgagcggttccggaaaaagtacattgttgaatctgcttggaggtctggatgttccgacagaaggaaagatcagcatcagggggcatgatatcggaagtctgatcagaaaggaacagacgatttttaggagacgcaatattggatttgtgtttcagaattacagtctgatgccggtgctcaatgtgtatgacaatgtggcgcttccggtcacctttgacaaaggaagtcatgtagatcgtgagcatatcagggaattattaaatgagctgggattgtgggagaaacggaaacggtatccgagtgagctatccggcggtcagcagcagagagttgcaattgcaagagcgcttgcaaacaaacctgcccttctgctcgcagacgaaccgaccgggaatctggattccaaaactgccgtggaggtaatcggcctgttaaaagccagcagtcagaaataccatcagacggtgctgatggtgacacacaatgaagcgttggcacagacctgtgaccggattatccggattgaggacggcaggctgtatcagagagaagacgcattctacggggaaggcggtgagctgtaatgaagcagatcatacgtcttgcatggtcctatctgaaatattatagaaaacagacgatggctctgtttctggggattgttttgtcctgtgctctgtttaccggaatcggttcacttcaaaagagcggaaatcatgcagcaagagaaaatgcccgcacaaaatccggagactggcactatacgatgcgctgtgacacagactggtttgaggagtttgagaaaacgtatcagccgggagaaaaagagcagggttactgcgtggaaaaaaccggtgtgctgacgatgcgcaaagtgacagaggagccttatgagatcgagctggattacgcagaagaaggctatctttccatgatgggaagaacagtgaaagagggcaggtatccggaagaggaaggagaagcggcgctggatgaatttacacttcggaatctggatattccgcgtaagatcggcacgacatttacattggatggagaaacatttacgttgtgcggaattgtgtcagagcagccttccgctcttacgcagcggatgcaggtatttgtgaacccgacactggactatggaacaaacggaacattcctgtatgtgaaatttgatgagtccaaagatagttacggacagatgagcgcatttgcagatacatttggaatttccgaaaaggaaattgcggcaaactgggagctgctggaatggctgaaaaacggaaaccgcatcaatgcggcagaagcagtgaagaccgggatcctccactggaaggaagcgggattgccttatatctgggggaatctggacgacaagtggaatctgaaggataaagcggtactggcagcgataggagtattcggaacatttgtgatctacagtctgtttcaggtatcggtacggaaaaggatgtcacagtacagtgtgatgcagacactggggatggagtcaaagcgtacgtttggggtgctgacaagcgagctgtggatgatctttgcagtggcttatccggttggatgtgttctcggaaacgcagcagcatgggggatttatcagaaaatcggcagtatttttgtacggacaaagggaattcagcatacgaataagtacgtcgcagcagaggcggccagagaggctgcacaggcaggacgtgcacaggcgggcgcgtttcaggtttcaggagaggcgattttatttggagcaatctttctgctgtgcctgcttacacttgtaagtttgattttagtgaggcggatggaaacgctgacactgcgggaaatgataacaaaagaaggcgaagcacagacaaagagacgtaagatctacagtctgaaacgaaaggatctgacgggtgtcctgacaaagaagtttatgttttcgagaaagaaaacttttatcggaattatattgtctctgtctgtgggaagtgttctttttttagggactgcctatctgacagaaaatgcaaagatcaacaatgaactgacattcaaggcagatgacggacttggttcggatattcaggtgtatgaagattcagattcactgtccagtctgattccaaaggtatgtgcagagcagatggaaaagataagcggattggagtctgtcagaccggtgcggtatatggcgggagagcttacgatgtcagatgatgtttttcactggccggagtattatatgggcagtgagaatccggaggaaaacattctggatgcagattcggatatggtggaaaaattcaatggaagactggtgagaaaagcaaacggagaatatggattaaaggtcaatatctacggatatgatgacagaatgttaaatgagttgaatgattatcttctggagggagaaatcgatccggagaaaatgcgggaagaggatacagtgatactggcgacgctgatggacggacagggaaactatgatggaatcagtgtgtctcccggagatgcgctttcagtcaggataccgaagactgcccagacagaattactgaaatttcagggggaagactcgctatatcagaattcggatcttcaagtccaggcagttgtcagcagaacactggcaagagtggatcagttttacggggatggagcagccagcattattatgacaaatgaacagatgcagaaatattttggcatcgaaggataccggaccatcagcattgcattgaaagaacatgcggatgcggtcgcagtgacagatgagatccgtaaggttgttttcggagtatccgactgtgtcgtcaaggattatacggaacagatcaaggtgcagaacttttatctgaatcagaaaatgctgttcttctatggcattgcttttgtccttctggtgatcagccttctgcatattatgaacagtatgcagtatctggtggcagccagaaagcatgaattcgggattttaagggcgatggggatcacggattccggttttcggatcatgctgctcaaagaagggctgcggtatggagtatattccagtattgtgatgatcgcactttatctggcggtacaaaaagtgttatactattttatgacacatgtatttttgtatctgcatccaaaatcaggtattcagattgtgccggttctgatcatgatcctggtgaatctggcaatctgtgcagcggcagtggtgatttccggacagtctgtgctgaaagaacaggtggtggatgcgatacgggagtagacaggaggaaaacacatgacacatgtctttgaaggagaatttgtacatcagaatctggggagaatcaggaaggagcttcgtgttgatcagatgtgcgagtgggaaacacgaaaagctgcagtcagaggactctttttttgtgagcatggaattgtgatcgatacttgcgaggagcttgatcatctggatgaacaggcgatgcaatatttaaacattacgttgagagaaaaagatacacaggttatccccttttgtgcagacggaacgtattgggtgccggtggaagcgggggaagcaaaggatgtgcgggctgaaaagtggatggaatattatcagtgtgatcaggaacgattctggaagtttcaaagatatttctatgaatggacaggagaaattccgaagaggttagagttaagtgtgaagccggaaaaaacgcggtacgaaggaacgtcttttgcagtcaaagcgggggccgtcgatcagaaagtggaagtcatgcatccggtgacaaaagaatactatgaactgaatataaaagaatctgttgatgagaggatcgaggttccggatatggaaggtctgaaatttccggagcatgttttgaagattacgtatgaaattgcaccacagccaaaggatgatttttatctgcaggattgtgaagaaggggataccgtttggacgactgcacatggtaaaagatcggtatctgtgatcggcggtcagtctggtcccacatctatttttcttgcggggacgatagaacccggtgatcaggtggcgtattcatcccctcattttcatccggtgaaagaaacaacctggaaaccggtattttacaggcaggagcttgaagaaaaatatctgagcatcaggttggataaatcgtgtttgaaacagtggtaaaatttcctaaaaaatgacagtccttttcttacgatacagtcaaaacgacaaaatgaaaaaagaaacttacgaagagaaaaaaatatctttataataagcgaatgtagcaacaatgaaaaagaaggtaagaaaaggagaaaaatatgccaaagcataagagagaaagtttgatttatacggtaatgatgtgtttcgtgatggtactatggatgagtgtttacaacgtgacgctgcatatggggcaattcggtgtggagactttaaaggaagcatggctcggctttccagtggcttatatttttgcgatggtgtttgactggtttgtcgtatcaggtccggcgaaagcattcgcattccggtttctggttaaaccggacagcagtgtgcttcaaaaggcgatcgctgtttccggctgtatggtaattccgatggtgatcattatgtcattttacggaggtgtggaagcctgcataaaaagcggagaatggggaagcttacttctgatctggctgaccaatattccaaagaattttattatggcacttccatttcagctgttaatcgccggtccgttggtaagaaaagtatttcgaaccgcatttccggagggaaccgtacttttaaaagcaaatatctgaatgtaagcaatatcccatgaaacaagagaaagttatggaaaatatatatgtatttgacgatggagtgatcagaggattcattgagatgaacgggacacaactgagtaaaatatatgtggattcattttttcagagtcagggagttggtgatgcactgatccgatatgcgacagaagaatttggtgcagacaatttatgggcattggaaaagaataaaagagcaatttcgttttatcaaaatcatggatttcaagtgacaggtaggaaaagactggaagaaaatacaacggaatatcttgtaaaattagaaagataagttttggacagaagcagaaggcgaaatgccttctcttttttaaatgaaaaaataaacagtatataacagttgacaacagatgcaaactgttatatactgtttataaataaaggaggcacatatgaaaattataatcaacagttcatcgatggtaccgatctatgaacagatcgtagaccaggtcaaggcacagattataagcggcgagctgaaagaagatgacaatctgccgtctgtccggaccttgtcaaaagaattgaggatcagcgcactgactgtaaaaaaagcatatgattctctggaacaggaaggatttacggttaccatacacggaaagggcacctatgtggctgccgccaacaaagagatgatgatggaagagtatcgccgggaggtggaagaagagctgaccgaggtgatacgcaaagcaaaaagatacggcctgtcggaagaggatatccgggagatgctggagctgatattggagggatagcatatgctgaagttagaacaggtaaagaagcagtataaaaattttacactggactgctcactggaagtcagaccgggatgtattaccggactgatcggacagaatggagccgggaagtccacgacatttaaagcggctctgggactgatccatacagatggagggaacattgagatgctgggaaagccggagagagagctgaaagaaagtgacagacagcaattgggagtcgtactttctgatgcaggtttcagtgagtatctgcaggtaaaagatgtgatcgctgtaatgaagtccatgtatccgaattttgaaaaggactgttttatttccagatgtgagcagtttcaaattcctctggataagaagatcaaagagttttccaccggaatgaaggcaaaacttaaggtacttcttgcattatctcatgatgcgaagttcctgatcatggatgaaccgacagccggactggatgtggcagcaagagaagatgtcctggatcttttgcgagaatatatggaggaaaaagaagagcgtgcgattttgatcagttcccatatttccagcgatttggaagggctgtgtgatgatctgtatatgatccataatggaaagatcgtgctgcatgaggagacggatgtattgcttggcgaatacgcggtattaaaagtggatgaagagcagtatcagactctggataaacagtatattctcagcagaaagaaggaagctttcggatatcagcttctgacgaatcagaagcagttttatctggaaaattatccgaaggtcgtggtggaaaacggaacgattgatgaagcaattttgatgatgatcaagggggaaagcgtatgaaagggatgttgataaaagatttttgtattctgaagctgcagaagaatgcagtgctggtacttctggcaatgtgtgtggtattcacagttttcatgaaaagtcctacttatattgtcaatctgtttccgatgtatggctttcttcttgtattgggaacacttacatatgatgaatttgacagaggatattcatttttgtttacacttcctgtatcgaggcggggatatgtgaaagaaaagtatgtgtttggcttacttttctgtggaggaatatggatcctgtctgttctgatcagtcttatctatgtttggattacaaaagagattccgatcgatgatgcacttatggtgaattatgcagtatcaatcatactcgttcttgtatttatggggacttccattccggtacagttaaagtacggaaatgaaaaaggaaggctggcagttgttgcaattggagttggaggatttgcagtgattgtcggtggaattcagcttggaaaagtttttgatattgagatgacagcggctttgcaaagggtcgaaaagatgggggcaggtacagtcagtgtgatcggttgtattgtatccgtgattcttatcgtaatttcttataaaatcagtgtgcgtatcatggagaaaaaggagttttagccagaatcaagggaggtacggtatggagctgacaattttgatcgttgtcctgtttttgggtgtgggaattcccttgcggaataagagatataaaaagtggaaaaagaaacgagaagataaaaatggagaaggatttaaggggatatgatagcatttctggatgattacttcaataaagcaaagggcgatcgtgagtgaaagtttagatttgttaagaattgaatcagaaatgtttaagatttttcatggataataagacccatcaaaaacagataagcctttgaaataaaatcaagaggaagaaggatatcacaagatgaaaggatgttacaaaacgaaagatattttaaaaagaggaactatattatgcatggcagcaatgttatcttttggaacagtagcatgtggatcgaacagcagtaaatctgcaagctcttctgaaaagagtacagaaagttcagccagcagtagtacagaagcgggtaagagcacagaaagtacttcaggcagcagcacagacaattctacaagtaagaaatcagaaacttcttcaaatgacaagactggcagttcttcaagttcagggactacatcaggaacaacatcagaaagtaaagtggattaaagatgatcgtaagagtgtatgttttaacagacgtacgctcttaatttttgcaggaaatcttttccggagaggagctggatatgaagaaagaacaggtattgcttattgaagatgatgcagatataagagaaggcgtacggattcttttagaaagtgaaaattattgtgtggaagaagcggaaaatggaaaaagtggattagaactgttgagtgatgaaacagacctggtgatcttagatattatgatgcccgggatgtcaggacttcgtacgtgtgaagaaatccgcaaagtatccaatgtgccggttctttttttgacggcaaaagctcaggaatcagacaaactgatcggtctgatggcgggtggagatgattatctggccaagcctttttcttatgcagaattattgggaagagtcaaagcacttttgcgtcggtacaatatatacagaggcagaaataatgaagtccgtgaagaagcagaaccttatctgcggcgataacattttttgtatattgtgccatcaattatgcaggagaaatgctcattaacaagtattatgacagctcagagcaggaagaaaaaaagaatgagtattacatacaagagctgcagaaatatatccatgagaaaaatatcagttctaaggatgcagaccagttaaacaggtgggttgaacaacaaaaggtgttgcatgtccgggtatataagggtgatattgtagtatttgaatcggaatatccggaacaaaaattatgggaagaggagattccggcaaatgaatatgagtggatggattattacccgatcgaatttgcagatggttcggctcaggtgaacatatggggaatctatgattatcaattttatcactatgcgatgatcgttgaggtacttttttcatttcttctgtttttactgcttgttcttatcggaatacgcagaaagatggattacattttacagcttagtaaggagattcaaatattagagggcggaagcctggaatatgcgattactgtaaaagggaaggatgagttgtccaagctcgccgaaggaattgagaatatgcgaaaatcgtttcagaggatgattcataaggagacagagattgtaagagaaaaccagaaaattgtgacggagatgtcgcatgatctcagaacgccgattacttcgatcatgctgtatacagaaattctgaaaaaaggaaagtatgaaaatgaagcacagttgttggaatatctgaaaaagatcgatcagaaagcacgtcgtatgaagcagctttcggagcatttgttcgaatattctctgctttccggagaagatgaggtaaaattggaagaaccagataattttgagacattactatatgatcttttttcagaaacgtgcagttatctggaacagaggggatttcagacgatttttcaagtccggtggccggataaaaaaatcagattcggctttcgggagaaaaaacgcagagtaatggaatcggattacagagcataaaaaatatgatggaaaaaatgacgggaaaatgtgcggttatgaaggagaagaatgggtttcggattacgattttgttcccggttgcagacagctaatgcgtcaaacaagagcatcaaatatatgaaaaaaacataaaaagaaagacatttttaaaattcaatggtaaaatgtaactatctgatggaaaatagacgtatagcgtaggaaaggcggagcagtatggaaaaatttaatttttgtgttggtaccagaattttatttggaaaaggacaggaagaaaagctgccggagcttttacgcccatatggaaataaggtactgttgacatatggcggcggaagtatcaaacggacaggactttatgacaggattaaaaacctgcttcatgagtttgagatatttgaacttggcgggatcgagccgaatccgaggattgagagtgtctatgcgggtgcggaaatctgcaaggaagaggatatcgatgtgattcttgcagtaggaggcggcagtacgatcgactgttccaaagccattgcggctgctgcatattatgagggagatgcgtgggatctgatcttacatccggattggattgaaaaagcacttccaatctgtacagtgctgacgctttctgcaacaggaagtgagatggataatggcggagtgatcaccaatctgaagacgaaagaaaaactgggctttggaaatccgctgttgctgccgaaggcatctgttctgaatccggagaatacatttacggtacctgcaagccagacggcagcaggcagtgcagatattatgtcacatattctggaggtgtattttgataccagaagggcagcggttccggatcgaatcagtgaagggcttttaaaaactgtgatccagtatgcgccgatcgcagtgcgtgagccggaaaattatgaagcacgtgcagagttgatgtggacgtcttcgctggcgatcaacggaatctgttccacaggaaaagactgtgcatggagctgtcatccgatggaacatgagctgagtgcttattatgatatcacacatggagtggggctcgcgatcctgactccgcgctggatgcgatatattctgaatgaacatacggtagaaaagtttgcagaatatgcaaaaaatgtatggggaatcgcagaaaaagcggatctttttgaaactgcaaacgcaggaattgatgcgacagaggaattcttaaaaagcctggaaatcccgatgaccttgtctgaggtagggattacagaagaacattttacagaaatggcagaacatgcagtgatctttggcggactgtcagaggcatatgttccgctgaaagcagaagatgttgtgaatatttatagaatgtgtatgtaaagaatttcgaagaaggaggaaatgacaatggagacattacagttaagagaggaattttactggactggaattgtagatgaccagcttcgtgtatttgacattattatgtatacagagtttggaacaacttataattcttatattttaaaagcaggggataagacggttctgtttgagacggcaaaagcaaagttttttgacgaatatctggaaaaattaagtgagattacagatatcagaaagatcgattatctggtagtcaaccacactgaaccggatcatgcaggaagtgtagagcgacttttggaactgaacccgggacttaagattattgctacaggatgtgccatcggatttttaaaggagattgtaaacggagaatttacggcgattccggtgaaagacaatgagaccatgaagataggcaataagacgctgcggtttttgagcgtgccgaatctgcactggccggatacgatgtacacttatatagaagaagagcagattttagtgacctgcgattcttttggttctcattatggattccatgatattttgttaagcaaggtgacacagtgggacgattatgtgcgtgccacaaaatattattttgacaatattatcggaccgtttaagccgtttatgtctaaagcactggcaagagtgcgggagttggatctgagtatgatctgtaccggacatggaccggtgatcgatgacaagatttcgtggatgttggatacttatgaagagtggtgtactgtcgtgaatccaaatccgaagaaaacagtgatcattccgtatgtaagtgcttatggatatactgcccagcttgcgcagaagatcgcagaaggaataaaggctagcggagatatagatgtgcgctgctatgatatggtagaggcagatcaggcaaaagtgctggaagaactcggttttgcagacggaatcctgtttggaacacctaccattgtgggagaggcacttaagccaatctgggatctgacgacttctatctttgcagggacacatggcggaaaactggccagtgcattcggcagttatggatggagcggggaaggtgttcctcatataatcgaacgattgaaacagctgcggatgagagtagcagacggatttcgtgtgcggtttaaaccgggcgaggacaatctgatcgacgcatttgactatggatataatttcggatgtatccttcagaataaagaaaataaaagagcagaaaaaagcggtgcacgtcagcttgtaaaatgtttggtctgtggagaaatctttgattcttcactggaagtgtgtccggtctgcggcgtcggaaaagagaattttgttccggtggacgcacaggaaagtgagttttccaatgatacaaaggatttctatgtgatccttggaaacggaactgcaggctggaatgctgcggctgagatcagaaagagaaataaaacagcttccattctgatgatctccaatgagccttaccgcacgtataaccgaccgatgctgacaaagtcgatcatggcagatttggatgaggagcagatcgcggtgcagaatgcaggctggtatgaggagcagaatatccagcaggttctggatatggaggtggttgcgatccatccggaaacaaaagaaatcgaactggaaggcggtttaaagtttgtttatacaaagctgatctacgcattgggatctgagtgtttcattccaccaatcgcaggagcggaaaaaaaaggtgtgatcgcaatccgccgtttggatgatacgaaaaaggtagcggcaatgctgccggatgtggagcatgttgttgtaatcggaggcggagttctgggactggaggctgcctgggaattgaagaaggccggctgtcaggtgacggttctggaagcggcttgtcagttgatgggacgtcagcttgacgacgcggcaggtgagatgctcaagcacatcagcgaacagcagggcgtgcagatttacacaggtgtcagcattgcttctattgacggtgaagacaatgtgacaggagtgactttggcagatggaagaactttcccggcagagctggtgattgtatctgcaggagtccgtgcaaatacggtgctggctaagacggccggaatcgaagtggaccgtgcggtgatcgtcaattctaaaatggagacgaatgtgccggatatttatgcatgtggtgactgtgcacagtatgacggtctcaactatgcaatctggccggaagcatctgaacagggaaaagtggcaggagcgaatgcggcaggagaagagatggaatatgagacagttccggcggcactgagcttccacggaatgagaaccgcattgtttgcagcaggagacaacggaaaaaatccaaatctggtatacaagacgattgaattgaaggatatgggcaaaaaacagtatcagaaatactatttcctgaacaaccgtctttgtggcgtgatcctgatcggggatgtgagccgtatggcggagatgacacaggcactggaagagcatgtacagtaccaggagttaaaattgtaagaaacagaataaaaagataagaaaaagtgcagagcgaaaaagagctctgcactttttgtgcattctctgacggtcagagagacagattattcaccgaagaaaaggcgcatatcgtgttcaactgtatcaattcctgaaatctggaaattttcgatcaaaagcttcgttacattaggacttaaaaatgccggaagtgtaggtcccagatgaatatttttcactccgagggaaagtaaggcaagcaggacgatcacagctttttgttcataccacgcgatattgtaaataatcggcagctcattgatgtcatttaattcaaaaatttctttcagtttcagagcgattactgcgagggagtaggagtcattgcactgtcctgcatccagaacacgtggaattccgttaatatcacccagattcagtttgttatacttatatttggcacagcctgccgttaaaatgacagtgtcttttgggagcgctttcgcaaaatccgtgtagtagctgcggctttttgcacgcccgtcacagcctgccatcacaacaaatttccggatcgccccggatttgacagcagaaacaacctgatctgcaagagcgaaaacctgtgcatgggcaaatccaccgataatttcaccacgttcaatttccaaaggcggtgcgcagtgttttgcctgttcgatcagcttggagaaatctttgtttttttcaggtatgtcgtcaatatgctgacagccgggaaatccagccgcaccggtagtgtacaggcggtctttgtaagtgtcctttggaggaacgatacagttggttgtcatcaggatcggtccgtggaaagactcgaactcttctttttgtttccaccatgcatttccatagtttcctctgaagtgagaatattttttgaatgcaggatagtagtgtgccggaagcatctcagaatgtgtatagacatcaattccggttccttcggtttgctcaagaagcatttccagatctttcagatcatgaccggaaatcagaatccccggatttttaccgactccaatattgacttttgttatttccggatttccataggcttctgtatttgcctgatctaaaagtgccattccggaaacaccgtatttaccggtttcaagtgtcagattcaccagatcttccacggtcagggtatcatccagcgttgctgcgagagcgcgttggaggaaggtatccagttctttatcttcttttaaaagaacattggcatgtctggagtatgcagataatcctttcagtccgtaagtgatcagttcacgcaatgaacggatatcttcatcctttgctgataaaactcctacagtggcagctttggctgcaaattcagaaggggctgcagaccatcgggcagcctccggcaatttttccggatttttcagttgtaaaagaagcacttttttgatctgaagtgtcttttcaatctgggaagtgatcatttcgggatcaaaattggcatttgtaatcgttgtgaagagatttttggtaatcagctgattgatttcaccggtcacgtttaaatcttcccggcgcatctgcgttgtcactgcagataatcctttcgtcacccagacaagcagatcctgcagagcggctacgtgtggtgtttttccacatacgcccatttttgtgcatccggtacacccggctgtttcctgacattgatagcaaaacatattttgttccattttgataatcctcctgtggtttcaataaggttcgaagataaaaatttcgaatagtgtttcaagttatgggaggattatagcgcatggaacaaggaaagtatgttgttataacaacgaaaaagagaaaatgtatatagaaatattggggagctaagatcttatcagaaaagattttaaggagacgttagaacatgtgttacttgatagcgaaacagattgattaggtcggctgtgttgcatggaaaacaacgtatggagagtatgaaccagatcattttgttggttcagaggcagaatttgaaaaaggagttgtaaatatgtaatagaagttatagtgaaaaagtatagcacagtacagaacaagcattcgattttgctctgtacttttattttatattttgatataataacggcagggaataagtgtgagcaaaatatgcctatactgataaggagaaaatgtggatcactttgaattagtatcagaatacgcctgcttatcatagtgaacaataaaaaccttgccgtgcagctttacggtgagtttaaggagtccttcccggagatcgcggtggaataattcgtgagctggaatgtcagggggggaaacgagtgctatttggtgctttagtaccgaatagtatggatttttcggatggaatgattattgtccgatatcagaggaagagattatagagttttgcgaagattagagtaaga

SEQ ID NO: 6960 - DNA, 34842 bp, Unknown
  gut microbiota DNA sequence
ggatatggcgcagaatattctggtgatcaagaccgtttccggaatggcaatggcggtagcggccgcagtagatgccatgaaatggaaagaagtagtagggtgtatcgcaggggacgatacgatcatgtgcgcgatcagaagcgtacaggatacggaacatgtgatggataagattcgaaagattgtgtcaaaagggatataggaaaaaatatgcttcaaaatttacatgtaaaaaatctggcgctgatcgacgaggtggaggtggattttggaccgggactcaatattctcacaggagagacaggagccggtaaatccattatcttaggttccgtaaatctggcactcggcggaagatacaatgcggatatgcttcgaaagggcgccaggttcggacttgtggaactgatgttttcaattgaaaatcaggagttgatccgtcagctggaagaaatggatatctttccggaagacgggatgctgatcttaagccggaaattgatggaaggcagaagtgtcagcaagatcaatggagagacggtgacgatgggagtactgcgggatgtggcaagtctcctgattgatattcacgagcagcatgaacatcagcgtttgttaaataagcgcaatcacctgacgtttctggatgtatatgccaaagagcaggtggaaaagccaaaacagaagatggccctggcttaccgggcatatcaggagtacagccgcaggctggaagcatctggaatggaagagaaggagcggcgcaaagagattgatctgacggagtatgaactgcatgagattgaaagcgcgcatttacgcatgggggaagacgaagatctggaaagtctctatcagaggatgacgcagagtaaagatctgaccagtgcggtggcccagacataccagtacaccagtgaagatgaccgaaacaacgccagcgacctcttaagccgtgcaatccgttcccttcaggaagtggaacatttcgatgaaaaaggaactgcactgtatggccagctggtggagattgacagtctgctcaatgattttaaccgggaactctcggagtatgccaaaagctttgaattttcagaagaagagttttatgagacagagaaccgcctcaatgagattaatcgattaaaggcaaaatatggaaatacagtcaatgaaatcctggaatacgcagaggaaaaacggcagagactaaatgaactggagcattatgagacttatattgaaaatctgcggtctcaaaccgaagcggcgcaaaaggaaatgcaaagctgtgccgaaaagttgagtaagattcgaaaaaaagcagctatttcctttacaaaagagatcaaagccgggcttgaggatcttaattttctggatgtacagctggaaatgcgtttcttacaagaggcaaaaatgtctgctctgggaatggatgacgcggaattttttatttctgtgaatccgggagaaccgccaaagccgcttggaactacggtttcaggaggtgaactctccagaatccttctggcgatcaagactgtgctggcagataaagaagacacgccaacactgatttttgatgagatcgactctgggatcagtggaattacagccggaaaggtggcagaaaaactgcatatcatcggacagaagcgtcaggtgatctgtatcacccatcttccgcagattgcggcagctgccgatgctcactatctgattcaaaagcagacggatcagacaacgacaaaaacaggcatttttccgttggatgaggatgcttctgtgggcgagctggcgcgtctgcttggcggcgcccaggtaacgaaaaatattctggacagtgcaaaagaaatgaaagaaatggcaaagagagtatagaattccagtgtgaaaataaaaaaatgtcacatactaaaacggataccttttggtgtccgttttttacgtttggcagagaggatgtgacaaagatgaaaagaaagtataggcaactggcagctgttcttatgttccttgtgtgtctctccggctgtgcgatgtctcccaaaaaggagacacaaaaggtcagagaagccagtacccaggcagtcatggaggaaggcgtcataccaggcggcatgccggtcgggatttacatggagacggatggtgttatggtacttggtacagaccagatcaccggcgcagacggaaaacagtatcagcctgcagagaatctggtgcggccgggagattacattgtggcatggaatgatgaaaagattgaaaataaaaaagaactgttccagaaattatccgatctggacgaagatcaggtggcgctgacactgcgaagagggcagcaggagctgacagttgcggtcaaacccgtagaaacgaaaccagacgaatataagctgggaatctgggtgagagacaatgtgcagggacttgggacgattacctttatgaccagagacggagcttttggagcgctggggcatgggattcatgatatggatacaagcgcgcttttgtcgattcggcaggggactctttataagaccagtattcattcgattcaaaagggacagaacggaattccagggagtatggaaggaatgatcgtgtacagtcattataatcgtcttggaaccatagataaaaatacggaggcggggatttacgggacgattgaatccgcagaaaaactgtttttgcagcaggagatggttccggtggcagagcggggagaaatacaaaaaggaaaagctgtgatttgctgttatgttaacggagaagtagaaaattacgacattttggtgacagatatcgacgattccggacaggaaatcaacaaagggctggtgatcgagatcacagatcagagactgcttgatgcgaccggcggcatcatacaggggatgagcggaagcccgattttacagaacggaaagctgatcggagcggttacgcatgtgtttgtacaggattcggcaaaaggctacggtatttttattgagaatatgttgtcgaatctttctgcctagttttgtcgaataaggtctccctgattttcttgcattttggcagatagggcagatataatgaaaagcgtggcgtttaaaagttcaggcagtgaacagagggagaggaactatggaacaggtaaacgtggcgattgctgacgataatgagcggattttggatcttctggaggaaatcatcaacatggacaaagaacttcatgttgtaggaaaagcaaaaaatggggaagaaatgtgtcagatcatccgaaataagcagccggatgtcgtattattggacctgatcatgccgaaaatggatggtctgactgtgatggagaagatcaatcaggataaaaatgtacagaagcgtccggactttatcgtagtgacagcagtcggccaggagcggattacagaagatgcattcaatcgaggcgcaaattactatatcatgaagccgtttaacaacgaaatgctgttaaatcggataaaaacagtcagaagaccagtgagaagctgcgaaaagaggaatgatgaactgtcatcacaggttccatacatcagagaaggggatttggagaacagagtgacaaacctgctccatgagatcggaattccggcacatattaaggggtatcattatctgcgggattcgatcatcatggcagtgcaggatatggatgtgttaaatgcgatcacaaaggtgttgtatccaaccgtagcaaaacggtatcagacgacatccagccgtgtggagcgggcaatccgtcatgcgatcgaggtagcatggaatcgtggaaaactggatacactggatgagctgttcggttatacggtcagtaccggaaaggggaaaccgaccaactcagaattcgtggcattgatcgcagatacgatccagttggaatacaaacacagataaaccacacagaaatctttgcaatcttcgggaaatggagtataatgtagaaaaatactggcttagtaaaacggagggaaatgggagggaaagctatgaagaacattttatttgcagcttcagaatgtgtgccatttatcaaaacaggaggactggcagatgttgtcggttcacttccaaaatattttgacaaaaagaaatacgatgtgcgggtggtacttccgaagtattcctgtatgaaccagaaatggaaggaccagctggaatatatggatcatttttatatgaatctggcgggagaagaccgttatgtaggaattctgaaatatgtgcaggacgggatcacattttattttattgataacgagtattattttaatggatttgcaccgtatgacggagatccgagatggaatatcgagaaattcgcctttttctcaaaggctgtgctgagtatcctgccggtgatcgacttccgtccggagctgatccattgtcacgactggcagacaggcttgattccggtttatctggacaattttagatttctgggtgaatattacagaggaatcaagagtgtcatgacgatccacaatctgaaattccagggcgtgtgggacaccagcactgtacgtcagatcacagggcttccggagtattactttgctccggataagctggaggcataccgggatgccaatctgttaaaaggcggtatcgtctatgcggataaagtgacaacggtaagtcagacatacgcgcaggagatcaagacaccgttttttggagaaggtctcgatggtctgatgagtgcaagatccaatgacctttgtggaattgtaaatggactggattatgatgagtactgtccatttaaggatacacggatcgcaaaacgttttacggccgatacattccgcaagaacaaggtttccaacaagctgtctctgcaggaggagcttggactggacaaggatccgaaggtgatgatgctcggtattgtgtccagactgaccgatcagaagggatttgatctgattgattatgtgatggatgagctctgccaggatgcagtacagattgtagtactgggaaccggggaagcaaaatatgagaatatgttccgccattttgcatggaaatattcgaataaagtatcggccaatattttctattcagaggatatgtcgcataagatctatgcatctgcagatgcatttctgatgccgtctctgtttgaaccatgtggattgagccagctgatgagtctgcgttacggcacgcttccgatcgtgcgggagacaggcgggctcaaggatacggtagagccttacaatgagttcgagaagacaggtacgggattcagcttttccaattacaacgcgcatgagatgcttggcacgatccggtatgcagagcatatttattatgacaaaaagcgggactggaataagattgtagagcgtgcgatggaacaggatttctcatggaagaattctgcaaaacagtacgagacattgtacaaagagcttattggagaatagacaaaatatacacaggagaaaaatgcatgaagattattgacagactcagagaagacgggatacatatttcctttgagatttttccgccaaagacagatgcgggatatgacaaagtaattcgggcagcagaagaaatggcaggcttaaagccggaatttatcagtgtgacttacggggcaggcggcggtaccagcaaaaacacagcaaagatcgcatcctatatcaaacatgatctgcacgtagaaagcctggcacatctgacgtgtgcttcttccacaaaagatgaggtgcgcagcgttattgccagcctgaaagaacaggggattgagaacattctggcattgcggggtgatatttcagaagatatggtatttccgagcgaggatcgttttcattatgcctatcaactcgtagaagagatccgcagacatggagatttctgtatcggagctgcgtgttatccggaagggcatgtggagaatgagcataaagaagatgatatcaagtatctgaaacaaaaggtagacagtggtgtggattttctgacaacacagatgttttttgacaatgatatccactataatttcctgtaccgtattcgtgaagcaggaatcactgttccggtattgccggggatcatgccgatcacaagcgcaagacagatgaaacgaagctgtgagttgtccggaaccgtatttccaaggagatttcaggcaatcctggatcggttcggggattcgccgaaggcgatggaacaggcaggaattgcatacgctaccgaccagatcattgacctgctggcaaacggagtgaagaatatccacatttattcgatgaacagaccggaagtggcagcagctatcatgcataatatttcagaaatcattcagtgttaggagacggagtaatggatagaatgacaaaagaagctatccgttatctgggctatggaaggaatgcggtagatgaacagacacttgctttgatcaaagactcttttgagggtctgagatctgcagtaagtccaaaatccatctgccgtatttttgatttacagcatcagagcgaggagtgctttcagattggaaatatccggatgaagagcagaagtctgggcagaaatttaaaacaatgtgagaagctgattctctttggagcgacactgggaacaggagcagaccggctgattacgcgggcatctctgacagacatggcaaaagcagtggtgcttcaggcctgcgcagcggccatgctggaggaatactgtgatgcgtgtcagagagaaattgcgaagcagcaggaaaaagaaggctggtatctgcgtccgaggttcagtccgggatatggagattttgatattcagtatcagaagccattgatgcagatgttagactgcgcaaaaacgatcggactgaccatgacggacagttttatgatgactccgacaaaatcggtgacagcagtgatcggaatgagccgtatcaaagagcggtgtccgatacagggctgcgagatttgtgaaaaaaaggactgtgaatatagaagggatacgatatgattttagaacgcttgggaaaagaacttttattttttgacggtgggatgggaaccttgcttcaggcaaaggggcttcttcccggagaattgccggagacttggaatctgacgcatgcagaggcagtgcgtcagattcaccgcagttattttgaagccggaagtgatattgtcctgaccaatacattcggagcaaatgcgttgaagtttcacgatgagagctgttccttaaaagagattattttctctgcggtttctcatgtgaaggaagcggcgaaacagggggtgagagacaaccgggaagtgtataccgcgttggatatcggccctaccggaaagctgttaaagcccatgggggatctggaatttgagaccgcttatgaagctttcaaggaagtgatgatctatggagaacaggccggagcagatctgatccatatcgagacgatgagtgacacctatgaattgaaggcagcggtacttgcagcgaaagagaatacaacccttccggtgtttgtgacgactatttttgatgagagaggaaagctgctcaccggagcggatgtaccttctgtagttgcacttctggaaggactgcgcgtggatgcactggggatcaactgcgggatgggacctgagcagatgatgccgatcctgcatgagattttggaatatacgtctcttccggtgattgtcaagccaaatgcaggacttccgaaacagcgagatggtgagacttattatgatgtagagccggagcagtttgcaaagacgatggaaatgatcgtagaaacaggagcctgtgtgatcggcggatgctgtggtacgacaccggatcacatccgggcaatgatcgcacagtgtaaggatcttttgatcaaaacaccggagaaaaaagttcatacgatcgtatcttcttacggacaggcagtgatgcttggtaggggatccaggatcatcggagaacggatcaatccgacgggaaagaagaagttcaaacaggcgctcaaagatcatgatctggattatatcctcaaagaagggatcatgcagcaggataatggagcgcatattctggatgtgaatgtaggattgccggatattgatgaagtatcgatgatgaaagaagtcattacagagcttcagagtgtgaccagtcttccgctgcagatcgataccgtggatattcaggcgatggaacaggcaatgcggatctacaatggaaaaccgatggtgaattcagtcagtggaaaacaggaatccatggatgcggtattcccgctgatccaaaaatacggcggtgtagtgatcggtctgacgctggatgaagacgggattccagaaacggcagacggccgtgtggcaattgcagagaagatcatccgtgaggcggcaaagtatggcattgacaagaatgatcttgtgatcgatgtacttgccatgaccgtcagctcagaaccggaaggggcaaagattactctggaagcactgcgcagagtccggcatgatctgggtgtgaatacggttcttggtgtttccaatatttcatttggactgccgggaagaccaatcatcaatgcgaatttttatacgatggccatgttccaggggttaagcgccggtatcatcaatcctgcatcggaagatatgatgcgttcctattatgcgtatcatgtactgatgaatctggatcctaactgtgaaaattacattggacgctatggaagtgccaatgtagagttcgcttccgcgcccggcagtatcacaaccggcgcggggcggacagcaggggggatgatgacactgcaggctgcgattgaaaaaggcttaaaagaggaagcacatcagattacaaatgtgctgatgcaggagaaaaagccgttggatatcatcaatgaacacttgattcccgcgctggataccgtgggaaagggatttgaaaaaggaacggtctttttgcctcagcttctgatgagcgcagaggctgcaaaaacagcatttgcagttttaaaagaagggctggagaacagtggagacgtgcaggagaaaaaagaaaaaatcgtgcttgcgacagtcaaaggcgatattcacgatattggcaagaatattgtaaaagttcttctggagaattacagttttgaggtagtggatcttggaaaagatgtgccgccggagaccattgtagatactgttgttgcacagcagattcggcttgtgggattgagtgcgctgatgaccacgactgttgtcagtatggaggagacgatccgccagctcagagaaaaagcaccgtggtgcaaagtaatggtaggaggcgctgtcctaaatcaggaatatgcagatatgatcggtgcagatttttatggaaaagatgcaatgcagtccgtgtattacgcacaaggactgctgcagcaataaaaagtcacagacaaaggaggaaatcaaaatgtccaatatgagaggcctggatacccaggtgagagcaattcgcagacgtgtgttcaaggaagtggcaaagcttggatttgaagcaaattcagagaccctgctggaagatatggaagccattccgtatgagattgtcaatgatgatacggtaaagtacagagagagtacgtatcgttcccgtgcgatcgttcgggagcgacttcgtcttgcgatgggactttccctgcgcccggaagacaagccggtacatctgacggcgggagtgcaggaaagtaatatttccgaaaaatattatgagccgccgctgatgcaggtgattccgtctgcctgtgaaagctgtgaggagaacaaatatgaagtcagcaatatgtgcaaggggtgtcttgcacatccgtgcagtgaggtctgtccgaagggtgccatttccatggtcaacggaaaatcctatattgatcaggaaaaatgcatcaaatgcggaaaatgtaaggcagtctgtccgtatgatgcgatcgcgaaaaaagagcgcccatgtaaaaatgcctgtggtgtgggagcgattgtttctgacaaatacggccgtgcctatattgacacagaaaaatgtgtgtcctgcggaatgtgtatggtgagttgtccgtttggagcgatttcggataagtcccagattttccagctcacaagagcactacaggaagagggaagcgagatcattgcggagattgcaccggcatttgtcgggcagtttggagagaatattaatccaagaaatatcaaggcggcattgattgaattgggattcaaaggcgtgcatgaggtggcgctgggagcagatatcggtgcagttgccgaggcgcatcattatgtagaaaaagtcgtgaccggagagctgccgttccttctgacttcctgctgtccttcctgggcaatgctggcgaagaaattcttcccggatctgatcgatcagatttcacaggaactgacaccaatggtggcaacagcgagaagtattaaaaaagagcatccgaatgccaaagtagtctttatcggaccatgtgcggcgaaaaagctggaggcttccagaagaagtgttcgaagtgatgtggattttgtagttacttttgaagaactgcaggcgatgtttgatgccaaagagattgatctttcccagtatgaagcagagtcctctttccacgatgcgacaggtgccggaagaggatatgcctgtgcaggcggagtagcagaagcgattgaaaagtgtatcaatgaatactatccggatgtggaagtcagcattgagcatgcagaagggcttgccgagtgcaaaaagacactgacgcttgccaaagccggaagacttaacggctgcctgattgaggggatgggatgtcccggaggatgtattgcaggagcaggaacgaatattccggtattgaaggcgaaaaaggatctggcagcttatgtaaagaattcaactacgccgattccgccgaaagagctggaagaaattgagctagaataggatttacaaaaaaaataagctgtggtatgataaattagacgtgggtctgctgcaaaacgaatgtcttgcggcagcccctttttgtgagattagcgaatgaaaccggaggataaggtatgcagccatatggagtaaaccaattaagaaaaatgtttttggagttctttgaaagcaagggacatctggcaatgaagagtttttctttggtgccacacaatgataagagtcttcttctgatcaactcggggatggctccgttaaaaccatattttacaggacaggagatcccgccgagacgcagagtgacaacctgtcagaaatgtatccgtacaggagatatcgagaatgtaggaaagacagcacgtcatggtacattctttgagatgcttggaaacttctcgtttggagattactttaagaatgaagcaatcgaatggtcctgggaatttttgacagaggtagtaggtctggatccagacagattgtatccgtccatatacgaagaagatgaagaggcattcgaaatctggaataagaaaatggggatcccggcagagcgtattttccgttttggaaaagcagacaatttctgggagcatggttccggcccatgcggtccttgttccgagatttattatgacagaggggaaaaatacggatgcggcagcccggattgtacggtaggttgtgaatgcgaccgttacatggaaatctggaacaacgtatttacacagtttgataatgacggacatggacattattccgaactggagcagaaaaatattgataccggaatgggactggagcgtctggcatctgttgtacaggatgtggattcgatctttgatgtggatacactcaaggcactgcgtgatcacatttgccgtcttgctgatacagagtatggaaaagatgcacaggctgatatttccatccgtgtcatcacagaccatacacgttctgtgacctttatgatttctgatggaattatgccgtccaatgaaggaagaggatatgtgctccgccgtttgttaagacgtgcatgccgccacggaagactgctcggaatcgagggaagctttattccggaactggcacagaccgtcatcgaaggatcaaaagacggatatccggaactggaagaaaagaaagactttattttaaaagtcattgcaaaagaggaagatcagtttaacaagacgatcgatcagggacttggtattcttgcggaaatgacagcgaaaatggaagcagagcagacaacaactctgtctggcgcagatgcgttcaagctgtatgacacatatggattcccgattgatctgacaaaagagatcctggaagaaaaaggaatgcaggtggatgaagagggattccacgcatccatggaagttcagagaaagactgcccgtgcagcccgcggagagacgaactatatgggagcggatgtgacggtttacgaatccattgatccaagtatcacaagtacatttgtaggctatgagaatctggcatggaagtctccgattacggttctgacttctgacacagaaatcgtagaagcgctttctgacggacagagaggtactgtatttgcagaagagactccattctatgcaacaagcggcggacaggaggcagacacaggaatcatccgtacagcagaaggtgaattcaaagtagaagatacagtaaaacttttaggtggaaagatcggtcatgtaggagtggtcatcaaaggaatgatcaaaacaggggatcaggcagaattgtgtgtagatgctgaaaaacgtgcattgtctgcaagaaaccacagtgcgacacacctgcttcagaaagcgttgagaaccgttcttggaacacacgtagagcaggcaggatccagcgtgaacgaagacagacttcgcttcgacttttctcatttctctgccatgacagcggaagaactgcagaaagtggaagaaatcgtgaatgagcagattgtggcaggacttcctgtaaaagtagaaaacatgccgatcgaagaggcaagaaagacaggagcacaggccctgtttggtgaaaaatacggagacgtggtgcgagttgtcaatatgggagactactctattgaattctgcggaggaactcatgtaaagaatacaaatgagatcatggcgttcaagattctttctgaatcgggagttgctgccggtgtgagaagaatcgaggcactgacatccaagggattgatccgttattatgacaatctggaaaagaaactgaatgaagctgcaaaagtactgaaagcgacaccagataatctggctgagaagattgcgcatctgacagcagaaaacaaggcgctgcacagtgaagtggaaagcttgaagagcaaactggcacaggatgccatgggagatgtcatggatcaggtacaggagatcaaaggtgtgaaacttctcgcagcagaggtggatggagtcgatatgaacgggcttcgtgatcttggagatcagctcaaagaaaaactcggagaaggtgttgttgttctggcatccggaaatgatggaaaagtcagcctgatggtaactgcgacagatgcggcaatgaaacagggtgctcatgcaggtaaccttgtaaaagccattgcaggtcttgttggcggtggcggcggcggtcgcccgaatatggcgcaggctggtggaaagaacccggcaggaatccaggaagcactgaaaaaagcagcagaagcactggaaggacaactttcttaaaaaaatgaaaaaaatcagttgacgtttccggaaaatatgttataattctttgtagtgcaataaaaatacccgaacagtcgtatgatgcacaataccaggctggaggggaggttaggtgtgagactatgtcaaatgtaatcgtaaaagaaaacgagacgttagacagcgctttacgcagatttaaaagaaattgcgcaaaagctggaatccagcaggagattcgtaaaagagaacattacgaaaaaccaagcgtaagacgtaagaaaaaatctgaagctgctagaaaacgtaaatataactaatatgtgcagataaatagagtgtcgtaagacactctatttttaatgtgaattaaagattgcagaggcagttgttcatgcaggggagattatgagtatacgaattatgcaataaaggagaaaaatgcaggatttcaaatctaaaatttcaaaaactttaccgagacaaagtgttaaaacaatgaaatttgatgcaagaaattcttgacaattgggaaatatcactataatatagaaaaaggacaagatgtcttgtaaaacccggatgcaatttatctatttgggtatttctattttcaggaggtaataatgatgtcatacgttgatgaagtaattgatttagttgtaaagaaaaatcctgcagagccggaatttcaccaggcagtcaaagaagtactggaatccctgcgagtagtagtagaagcaaatgaggagaagttccgtaaagatgcacttctggaaagacttgttgagccggaaagacagttcaaattccgtgtgccatgggttgacgacaacggacaggtacatgttaacacaggataccgtgtacagttcaacagtgcgatcggaccttacaaaggaggtctgagacttcatccttctgtaaacctcggaatcatcaaattccttggatttgagcagattttcaagaactctctgacaggacttccgatcggtggaggaaaaggtggttctgattttgatccgaaaggaaaatcagacagagagatcatggcattctgccagagctttatgacagagttatgcaaatatatcggcgctgatacagatgttccggcaggagatatcggtacaggagcaagagagatcggatacatgttcggtcagtataagagaatccgcggagtatttgaaggggtcctgacaggaaaagggcttacttacggaggatctctggcacgtacagaggcaacaggatacggacttctctatctgacacaggagatgctgaaattaaacggaatcgaactggcaggaaaaacagttgcagtttccggttccggaaatgttgcgatctatgcgacagagaaggcacagcagctcggagcaaaagttgtgacagtcagcgattctacaggatgggtatatgatccggaaggtatcgatctggcggcactcaaagagatcaaagaagtaaaacgtgcaagacttacagaatataaaaattatcgtccaaacgcagagtaccatgaaggaagaggcgtatggagcgtaaaagtggacatcgcacttccgtgtgcaacacagaatgaacttcatctggaagacgcaaaagcactggttgcaaacggatgtattgcggttgcagagggtgcaaatatgccgaccacaatggaagctacagaatacctgcaggaaaacggagttctgtttgcacctggtaaagcagcgaatgccggtggtgttgcgacatctgctctggagatgtctcagaacagcgagcgtttaagctggacattcgaagaggtagacggaaaattacagcagatcatggtaaatatctgtcacaatatggcagatgctgctgagaaatatggcgcgaaaggaaactatgtagttggtgccaatatcgcaggatttgagaaggttgtagaagcaatgaccgcgcagggaattgtataaacgatattacaaatcatacaaaaataatctctaaagcaaatatgtgaaatgagcaggcggcagtattcgtctgctcattttgtgtattctgcttgctttttttcagaacaggtgttataatccatatcacttagagacagatctggtttctgagttctaaaaattcatggaatctgaagtacagattcatcgttttatatgattcagaagtgatggttttcatcacatcagtaaaatgtattccagttatagcaagaagcatacaggagagatagacgaaacgtctgttttatttttgtacccgaaaggagggggcagatggaggagactgatggcattcgcgctccgccgacagttgtctgacagcagtaggaaaagaaatggaggtgcgaatataagaagaaagaatcggagatatctggcagcaggtttgactgtattttccctgttgtttggcggtttgcaggtatgggctgccgagaagccggatgccggatgggaaacaaagatacagaaagaagaaaaaagtaacatggaaatactgatcgcttcggagcagccttatacatatttgagtcagatgaaagagcgtatacagtttgtgggggcactttctccgggagagctttatcagttgcaggaaattttaccttatctgatgatcaaagaacatatcggaaaagaagaggctgcgtgggataccaaaatgtatctggaagtggttgaggaatggaagagacgggaggaatcaccaatcagtgaggaagaaaagcaaagtctcacggaagcacttataaaaatgcttccggaaaacgggcaatcttatgtgattgatggaaaagaaagccgggtggacagtctgcaacgatatggagagtttttgcagacacaggtgtctttttcggtggaagcatgcctggaaaaaatccgaaacagcagaacagatgataaagaagagcctgttgaaaaagaagaaacattgccgggcaacgtgtccaaagagcagaaagcagaaggcgcctgccggattggaaatacatactatgaggatctttcggcggctttgcatgcagtaaaggataatgaaacgatttatattgtacagagtcatacgatgaaggatagttttgtatatgtggaaaagaccagaacgagaaagtttcagaatgtccggattttgcccgagggcggtccgagaacggtcaggatgccggaccggcacaggctggcatttacaaaatcaagtgttgcgatcggaagtaaaggaagcgatccattgacatttgatttaagtgggacttccgttccggattcggataatttgtattgtggtgccatttgtgcaaataagggaagttctgtgacatttgaaaattgcgtttttcaaaatggagatcagctgtcaagatggatgattcacggagaatatggttctgtaacagtggatcagtgtaaatttcaaaattgcgacaatggagtgggagttgttacagaggcaagttctgcattcacgccgacagaaatcagttttcgcgtgcaaaattctgtgtttgatgggattgcggatatcggagcggttcacttttctatacatagggccaatatccgtgccgagattcagaacaatgtatttaaaaactgccggatcgggattggcggaatccgaagtgatgaagctccatataccggaccgataagtgcacggattcagggaaatacgtttcagaactgttatatcggggaaagcttcagtcagggtacttcggttgcagcttctgcgtttcaggtaaatgtgtccaatgagaggtatcatggatggcaaagtacttcacagcatccgaatgtgggagatctttactcaggatggttcagtaccggattttgcaattccaatgtagaagcaagtgtgaatggatgcagctatgagaatggcgtccatggaattgcaacgatgagtaaagggcgcacggtggttaataatacgactctggcaagaaacaatgcaagagaagctaatacggaacagtgcggacagaaaggaaacggtggaggtatctttctcaatggaggaacgattatatggaatagcggaacgatttgtgagaatcaggcagatcggggaggcgccatttatttaaaggatggggagattcttttgaaagacggcagtttttatggaaatcgtgcacaaaaccggggcggaggaatctacaatcagaatggaaccgtgaaacaggaagggggaaatttttccgcgaatacggcagagatcggttccggtgtttatcaggatggaatttaccagatgagtggttcagcattggtagatgaagggaatgacgtatatctgccagctgaaaaatacattgaggtaatgcaaaagcttcagtctgttcctgcggcaagagttacaccggaccgatatgagaatggcagaatggtggtaaaggtaaattatggaaaccgtacaggaagtatggagtgggagcggtttttgctgacaccacaaagcagatattgcctgcgcccgggagattatcaggatcggcgtgcaggtactttaaaagaagcagttacgatcagcagtgaatatacggtgcagtatgataaaaacacgaaagcacaggtggaacagatgccggaaccgtctgtcaaatactggtatgagaaagcagcggtttcggaacagattccaaaatggctggacgtaccgtttctgggatggaatgaaaatcagacggcgaaagagggacagtatcagccgggagaaaatcttcctgctgagaaaaatcaggatctgacgctgtatgcaatctgggaggaccgggtatcgatccgttatctgggaaatcacgcagaagaaggacaggaaaagtcggaaattgtttcttatgaggattgtctccaaaacggataccggattcagaaaaataaaggctatacagattataagaggaacagacatacatttgcaggctgggatcagcgtgcggatgtgggcgcaaaagaagcggcatttcaggaaaatcgcgaaaacagaatttcttatgaagaacttcgaaagattgctgccagtcagagaaccgaaaccggggagagcagggaaatggcaaaagtggcattgtatgcgatctgggaccgggctccggagatttcagcaccggataaagagtactttgaaggagagaccgtaaaaaaggaggatctgttgaaagatgttcagagtacggatcgggaagatggggaattaactacgcagattaagatcgttcagattgaatatgcgcccggcagactgacagaagacggaaaagcggataaagaggtgaaaacatggaaagacggaatgtcatccgaagaacttctggatacgtggtttttgcagctggataaaaaagacagcccggtcacacataaagtcgtatatcaggttacggacagcattggaaatattacagaagagtcctgcagcgttaagatcaaatataatgaatttccggtgattgaagcacaggatcgctattttactcttcaagaggcacagcagggtgcaattacggaagaagtgttaaagactcaggcaatatcagaaggaaaagtaaaagccaatgatacggaagaaggagatctttctgaaaaattgaaactgcttgattttcatccggaggaatttcaaaaatttacggattcagggtatatcgtgttgaattggcatgttcaggacagcatgggtccggatggcaaaggaaaagaaacggttcggccgtttactgtgtatgttgtcaaggatggagaaattccaaaagcaccgcataaacagaatgttcgttttatcagtgaaaaatattatcggatcaatgagaatgtggatgcagacgctctgacagaggacgaaaaagaagcatacagtaaaaacggaggacttcatgtagactccaaatggtatcaggaacaggagtatcaggatgtgatcgaaaagacatggaaaaagaatggtggaaaagtatatcgttttacgcatgaggatgccagaagagcggaagaatttgtggatacccacggaatcggaaacagtcgggatgagaatgcactggcgatgtttgcaaatgagtttctgaaataaattgacaatatcgagtatcgataatataatgaatgtataaattatcgatactcgatatttctttttgggaggaggaaatctcatgagaacaaagaaaagagtgtttcgtagttttggatatctggaatgtgatgcatttgcagaatatctaaaggaaatggcagcatctggatggcatttttcatttccggaatttactacatctgttatggtcagaaaattttacgtctttcagtggaagaacctctgacaaaagaacagattcaggttgtggaagaacgactgaaattgaaagaataaagaagggtgtggactatggcaagagagcagtttcagacactgacagagccgatgtattatattttgatcgcgttatccgaagaatgctgtggagtggacattatggaaaaggtgcaaaaaatttccggcggaagagtgaaggttggtccgggaacgctgtatacaatgctgtctaaatttgaggaaaatcagattattttcaggacaaaagaagaaggaagaagaaagtcttatgtgatcacagaacatggaagaaaattgctgcaggaagagcacgaaagattatgtatcatgctggcagattggaatggatattttgacaaaaacttgctatactacaataatagacaagagaagaaggagaacgaaagatgaatatatttgatattctcggaccggttatggtaggaccatccagttcccatactgcgggagcagcaaggatcggctatattacaagaaagctgctggggagccaaccgaaaaaagcaaggatcggattgagcggttcttttgcggcaacagggagaggacacggaacagatcgtgctctggtagcaggacttttggggatgaaaccagatgatatgcggattccggatagtttttctgttgcaaaacaggaaggactggagtttgaaatatacaatacacagattaaagaagcgcatccaaatacagcgcttttggatgtagaaggagttgacggaaagacgatcgtggtgcaggcatcatctcttggcggcgggagaattatgctcaatgaactggatgaaatcaccgtaaactgtacaggcgcctgtccgacattgatcataagaaacgaagatagcccgggacaagtggcagaggtgacttctgtattatatggaaagaaagtcaatattgccacacttcagcttcacagggacaagcggggcggttatgcggttatggtgattgaaacggatcagcctgtagaaccggacacgattcgggatctggaacgtttaaacggtatcagcaaagtgacttacattgagacagagggggtatagcggatggcatttcattcattagaggagattcaaaaatcctgccgggagaagaacgttttgttttggagagcggtccttttagaagatatggcagatcgatctgtgacagagacggagtcaatgcagtcgatgcagcagatgtggacagcgatgaaatcagcgagtgagcagtatgacaggacacaggtctctgccagcggactggtcggaaagatgggggcgcagatggaggaataccgtcagagtaaagagccgctgtgcggtccatttgtctcaaaggtgatcgcaagagcattggagatgggagaatccaatgcctgtatgaagcggatcgtggcagcaccgacagcaggtgcatgcggggtgctgccggctgtactggttcccctttatgaagaagaacgggtatcggaagatgaggtgatccatgcattgtataccgcggccggtatcggccaggtgatcgcatcccgtgcatttattgccggagcggcaggtggatgtcaggcggagattggagcggcatctgcaatggcagcaggcgcactcgtgtttttacagggtggagatgaagagcagatctcacatggagcggccatggcgctgaaaaatctgttgggactggtgtgtgatccggtagccggtcttgtggaagtaccctgtgtaaagagaaatgtgatcggagctgtcaatgctttatcatctgcggatatggcactggcgggaattaccagcaggattccgccggatcaggtgatcgatgcgatgaaggaggtcggagagagtatgcacgtctctctgcgtgagacaggagaaggcggagttgccaatacgccggaagcgcggaaaatcaaggaaaaactgggaatgtagtatggtttgcagaaaaaatcgttgacaacaaaaggaaaatgctttatagttttcttaaataaaagggagtaaccagcgcttatggcgtgcacgatgtcgtcaatacgatggaaaagttcatccgtatcgtgattaaatggtgagacttttgttgcatacataacttgcaataaaagtctcttttttattgcataaaagaaatggaggaatgaatgtgaaaaactattatcagttttctgcagaagaagtcaaacaggatattaatggaaaacaagagccgttgacagctgcggaagtaaaagcacatcaggagaagttcggaccaaacgaactggtagaagggaagaaaaagaccacacttcagatctttctggagcaatacaaagatttccttgtgatcattttgatcgctgcagcgatcgtctccggatttttaggagatgcggagagtgccattgttatcctgatcgtaatcacgatcaatgcgattcttggtacggtacagaccgtgaaggcagagcagtcgctggccagtctgaaaaagctctccggaccggaggcaaaagtattgcgtgacggaagtgttgttccgattccatctgcagaagtaacagtcggagatatcgttatgctggatgcgggagattatattcctgcagacggacgtcttttggagagcgccagtctgaaagtagacgagagtgctctgacaggagaaagtcttggtgtagaaaaaatgacagatgccattgaaggcgaggttccgcttggagaccgtacgaatatggtatattccggaagctttgtcacatacggaagaggttcctttgtagtaaccggtattggtatggagactgaggtcggtaagatcgcaagtctgttaaagaccacatctgaaaagaaaacgccactgcaggtgaatctggatcagttcggacagaaactttccatcatcattctggtgttctgtggtattttatttggaatcaatgtattccgcggtggtaatatcggagatgcgttcctgtttgcagttgcacttgcagttgcagcgattccggaggcacttagttctatcgtaacaatcgtactttctttcggtacacagaagatggcaaaagaacatgcgattatccgaaaactgcaggcagtggaaggtctgggaagtgtttctattatctgttctgataaaacaggtaccctgactcagaataagatgacagtcgagcagtattatgtcaatgaaacagtgattcctgcagataagatcgatgtgaaagattctgagcaggaaaaactgatgtatttcagtattttgtgtaatgattctacgaacgtagatggtgtggagatcggagatccgacagagacagccctgatcaatctgggaagcaagcttggtctggatattcagaagatccgtggagaatatccgcgtgagagcgaaaatccatttgacagtgacagaaaactgatgtctaccaagcacacgattgatgagacaccgatcatggttgtcaaaggtgcggttgatgtcattatgggacgtacagcaagcatccagtgtggagatgaagtgcgtgccattactccggaagatattgagaaaatcgaagcacagaatcagagcttttcaagagaagggcttcgtgttctcggattcgcctacaaggcagtatctgcggaagaagagttgtctctggaagatgaaaacaatctgacattccttggtctgatcgctatgatggatccgccgagagaggaatctatggcagcggttgcggaatgtaagagagcgggtattcgtccgatcatgatcacaggtgaccataaagtgacagcggcagcgattgcaaaacgaatcggaattctggaagatgaatcagaagcatgtgaaggtgcagtgatcgattcgatgtccgatgaggaactgaaaaactttgtagaaggtatttctgtttacgcacgtgtttcaccggagcataagatccgtatcgtacgtgcatggcaggaaaaaggaaatatcgtagccatgacaggagacggtgtcaatgatgcaccggcactcaaacaggcagatatcggagttgctatgggtatcacaggaagtgaagtatcaaaggatgctgcttctatggtactgacagatgataactttgcaacaatcgtcaaagcagtagagaacggaagaaatgtttaccagaacattaagaattccattcagttcctgctctccggtaacttcggagcaatcctggcagtattatatgcatctatcgcaggacttccggttccatttgcaccggtacatctgttgttcatcaatcttttgacagacagtcttccggctattgcccttggactggagccgcattcgaaaaaggtaatggatgaaaaaccgagaccgatgaatgaatcaatcctgacaaaagatttcctgacaaagatcggaacagaaggtctttgcatcggaatcacgacaatgatcggatttatgatcggtctgacgggagaaggcggaaacgcagtacttgccagcacaatggcatttggaacactgtgtacagcaaggctggtacacggatttaactgtaagtctgattatccggtaatcttctccaagagattctggaacaatatttatctgatcggagcattcctgcttggtctggtattgatcacttgtgtaatgacgattccggcactggatgaagtgttcaaagtacagacactgacctttacacagttgctgatcgtatatggtctggcacttgtaaatcttccgatcattcagctgatgaaaaaaatcaaactgatgttcagaaaaaataaataaataggcaatgaaaaagtcccattggaaagtttgatccaatgggacttttttctgcccttttcaggtgtgacgtttgatcgtctcttttaatacatattttttatcactgtagcggtccacaatataacggtttgcttttttctccagatcgtcggaaagtggagcgagggttatttcttcaccgtatttgcgcttcagcgcccgctctaacagatagtcacaaacttgcggattcttcggaagaagaggtccgtgcaggtaggttgcgatcacattcttgtatacaacgccttcataaccggattttccggtatttcccagtccgaaaaatacttttccaaatggagtgtgatctccgatataagtgcggcctccatggttttcaaatcctacaacaggagtgtcaaacagcggactgttcaggataatgttgcggatgagacgctccggctcccattcggtcgtgatatccagaatgccaagaccttcgatcatctttttatcggttttataatatttgccgagcagctgatagccgccgcagacggcaagcacaacgccgttatcctctacatattctttgaaatccttgcggatctcttttagatatccgcagacgagctcttgttctctgtcagaacctccgccgagaagtacgatatccagtttggaaaagtcaatgttatctccggagagtacgggaatgacttctgcctcgattccgcgccagttgagacgttttcggaaacactggatatttccgcggtctccgtacagattcaacaggtcgggatataagtgtccaattgtcagtttcatgcctgttctcctttctgttcctttgtattttgcgccagttctttgagcattcggtttgtgcggtaaagcccggagtagttgacaatgatgtagagatttttcgttccgttttcggtcagctcttcaacacgggagcgcatatcattagttgaagtacagtcgatgtcctcatatttgagacgaagccccatgtcatgtttgcgggttccgcacgttgtgatggtagctgcattgctgtctgcaagatattggaaatcgacatcccaaagccaggaaacatcttctccgtcttggtaggtatcattgatctgaatgataatatcctttggttttggatcttttaagacgagagaaatcttctgctggaatccgatcgggtttttggacaggtgaagctgtactctggcaccgttgatcatcaggatttcttcccggttgtttccatagtcaaaagactctgccatctctttaaaatgtgccatcggggcatgcatggtatgcagtgccgtataggcagcaagagtgttgtaaatattgtaaggcgtccgtaccgtagaatccaggtgcagatctcccatatcgaaggcatagagttcgtctttgagcgtgatctgtgtggctgtaaaatcaggatccgggcgctcccatccgcagttcgggcagtgataaattccaagctgtccataatggaagaaatcatactgtagtttctttccgcattttcggcagaaaatactttcccggatctcagagcgggagatgtcatcaaaaatctgttcgctgatcccgtatgtcacaaacggattgccgcttgtttccgctagggaataggaaagaatatcatcgcagttgatgatcagtgtcgtatccgggacactggtgacggctgttttcaatttgtcaaaggtaatatctacttcaccgaaccggtccagctgatctctggaaatatttgtcaaaagcgcacagtccggttttaactgagggagaactcccacagatgcgatctcatcgacctcaatgcaggcataatccgcattcagctgtccgtgcttgtctgtggccagaacaaatgccgaaataatcccgttgagcatgttggctccggtacggttgatgatcacggtttttccctcggccttcaatgctttgtataaaatggcattggtcgttgttttcccgttagttcccatggtaacgatcgtcttctcccggatctgggaagccatgacgcttaaaatattgggatcgatcaatcttgccacatatccggggagggtaacgccgcttccgcggtttaattttttgatcagggcacttgtcccttttgcacatgtaattgcaagtctgcttcttaatttcatagtaatccactatcatccttttctttgaaatacttgtattattataagggaaatggaggaagaagacaaggaatctgtatgattttcctgttttagaagaagagtttttgaagattttctaaagtttcctggaatctactggaaaaacgcattcagtgtgttaaaatgtaagcaattatacgaaacaaagatcctatcaggattggacatacggaaggaagcgagaaaaatgcggcagaaaaagcgtggagaaagaagagtaaaacgaagcatagacgaaacgcagacgatggagatcacactggagaagcggattcccaccacaagataccgaccggatcatcagacggggctgactgcgcagcaggtgcaggagcatcggatgcatgggtggaccaatcagccggtggatccgccgtctaagactacaaaagagatcattcaggaaaatgtctttacctattttaacctgatctttctggtactggcagttctgctttgcctggtcggttcctttcgagatctgacctttttacctgtaattgtattgaatactctgatcgggatcattcaggagaccagggcgaaaaaagtactagataatctgacgatgctcaatgcacctcatgcaatggtgatacgggatggaaagaagagccagatcaatgcagaagatcttgtgatagatgatatcgtaatcttcgaagccggaaatcaggtgtgtgcggatgccgaagtgtgtgcaggagaagtgcaggtcaatgagtcgcttctgaccggagaatcggatgagatcacaaaacgaaaaggcgatcagctgatgtccggaagttttattgtatccggacagtgtcatgcaaggcttgacaaagtgggggcggattcttatatttccaggctgacactggaagcaaaagcgatgcagaatacagaacagtcggagatgatccgttctctggacaagctggtcaaatgggtcggcgttgccatcattccaatcgggattattttgtttattcaggcatttgtatttcagggcgaagggtttcgatccagtgtgacgtccatgatcgcggctgtgatcggaatgatcccggaagggctgtatctgcttgccagtgtggcgcttgcagtaagttcgatccgtctggcacagaaaaaagtattgctgcatgacatgaagtgtatagagacgcttgcccgggtcaatgtactgtgtgtggacaagaccggaacgatcacggaaaatacaatggaagtgcaggatgtgattccgaccaaggaatacgaggaaggtgagctgcgcccgctttctgagcttctgggagattttacggctgcacagagcagtgataatattaccatggaagcaatgaaacggtattttaaaatcgcatccgggaagaaggctgtggcaaagacaggattttcttccgcatccaagtacagcagtgtgacgtttgaagaggcgtcctatgtgttgggagcaccggaatttgtgctcaaagaacagtatgaaaattatgaggaagcaatcagtgcacatgcgtccaaaggagcccgcgttctggtatttggaacagcaaaagaagaaccggatgggaagcctttgaaagaagcagtcacgcctctggcttatgtactgttagcaaacccgatccgtcaggaggcgaaagagacctttacgtattttgcggagcagggtgtggaggtgaaagttatttccggggacaatcccctgaccgtgtcagaggtggcaaaagaggcgggaatcgcaggcgcagaacgatacgtggatgcgtccacgcttcatacggaagaggagatgcgggcagcagtcctgaacaatgcagtatttggccgtgtcactccgaaccagaagcggaaatttgtgcagatattgaaggaagaaggaaagactgtggccatgaccggagacggtgtcaacgatgtgctggccttaaaagatgcggactgcagtatcgctatggcatccggaagtgatgcagcggcacaggcatcccagctcgttctgctggaatcggatttctcctgtatgccggaagtggtactggagggaagaagagtcgtcaataatattcagcggtcagccagtctgttccttgtaaaaaatattttctcgttcctgctgtcgctggtatcctttgtatttatgtttacctatccgctggaaccgtctcagatttcactgatcagtatgtttacgatcggagtaccggcatttttcctggcactggagccgaataagaatataatcaaagggcatttccttacaaacgtattcttaaaagcacttcctgcggcactgactgatgtgctggcagttggggcgctggtcatattcggacggacatttggagtgagttcagccgatatttccacagcagcaacgatgctgttatccattgtcggatttatgatcctgtacacgatcagtgcaccgatgaatgtactgcgcggtgtgatccttggcggatgtatcgtaggacttctgttctgcagtattttcctcaatgacctgtttgcgattacagggatgactacgaagtgcgtgatgctgtttgtggtatttgccattgcgacagagccggtgctgcgatatctgacctggctgatcggaaagctgcgattctattataagcggctcagaggacagaaagaagtgtaggaagcgaacagtccggatagattgtaaaacataaaaacgagatgcatcatatggaaatgcatctcgttttatgttttactgaagtttatttaaattccatccggatattctacgccatccggcagaggatcccattcattcagccccagatgctgtttgaattttgcctgttccatggtaatcttgaccggatcttcggcaaggtattccatcaattcgtcaattccctcccgggtcacgttatttacaagaaaaatacgatcgcagccggcatttaaaagccactgttttatcataggaacattggcatagggggaatcggtcttggtaatgatgccgatcagcggccgcaggataaacgtgcgcagacagggactaaacaggttgtatggttcatccgctgcctgaacgatcccgacaacgtccgcttcaaaagaaaagcatgcaagaccggcaccgaactgttttgactccgcatattctcccggagagtcaatggtatcatccgccgtaatcgtatattgtgttttttcatagtgaagctcttccccttttaatgcctgtgtcagggaagtctttccggcttcacttcttcccatcaaaaataattttttcatatcgtcatgtctccggtcctcttagtttttatggatctcacaggtgcgaaatcccagatcttcatgaaaaaatcgaacgacttcttccaccgcagtctgtacctgtgacaggccgccggttaaaatgagggaaccgcagaagcgatccataaatccaatttctacatcggcgcttttcattgccacatccgcagcaacgacaactgcttcccatggggtaaaacggatcagaccaatggattctccggtgtgatcctccccctcatgtacaccgatatgcaatcccagattctgataaacaggggtctgggaagtattgatgatgtgagccagacaaacttctttgccgggaacacgaacacgtgtcatgcgcagttttttccctttcagatgctcatagtcatcattgaaaatcttttccagaagttcttcctttgttatacgagtcatggtcacacttcctatctctttgtaatatcacaaacgacatatcccagagaatctctgaaaaaggttaccacttctgtcagggcagacatgacgtctgaaatctctcctgtgatgatgagtgttcctgtaaaacgatctgcaaatccaaggtaaatgtttccgctttttactgcgatatcggatgcgatgacagcagattccggcggcgtcatattcataattccgatagcagaagaacgataatcgacctgtggattcagaccaagtttctgatatacgatcggcgccggaccacccattacatgagcaaaggtgatctctttgccggctacggtctcctgcacgattcggatctgttcttcatggttgtttgacatttaaaaattcctctctttcataacataagtaaatgatactatttgtggaattttctgtcaaggttacatatcctgtcacgataaacattgacaatgccggaaatatatgataccatgaaaaatagtttagtatagtaaagtggtcaatcattagcatgatgacgtacaaacagggaggaaacaaagatgaaaaagaaattagcgctgattttggcagggacagcgatggcagcaatggtactggcaggatgtggagacaaaaacaatgcatccggggaagatgtaaagacagcagaaagtgtggaagataagaaaacgtttacggtaggatttgatgcagaatatccgccatacggatatatggacgagaacggagaatacacaggattcgatctggagctggcagaggcagtctgtaaactggaaggctgggagcttgtaaaaaaaccgctcaactgggattccaaagacatggaacttaattccggttcgattgactgtatctggaatggatttaccatgaatggaagggaagacgattatacattttcaactccgtatgtagacaacagtcaggtgattgttgtggcagaaaaatccggtattgataccctggaagatctggcgggaaagacagtcggtgtacaggctgcaagcgcggcactggatctgctgaagagtgaagaagaaggcggtcagaaaaaactggcagatacatttggagctttgaatgagtttgcagattacaacaccgcatttaccgagcttcaggcaggcgcgctggatgcacttgcaatcgatgtgggagttgccaattatcagatcaagtccagaggggatggatataagattctggatgagacattgaatacagagcagtatgcgatcgggtttaagaaaggaaatcaggagctgtgcgacgtagtcaatgcggatctgaaaaaactgacagaagacggaacagttgcaaagctggctgagaaatacgagattgcggatatggtgactttaaaataagaggggaagagacatgagttttgatgtgatgttgaggcaaatgacagcaggattcggacagacctgcctgatcttttttatgacgctgatcttttctctgcctctggggatgctcgtatatttcggaagggtgagcaggatcaagccgatcagctggatcgtgaagatctatatctcgattatgcgcggaaccccgttgatgctgcagcttctggtgtggtatttcgcaccgtattatctgtggcagatgaatatcggcgggtataagctgacggcgatcctccttggatgctctctgaattatgcggcatattttgcagaaatttatcgttccggaatcgaatcgatccccaaaggacagtatgaggcagccacacttttagggtattccagagggcagacatttttccgcatcgtgctgccgcagatggtaaagaatgtgcttccgtctgtgacaaatgaagtgatcacactggtgaaagatacgtcccttgtgtattccctgtcttatattgagatgtttgcagtggcaaaacagattgcggcggcacagacaaccgtacttccattttttattgccggtgtttactactatatctttaactatgtggttgccggagtgatggaattatttgaaaaaaagctgaattattatcattaggaggtttccggaatgagtcttttggaaatgaaacatatcaaaaaagaattcggcgggatgccggtgatccgggatatttcgctttctgtggagcagggagagattctggcgatcatcggcccgtccggttccggcaagtctacgctgctccgctgtgcgacgatgctggagacgattgatgacggtgagattttgtatctgggaaaaagagcggcatgggtggaaaatggaagacccgcgtttccgaaaaagcaggagatgaaagaaattcagtcctgctttggtctggtattccagaactttaatctgtttcctcatttttccgtcatcaaaaatattacagatgcaccgatccgtgtgcagaagcgagagaaagaagaagtctatgaggaggcgaagaagctccttacaaagatgggacttgcggataaggcggatgcatatccgtatcagctctccggagggcagcagcagcgtgtatcgatcgcacgggcactggcgatgaaaccgaagatgctgttttttgatgaaccgacctctgcactggatccggagttgacgggggagattttgaaggtaattaaggatctggcggcagagcatatgactatggtgatcgtgacacatgaaatgaattttgcgcggaacgtggctgataagattatttttatggataaaggcgtcattgcggtggaaggcactccggaagaggtctttacatcagaacatggaagaatgcaggaatttctggggaaattatcggtggaataataaaaaggaatgagacagggaacctttggcggaagcggggttccctgttttgaagttctgattgtgattattttggtaaaatgctaaaataagagaaatagtgcagaaaaagatcgaaaaggaacaaatatggaagaaaagaagattatacagttgaaacaaggattgacgacagcgtttatcaattacagtcatgcgtcaaatctggcatacaagccacagtttatatcaaacaattataaagaagggcgtaaggtaatctcatctgttgaggacgagctgctgaactgtgaagaatttgcaatcagtgttgcgttcattacaatgggcggtattacgccgcttcttcagacattgcgggagttggaatatcgtggagtccggggaaagatactcacaacagactatctgacattcagtgaaccagaggctctgctaaagctcgcacagtttgaaaatcttgagctaaagatgtttgtgacagaaaatagaaaagaaggatttcatacaaagggatatattttcaaaaaggaagaaatatatcggattattgtgggaagttccaatatgacatcaagtgctctgacaacaaatcgggaatggaatacaaagattgtttcaacagagcagggggaatatacgcataatgttgtagaggaattcgaccaactgtggaattctgagcaggcattgccttttgaagaatttattgaaagatatacagatgcttatacaagaaataagattattcaaaaacagaagaaattagcgcgtgagacagaaattccatctttggaggtttatcgattacagccgaattctatgcaggttggatttatcaacaatctgcaaaaaatatatgaggctggagaaaatcgggcattgctgatttcagcaacgggtactgggaaaacatatgcctccgcttttgctatgcgtgagttggggtttcagagagttttgtttttggtacatcgaaatcagattgcaaaacaagccatgaagtcgtatcggaaagtgtttggtggacaagtggtgatgggactggttacgggaaaacatcagaaatatgatgcggattttgtgtttgctatgatccagacattgagtaaagacgagatattagagaaatatggaaaaacagcatttgatgcgattgtgattgatgaagcgcatcatagtgctgcaaatagttataaaaaggtaat

SEQ ID NO: 6961 - DNA, 1724 bp, Unknown
  gut microbiota DNA sequence
atggacttatgtggattaggtcaatttataatcccgacaatgaagagtttagataagtaagaatggttgaaaacggcataaataaaggattctttgaggataacagaagagaaaaattatgattttacgcccaatttacgcccgatttttaagactttggcagaaaccgatattttaaaattgaatatttcattagagaaaaaaggagattgctattgatatatggcagtctcctttttcgggttaaaatgaatgatgtgatgtctattcaatttcaatttttccatgagccttttcaaaatcggcaatgtgttttttcatcaaaacttccagttcacgattggcagaacgggcattatattcagcaacaaaacgaaattttttcaatagttccggctcggttcttaatgtaaattttactgcgtcagacggcatagatataacctccttgtgattctaacatcattatactgtcaaagtgacggctaaaagtatattgacggcaaaacgacggcataatataatagagaagtaggtaaaataacaaaacgaaaggagaacatatgaaattagttgaagaaatatttgaaaaggctacggttagaggatttgtagattatttgttgtatggtttaccgccggaatcagaggaaagaaattatcaagcacgtttagatgagccatatttagaatatgaaaaagtcgctttagagtatgacagtaatggagcgtcggaactattatcattagtcaacgctatgacttgtgaaaatgcgtgtgtgtatatggaattgggagtgcaggcgggcattttgctgattgctgacatcgttcagaatttgcggagagaagaaattgagaatatccattatagaaacaagtgtgagttgttaattgaggatattaggcaggtattagagattatgaaagattctatgacggacgaatgtaagcagaacatgacaaacattttgaataaatggggagcagaaagaaaaggggaagaatgatgtccgaattaaaagaattattggaaaaagttaaattggaaaatatcatggcatttatgatttatggagcggattcgagaagagatgcttttgaaaactatgagaaagaaattgaaaaatcctatgatgagattttttatagactggaacatttatactcagaagcagataggaaagatgataaactgtttgatgtagtggcggattttgctatgcttcacgacgatatatattttgaagcaggagtattggtgggatttcagttgtttaagaacttagagcaggagtatcagaaacatggggaagattccatattgaatattgtattaaagccgaaagggaagaagtcagtgttagaagaaattgccggatatagaatggacacagcactggaggaaactttgagaactgacaagaagtatcaagaagcaacaaaacgaatcagtgaaaaagtaaaaaaggtggatagaaatgacttctctgcgaaacaatgggaagttattgatgaagcattatcggcttgtaataaaaaaagttctgaatatgggagagtggcatacatgcaagggatttcggacactgtgaatctctttaaagaagccttattgctcatatgattttagttgagaatataagagaaacatagtagaatatacgttaaagaaatagagaaataggaatttatggaggtaaaataatgaaacttgataattt

SEQ ID NO: 6962 - DNA, 7154 bp, Unknown
  gut microbiota DNA sequence
tatttcacaaaaggttttgacagatagtttaagacaaatgatgagtgatgggctggcatatcgccacgattaccatgagcagccaccgagagttgaatacggcttaacggaactcggaacaaaaatgcttccaattgttaattcacttgctgactttggtaactactataaatcaattattgaacagaattaaggacgttagtatttgaaaagctcgaacaattccagttgatattccacttattttaggaaatttaataactattatatttgattatcaaattcttcgcaaacccttgaaaacactaagtttgtagcaagtgtactttcccttactctttcccttgtgttacattctcccattagctttcatgaaccttaatatgggaaaaattaagggaaagaaaatttcataacacagtataacatataacaataacaacatggtgaactgattgaaatgttttcgatatttaactctataactgattattaaaaaaatggagataagatacgatgagaacaatatttgcagaatacaatccacacagaaacagcattgatgtttataccaatgccggttatatgctccgcattgactgttgggaagctgagaagaacttaaaaaccactcctgaatcagactgcgcattaaatacacttgctattgatgagccacttgaatatgcacgattatatcttgatggtaatatgcaaatgtgggtagatgcagaagattctttggaattgtaaaccacaagtagcctgtatgctttattttacatacaggctacttaatcaaaatcaccataattgatcaagcaagtttttttaatatacctcggagtcattttcgttcgatctttcatcgctaataaaatttctctgaagtgatagcagataacagattggcaggtttttctaaaaaataatctgcttttatgtgcttattatgactgccccatactgctaaagcaaaatcaattcccgcattttccgcacatttactgtcatatttactatctccgatataaagtactttcctatggtctgtttttgataattccacatatttcaaaatcggtgcggcattgggtttatgttcctgtgtatcgtctgcacatatgattgttttgaaataatgactgataccaaacggacaaaaatcatgtgtaaattcttcccttgtctttgatgtgacaatccccatttcataatccagacttagaagatttttcaataattcaacgattccgtcaaatactttaatgttatttgtatagttacgcatatttttatcccataattctatcgcataggaagtgtcttttatcgcaagttttttcaaagcgtctgttcctgtaatccctaacgcaaatcttagttcagaacatggtatctctctcccggacaatccctttatagtttcctgtaaagaatgtaatacagcatattccgtatcaatcagagtgccgtcaatgtcaaaaacgatatgcttatacttcatgctgccacctttccctgtctgtatcaaaataacgtatcaccctgcatggatttcctactgcaacacaattaggcgggatagggcgggtaactacacttccagcccctatcacgctgttttttcctatagtgactccgggcagaagaatacagccgccgccaatccagacattactttctatttctatcggacgtgcataggttctaaaaaatgttgtctgacgttccctccaatccggcacaaacctttcctgtggtaagacagggtgtgaagatgtataaatctgcacatttgacgcaatcaataccctgtcgccaattcggatagttttgttatccacaaaggtacaattcatattgacgatcacatcatttcccaaaaaaatattttttccatagtcgcaatgaaaaggcgtgtcgattgccacattttcccctattccgcccaacagctcccgaagaatggaagtgcgtttttctgtatctccataatcagaaaaataatatttccgtgttaattcccttgtgcgggcaatctgctttaacgtatcgctgtccgctgtttccaaaaaatcactggattcgtaatacacaatatccccccttaacgaaaactgttttccataacgcccggaagcagggcatagatagaacagccaatctgatcctcaaaccgttctttaatctctaaaatctttttccatctgtctattgtcgctgggtgaacgccgtatcgcattgtcacgtctacaaatctcttttccaaaagacagaaccccgaaggcatagccaatgcgtcacataactgtacaagacggtcataatcatcatataccgcatttgcaacaaattctttcataaacaggtaatcctcatcactgacatcaaactctccgatagatgtggcaatatcctgtatcataaatgcgtgggatatacatatttgtgcggcttttccccacccacgctccatacagtaacgatagccgtctatcagatgcctttccgaactcactccggcataacgtccaatatcgtgtaacagcccgaaaatatacgcctgttcagaagataaatctttacagtgtgacgcaatgtttttacaggcttcggctacataccgggaatgttctgcccatgctcccggattggattctgccgcttcccttaatgccagttctgcggtctgaatgttcaactccatttttaactcctttcaaaagggcggggctggaagataaactgtccagcccctttatgatgaaatatttacagataaatcagcaatccccggcatagtacgaaacaatgttcatatagtccgttggattcggaacttctaaaacaagccgcaaacagtttttgttttgggagtattgccgccacaaactgccctgtatcttttcttccccattgatgttttgttttttaccatccgggcagagcatatttactttgccggaacagctattgaccgtatctaaaaaatttttcatgttcagaatgttcagttttaccactttgcactcacctcctgtaaatgacggatttactttacaggtatcattataatgcaaaaggaatagaaaaaatatttcttttctgcccttatctatcactattctgccattttctccgatattctgtgggtgaacaatgtgtgtattctcgaaaaacctttccaaaataactgctactccccaaaccgcactcatggctgataacggtaactgcttcctgcccctttgctagcatctgacaggcagcttgcagacggtaagcctttatatactctacgggtgtcatgtgcagacagtcatggaacactctataacactccctttcgcttaggtatgctgctgccgcaagttccgggatagagattttctctctgtaatgttcgtgaatatatatcatcatcagctttattttatcgttgcttttattatgttccccctttttttcacgcataggacgggatagttcaaaaagcatgagccatatttctgttagggtttcccgcagttttatttcatatccaaattcatcactggataaacgaaatgaagcggcaagcagtttcaaaatcctttcttcttctgcattgcctggaaaaagcggaattacctcaatctgtggggctgttatgataggcgcaatatatttttgttcaatcctgcttccctgttccccggcaagtagggaaacatcgaaaatatgaagtagctgtatattcttttctttctgcgatattgcttttgtcatatggagtacattggaatttactatgccgccgcttccagccggaaacaacagttttcctcccggcgtatcatattcaatgctaccactttccatataaaaaagttccactgtcttgtgccagtgccacggtacataatgtccgatatacttgtcaagttctgcccttgaagcgatatagggaaaatctttttcaaaaccgggaagcagttcttccttgcttccagtataaaattcaatgctatggatatttttcatgtctgttcacctgcacatctgcgattttgtatctgctttatggattaaatatactagaatagctcggtaattgtcaatcaatcaaaacagattcatttggaagattataaaaaatagtgttaaaaatcaaagaacagtttgtagaggagaagagggataatgaaagataaaagtattttaattagtgagaggatttattgttgattttctaagcaaaaccgcttataatttgagacggaatatattgctattatccacagttacagagcaagtgttatcaatgccgataacaaaatgataacattagtccgtataggcaggataatatggataaatcaaataatcaaaagaactgcaaacacgacaacaaataatctctaaacaaaattgattagtaattgtcgagtatgaataatattgcgagaaaaaaagaggaagatgcacatttgttattttgagtcatctccctctttgatagtttagaggtgtggtgaggcgtaatgagaagccctgtgtttgtaacgtgtttgcaacaccacattccaagaatccagtaaaatcaagcgttctcagttacctaaacgttaattatacgtttcggaacgtacaatttcaaaaaagatttttcgactcctcaggacttcggtcttggggagtttttgatgtgaatttgtgtcagcattgatgaatgtcaccgggaaccccgggatgttttctgaaagcatatgaagaagtgaatggaaaaagattatattataaactatcgaattatgatagttatcgcggtgtatttgggcatgaatgtgtaaatgaattgattgtaagtcgagtaatggatattttgagaattccccatgtgaaatataaattgatacatgcgcagattatcatagatggaaaagaacaggaaacatggctttctgtttcggaaaactttcgtaaggataatgaagaaaagttggcatatgatttgtattatgatttgcaaaaagaaggaaatgaatctccgttagaatttgcaataagaaacaattgggaattatatatgtaccagatgttttgcattgattatttgattgccaatagagaccgtcatggaagcaatctggaagtgttaagaaatgatgaagacgatagtgtgagaatagctcctttgtttgatcagggagtatcgttattgttttcaacatatggtaatgaaaaacttctggaagaaacggacgtgatgagagattttccggttaataattatattggatcaaaatctttagagtataatctgtcattgataccaaaaggatacgatttacagatttggaaattaaaaaaagaagatcaggattatatttttagtggtataaagcatgttttatcggagggtcataggaataaaatatgggagatgatttggaaaaggtggtgtttttttgaacaggtacgcaatcaggagaaataatagaaataaaattgtcggaatattaaattatgatgagaaagcaaagaaatacacaattgagattccggaaaatgttacgccaaaggaagctccgtttatgatgtcgttacttttgaaaaaaggtatccgaaccatgaattcagattggagtatgcgttgggtacagagtagaatcattccaagtagcagacagaatataggggaaatacttcgtgtgaatggaatgcgttcatatgatgagcataaattactattaaaaaatgaggggcgaagttgtcaggatgaattttatattgaacatatgtagctttaaagtgtaatgcggagtaatgtgaagccttgtatttataatgtatttacagcaccaacatttgagaatctggtgaaattaagtatttccagttacttaaatgttaagggatgtacaatttcagaaggttataccagtgtgatggatctgtattcaagaaaaatcatttcctgggtgttgagtgagacgctggaggcatcccacgtagtggaatgtgttgaaaaagcaaacgtgtcagaaatgttgaaaaaccgttgatcttccacagaatcatcatcaggaactagaccttccaaatttaatggcaaaaccagttgataaggctcgccaaattcggtataatttttatggtattttatgtattttgtcatacttaattataccatggattgcggactcttcggagtccgttttttacttttaggcataaaaagggagctattgctccatagatgtttactcatctattttgcaacagcccctctcaattctttaaaaacagcatcatattcctgcgaaaagatactgtttttattccacagaaaggtgaagtcgtgcataatcatgaaatcagatagtgggatctgtactaacattccttcatttaattcttgttccactgcagatttatagagaaaagaaattccacaatcttcttttaacagagtgacgatcgtgtggatgttttcgatttccacaagatgtcggaagtctttgacagacatatttttcaatgccagtgttttggtcaggattgcccgggtaccagagccgtgttctcgaatcaggagacgttcagatgtcaggtctcggagattgtgtactggttttgaaaatgtgtgatgggcggaggaaacagcaatgtattcttctgttttgtagacacgtgtctcgtaatgatcaccgctaaaatatccttccacaattgcaaaatcgatcgttccttcgtgaagataggtgagaagggtctgcgtgttgccatatcggatgtgaaaatccatatccggatgtgttttgataaaacgggaaagagcaggtacgatcgcatattcgccaatggtcattgttacgccaaaggtcagaacttttttttcttctatactttcctgcatccgtttttttaacgtattttcatcatttctcatggtctccagagcagaacgtaagatttctccggcaggagttagtctgagctttttcttatctcttataaaaagttcggtaccgtaggtcttttccagatgtttaatatgctgggaaactgcgggctgtgtcagattcaggtgctcggcagcatgtgtaaagttcatatcgttgcatacagtcagaaatgtttccatgcgaaaatccaacataattgtt

SEQ ID NO: 6963 - DNA, 50519 bp, Unknown
  gut microbiota DNA sequence
gcagttctggatctgtccgcttttacaaagagacataaaacggtctccggtgcggccttcccggtagcaggcggtacagaagcttggaatgtagtccatctccatcagccagcgtacgacttcatccagtgtgcgggtgtcactgacgtcaaactgttctgattttgcgtcatccggctccggctcacagtaaccgccaacgctggtacgggagccgccgctgatctgggaaacgcccagatgcaggacacgttctctgcatttctggctctccctcgtggagatgatcatgccggtatagggaacggcgatccggatacaggctacgatcttcgcaaaggtatcatcgtcaataccgttgtcaaactcatctgcattgatatcgtccgcatgccggagtctcggtacgctgatcgtgtgcggtccgacgccgaatgcagcttccagatgttctgcgtgcatgagaagacctgcaaattcatagcggtatttgtccagtccaaataaaacgccgatccctacatcatcaatgccgccttccatggcacggtccatagcctcggtgtgatagttgtagtcgtgttttggtcctgttggatgaagtgcaaggtaactttccttgtggtaggtttcctgaaagaggatgtacgttccgattccggcttctttgagcagacggtagttgtccacggtagtggcggcaatatttatgtttacccgtctgatggcgccgtttttatgtttgatgctgtaaatcgttttgatactctccagatagtagtccatcgtgttgcgcacgggatcttccccggcctccagtgcaagccgtttatgtcccatatcctgcagtgcgatgacttctttccggatctcttcctgagtcagctgttttcgtgcaatatgtttgtttttcagatggtacgggcaataggtacagccgttcacacagtagttggaaaggtagagaggcgcaaacatgacgatccggtttccgtagaaatcctttttgatctgttccgccagccggtagatttcctgattcttctcttcgatcggacaggcgagaagaacggatgcttcccggtgggaaagtccttttcttaaacgggctttttcaagaatggagtcaatgagggcttcgttggtcttgttctcatcggcgtaggcaagggtttccagaatttcttcgtggctgataaaatcatcagcatgttttgagtgtacatcatacataagtaatccctccaatttgtaaaataaaaagcaaaaaacaaagttgttacggggtgatattcagagaatctccccgggcggtcaccacctgatagccgatggactgcatgtgttgttccaattcccttcggcattcggcagcttctgcatccgtgctgatcttgttgtcatacagcagatagtctccccgcacacgtttcggggacaggtttggcatgaccacattggcaccggataaaatgccaagctcccgtccgttttcggcaatggttccaagtgctgtggttgccggaagcagcacgcctggaagcatcagacggatgagtcccaaaaggaataaagtcagctccagtgttcctgctttctgcccggcaaacggggtgtcatggtgtggaataaatgggccgatcccgaccatctgaggattcagctctttgagaaacaacagatcttctgccagatgttcgctcgtctgccagggagatcctaccataaatccggttcccacctgatatccgatttcttttaaatcccagaggcattgctgtctgtgggcagcagaaagctgtgccggatgcagcttctgatagtgctcggtgttgtaagtttcatggcgcagaagaaaacggttggctccggcatcaaaaagctgctggtactcttcctttgtggcctctccagtggaaagggtgatcgcgcagtccgggtaagtggtccggattgtatgcaccacatcagataaccgggcggttgtataataggggtcttcaccgccctgcaggacgaaagtccgaaatccgagctcatatccggtttcacagcaggagaggatctcttcttttgtcagccggtagcggtgtacgtgtgtgttcccgcttcgaatcccgcagtaatagcagttatttctgcagtagtttgtaaattcaatgagtccccggatatagacatcatgtccgtagaattgaatccgcgcgcgtcgtgatttttcaaacagatatgcggcaagccggggggtgtacccatcaagcagctgctgccattcggaagcataaagagtatgctccgcttccagtttgtcaatgaaggtataaagacatggatccatcatttctggctcctttctgtaaaaaatttctgtattttttcattatagcacaattttaaagttactgttcacaccggatgttaaatataggttctgaaccgtcatgcttgcatgtaagggaaagaatctatatttaacatccggtgtgaacagtaacattttgaaaatacagggttattgtttagcagaggaaatattgacagagaacaggcggtgtgataagttggacacagaaatatcagaaagtggtgatagaatgtctgaggtaagaaaacattttgtttttcgtggaaaggtgcagggcgtaggattccgctacactgcaaaatatcttgcgttgtcactgggacttaccggatgggcgagaaatgagtgggacggcactgtgacaatggaagtacagggacgggaaacgctgatcaacaagcttctggtgggactgaatcagaatcagtttatctccatcgagtggatcgatacaagagagattccactggaggaagagaaggcattttctgtgaaatgaaggaaagaagaacttggtttatagaatgaacaggaggagcatcatgaaattaggatttatcggaacaggaaatatggcaggagccatcatgggtggtattatcagaaacggagtgctgaagccggaagaaatcatcggttcggatattttggaagcagggagggaaaaggtacattctctttatggaatctgtgtgacagatgacaacagggaggcggcaaaggcagagatcgtggttctttctgtaaaacctcagtattatgaacagacgatcgcacagatcagagatgagatcacggatgagcaggtaattgtcacccttgctccgggaaaaactctggaatggctgcaggggcagtttggaaaagatgtcaagatcgtgcgcaccatgccgaatacaccggcaatggtcggtgcagggatgacggcagcgtgtgcaaatgctctggttacaaaagaagagttggaaaaagtgctgacaatcctgcgctctttcggagaggtagaagtcgtatcagagcatctgatcgatgcagttgtgtctgcaagcggaagttctccggcatatgtatttatgatgatcgaagcaatggcagatgcggcagtggcagatggaatgccaagacctcaggcgtataagtttgccgctcaggccgtgatgggaagcgccaagatggtcctggagaccggaaaacatccgggtgaactcaaagacatggtatgttctcctgcgggaacaacgatcgaagcagtgcaggtactggaagagcgcggttttcgaagtgctattatcgaggcaatgcgtgtgtgtgcggaaaaatccagaaatatgtagagtaaagtgacaggcatgagggggaaacggcgatggagattcatggaattcagaaaatgacactgttagattatccggaaaaagtggcgtgtacgatttttacggcaagatgtaatttccgctgtccgttctgtcataatgcttctctggtgacacatgtagatgcggcggcagcaatttccgaggaggaagtgttttcattccttgcgaaacggcaggggattctggatggtgtgtgcattaccggaggcgagcctctgcttcagccggatatcgaagagtttatccggaaagtgaaagagctcggttatcaggtcaagctggataccaacggcagcaatgtattgcgtctgagacggctggtggaacaggggcttgtggactatgtagcaatggatatcaaaaatgctccggataagtatggtatgactattggaattgaagaatatgatatgtccaatatttttcagagtgtggattttctgatgtccggggatgttccctatgaatttcgcaccacggttgtgcggcagttccataaaagggaagattttgctgctatcgggcgatggatcaagggggcaaaacaatattatctgcagagctttgtagattccggagatttgatctgccccggaatgaaggggtatacaaaagagattatggaacaggcgctggaaattgtgaagaggaacattccaaatgcgaagttaaggggtgtgtgaatacaaaagacattgtaaatatgattggtacaatggatattagcggaaacgggagaaaagtttagtgaaaacaaaaaaatatagatttttttctattattatagttgctgtgtttttagtaaccttgtatagggaatatgatacttccgaacttcagacattacttacctgttcaaatacaagacgcatgcaaacgaaagttgttgagaataaagaatattctcaatatctcacaaattatgctccaacagaattgggaattgccccggaacaattaatttacttagagcctgcacttgctgggttaccaacttatagtctacacgggaaaaatgtggcaaaagaagatgcaatttcagatgttaaattcctttttcaagttttaaaacactcttatgcgggatatttgtattttggtgattttgaaaaatgggaaaatgtgagaaataatatgataaatcaaatcaatgcatatcccgatgaattgccagttttcacattacagcagatactaatgagcaatttgcaatttatacaagatggtcattttttgattaatggctcatctataatagagcgtgatatttattattataacgaagcatttaaaattcaggaagattcgaaggggttttatctgtatttaaataggcataaatggtatatagaatctgtgcaagatgataaagatgtgaaacaatacgtaaagtcatcattggatcaatcaggtcatatgtgtaaatacataggaatattgtctggaacaccatatactgcagtgactttaaaactaaattctggagtggagttcaaagaaattagagttgaattaaaggcaagtcaggggaaagtatatagtcaaaagaaatcttctaagggctacaattacagaaaaataaacaatatacctgtttttacaatgaattctttcataggtactgataatcttgaaacttataaaaaggctgccagacaggcaaagaatgaagaatttataattttagatttgagaggaaattccggtgggcagacagtcatcccaacaacatggtttgaaaattttacggggcagattgccaaaacaaatagcgtgaccatacgattggcgagtttgatcaataattatgtaacaaaatcagcgcttgaaatggttgattatgaaagccttacgcctcattttaaggatttgtataaatcagaatatgatcttagcagccgttcagaaaataaatggtatgttacgactgaaaataaagtcgttcttcctaatgatacgaagatctttgtattgattgacaaaaatgtagcgtcttctgcagaagcatttgttgaggaattagatacgctgaaaaatgttgtttttgttggaacgaatacatcaggggttgtgttttcaaaacaaagcatacgttgtacactgccgtattctcaattagcagttacttatggagatgcgatatcttttggcggcattacagagggaaagggatttgaaccagatatatggatcggtggcaatgatgttttggaacgagtggtagattttattgaaagaaatgaaggaacatgaaaatatctggtataatacaggaatgtgcagagaagaaagattgcaactcatacgtggaaatatcggagaaaaaatgttagaaaagcctgaaaattcaagaaaatagacggtttcatgcagggaggatgtgactcaaaacgggtcataccctccctgtattttattgttcatgtataaaagagcaaaatcatgtaataatcagccactgtttcttagtataatttcctcaaaaagtgttacgtttctattttttttattattttagaaaattccatatttttctataatacagatatcaaaaacagagacgaataaaaagggaggaaacgataatgaagaaaaagagaatgctggcacttcttttgacagtagcaatggcaggaacgatgcttgcaggatgcggcaaatccgatggcaaggaagatgaaaaaggaaaaaatcaggcaaagagtgaagggaaagtgtactatctgaacttcaagccggagcaggcagatgactgggtaaaacttgcagagacttacacagatgagactggtgttcaggtggatgtgcagacagctgcttccgggacgtatgaatcccagctgaaatctgagatggcaaaagaagaggcgccgaccctgtttcaggtcaatggtcctgtcggtctggcatcctggaaagattactgttatgacctgtcagacagtcagatttacaaggatatttccagtgacgattatgtgttaaaagaaggagatgaagtcaaaggaattgcgtatgtagtagaaacatacggaattatttataacaaagcgatcctgaatcaatactttgaactttcagatgctgctgtaaaatcagtggatgagatcaataattttgaaacgctgaaaaaagttgcggacggaatccagaaacacaaagatgaattgggggtaaaaggtgcatttacatccgcaggtatggattcttcttctgactggagatttaagacacatctggcaaatcttccaatctattatgaatataaagatgagggcattacatccacagatgcgattaaaggaacctatctggaaaactataagaacatatgggatttatatattacagattctacctgtgaaccgtctatgatctcctctaagacggcagaggacgcaagctccgaatttgcacttggagaggctgtattttatcagaatggaacctgggcatacaacgacatcaaggatatggaagttgccgatgaggacatgggaatgcttccgatttacatcggtgccaaaggagaagaagagcagggactttgcacgggatctgagaactactggtgtgtgaataaaaatgcttcagaagaagacattcaggcaactctggatttcctgcagtgggttgtggaaagtgatgagggacgcgatatgcttgcaaatacgatgggatttgtgacaccgttcaccacatttgaagactatctgccgtcaaatcctctggtgcaggcaaatgaggaatataacaaggcaggcaagacacctgtaagctggaactttacgacaatgccttctgaaaactggaaaaacaatgtaggctctgcacttcttgaatatgcacagggaactggaaaatgggatgcagtggaaactgcatttgtagatggatgggcaactgagtatcaggcagcgcatgcggaataaaaacatagatttgaggcggacggcaaaccgtccgccttttccatcaagaggaaggagagagggacatgcaaaaagcaataaaacgatatttccctgtttttgtactgcccacgatgatcgcatttaccattgggtttatcgcgccgtttttactgggtatttatctttcgttctgtaaatttacaaccgtgacagacgccagatttatcgggcttgagaattatggaaaggtatttcaggatcctacatttttacactctctgtggtataccgtgctgtttacagtactttccatgttattgatcaatgtactggcatttgcggtggcgttggtattgacaaaaccagtacgcgggaaaaatatttttcggactgtattttttatgccgaatttgatcggtggaattattctgggatatatctggcagcttctgttaaacggagtgcttgcacattggggaaaaacacttacatattccgggacctacgggttgatgggaatgatcattctggtgtgctggcaacagattggatatatgatgatcatctacatttccggcattcagaatattcccggagagctgatcgaagcggcgaagattgatggagccaactcctggcaggtacttcgcaaggtcattattccgatggtgatgccgtcgatcacgatttgtacatttttaacgttaacaaacggtttcaagttatttgaccagaacctggcactgaccaatggtgcaccttcgaaaatgtcagaacttctggcgctcaatatcttcaatacgttctatggaagagccggttatgaaggtgttggtcaggcgaaggcagtaatcttctttctgatcgttggtctggttgccgtgattcagaatcgcatgacaagatcaaaggaggtgcagcagtagtgaataaaaaattaaaacatggctggctggttacgctgattttttctgttatcagcctgctgtacttatatccgatcattcttgttgtgatcaactcattcaagaaaaaagcatacatcagccgggtgccatttgatctgccaaaagacaatatgtttgtaggattggaaaattatatccgcggaatcgagcagacaaagttttttgaggcatttagctggagtctgtttatcaccgtgggcggagttgcagtcattatcctgtgctgttccatgtgtgcatggtttatcagccgggtgaatacatggtggacaaaactgatctatatgctttgtctgtttgccatggtggtgccgtttcagatggaaatgtacactttgtccaagattgcaaatatgctcagactcaatactccatgggggctgatcttcatctatctggggtttggtgccgggctggcggtgtttatgtttaccggatttatgaagtcgattccattggagatcgaagaggcggcaatgattgatggatgcactccaatccagacttttttcaaggtggtcctgccaatctcaaaaccgacttgcattacggtaatgattctgcaggcaatgtggatctggaatgattatctgcttccgtctctggtgctggatacgaagaaataccggacgattccgatcgcagtacagtatttaaaaggtggatatggatctgtggatatgggagccatgatgggagcgctggtactttctatcatcccgattgtaatcttttatctgtgctgccaaaaacatattatagaaggtgtcgtggcaggagctgtgaagggataaggcttgtaagaaaaaagggaatggattaaaataaagaggacagatcaataaaaaatctgccatgcagccaacagaggggcatggcggattttttggcatgtatcagaggggggacggacatgatcacgatattgattgcagatgacgaaaaactggagagaaacgggatcaagtttctgctgaaacgagagcaggaagaactggagattttagaggcaataaacgggaaagatgcagcggggattttgcagaaaaaacaggtggatattttgttttcggatatcaaaatgccttatatgacagggctcgaactggcgaaagctgcacgggagttgcagccggagatcgagatagtgatttttagcggatacaatgatttttcttatgcgaaggaggcgctgcattacggagtagtcgattatgtgctaaagccggtagatccgggagagtttcataagacgtattgttctgtgagagatcatattctggagaagaatacgcagaaaggagaaattgcaaggcagcaggatgatctgggaaaatattttctgcagaattttttgtatgacggcaaagaagaaaacgggacaaaagctgcggagcttttatgtcaggatggagggcagtatactcatatgatcctggcaggcggcgaggactgcttttttgaagtggatgaagaaaagcttttgggtcagctcagagagcacatgtcccgtcagttcctttatctgaatgtggcagcaaatgagtccttatttctgtttcaggaaagatatgcagattatgagacagtggcaaaagagttatatcagttttttaagaataagtacgatgaggagtgctatttggcagtaagtgaagaaattacagactggcaggaacttcctgaagtattttccggtttagaggaggtactggcagaaaaattttatcagcccaggcagaagattttctttgcaggggaagtgcaggagaccagagaaatggatgaggcagaagaatctcaggtcctgaataatatcaaagaggacattcaatataaagacagtatccatctacggcaggattttcagaagctggagagaaaatatagagaaagtatgaaattttcagagatgtatgtgaaatttgtattttctaatattgtcaaagatatttatgaggagatcaatccaggagatgtgaaagcattgtcaaaaatgatcgacaggctgtaccgctgcaggaaaattgaagatgtactggcaattacagaacaggtagtctgtgaactggagaaatttgtacaggagcagaacaaaggatttcggaatgaagttatgaaagtgaaacagtacattcaccatcattatgcagaaaatctcaatgtagagaatctggcaaggcaagtctatctctccccgggatatttaagtgttgtattcaaggaggagaccggagtcaatctgaaccgttatgtccgggatatccggatgaagaaatccagggagcttctggaaaataccagtatgaagatctcgcagatcgcaaaagaggttggattttccaataattcttatttctgcaggagcttccgggagtattttggcagcacaccggagtattgcaggaaagggagtatgagtgatgaagaagcttctttatcggttccataattttaaatatcgatataagctgatgatcctgattttgatcgctgggatcattccgacactgatcgtgacatgctatatgcagatgggaatgatgaacacgctcaaggagcgggaaatggaaaatatgcaggagtctttaaaacaggcagtcgatgcaatagacaatcaggcgcagatttatgaaaatctgattgattatctgtcttattcgggagacctcaggaaagtgctgaaaatggaacgtgcatcagattttaatacatatctgaagtatactcaggtgtcagatccgttgttgaatatgccgcaggtgtatcacaaagaaattaaagggatcacgctgtatgcggataatattcaggttgcccatggaagtacactggctcctttgtcggagattcagggagaaaactggtatcccagaaacaacagaagtctgattcgctggtatgtacagactggaagtcagaataaagtgattgtagcccgaaagttttatgacgggagcagtgagataaatgctgtgctgaagatcacactggattataataaattgttcgaaccgtttgaaaaaatcatggaatctgattttgccggaattgtctgggatgaaaacggcaatgtcgtgtattcctgcaataaaattcccgctaaatatgagaccgggaaggtggatacaatttcggaagtacagaaaagtttttccagtgtgacaaaggagatggaagggaatcagtggaaattctgttatttttgtcctacggatacgattatggaatcggcaagatatttgatgttgaaaaatctgccgcttctgacagcctgtattctgctgataggaatcttaagctatttcttttccagacgtctggtctgtaagctggaacagctgacggaaaatatgaatcagatccacagtggaatccgggaagtgaccgtacaaagtgattccaaagatgagattggtgtgctcattcgtactttccggcgtatgatgaatgagatcaataaactgatctcagaagtatatgaagcgaaaattgtgttacaaaggacagagatgagggcattgcaggcgcagatcaatccccatttcctgtacaattcactctcaattatcaactggaaggcaatcgaagcagatgaacaggagatcagtaaggtgacactggcattgtctacctattatcggaccagtctgaaccggggggagacaatgacgacagtagtaagcgagatggagaatatccgtgcatacctgaaaatccagctgattatgcacgataatagtttccgggtggaggaagtttatgataatacaatgggaagttgtgagatcccgaaactcattttgcagccattggtggaaaatgcgatcgatcacgggctggatgtgtcggaaaagattgaaaaagtattgcggataaaggttgtgcaggatgagctgtttttatattttatggtggaagataacggaaacggaatgacagaggaaaaagcgagtcaaatcgtgacatatcgatccaaagggtatggtgtgcgcaatgtcaatgaacggatcgtgcttctctatggagaagaaaataaaatccgggtggagagtaaagaaggagaaggaaccagagtatgcatacggattccaaagaagaaggagaacggacatgagaaacaggaaacaaaaaattaaatacatactactgttatgtgtgttctcgatgttcctgatcgcttcctgcaaaagatcggaaaccggtaagacggtggaatcgaaagaagtgataaacgcacagtgggaaaatgcagcacacacaccgtatgggaaatatcccgagcttgttacttatacactggggaaaatcgttggatctaataatgcaaacctgcctgtgaaggcgacttatgaggataatgcctacacacgatacttgaaagaacggttaaatattcaaaacgaagatgttctggaaggggaaaattccgattcttatgaggaggccgttcagattttgatggaagatcagcagctgccggatctgttggtggtaaaaggcagggagacagtcaaagaactggtcaggcgtgggatggtcgaagatcttaccacagtatatgaagaatgtaccacagaaaggatcaaggaaatgtatcaaagctacggagaagcacttctggaatcggctacatttgacggcagactctacgcacttccggatgcagaggtagatcatggagcttctcttttgtggctgcgcaaggactggatggaacggttgggactttccgatcctgtaacgctggaggaagggatggagattatccggcagtttgtgaaagctgatatggcaggaaatcaagagacggtggggttggcaggaagtacggatttggtttctgaaaacagcggaacctatgggctggatgctgtttttgaccagtatcatgcaaaaccgagccagtggattttgaacgatcaggggaatgtggtgtatggttctgtgacagaagagacaaaacaggcgctgatctatctgcatcagctttatgtagaaggaattctggactccaactttctgctgcggcagcaggaaaatctggatacacttcttaaagaaggaaagtgcggggctattttcggatactggtgggcaccgaacaatccactgagtttatcttatagtgcggacagaactgcaaaatggcagccgtatctgctgactggaaatgcagcgaccaggacacgtacatttcaatcctatgaagactgtctgtatgtggtggtaagaaagggatatgagcatccggagatcgtggggaaatatgtgagtacactgtttgattatggtcgttttgaagatcagaagcagtccgatgaaatcaatgaatatttttctttgaatgtggatccgacagcaagaccgttgaatatcaatgtagactactgggatgcgatctacagagtgcagcaaaatatacaggatgttctggatggaaaaacgcagcagagcaaattgaacggattagaagctgcttattataaaatctgtaagtcattccttacaggagatgtgaccacgtcgaatgcatgggcagcatacacttcccggatacaggcaacgggacttttgacgaaagagaatctggatgaaaatcaaccgcctctttcgttaggcagtcagaaaatcaaaatcccggaagaattgctggaagaagagaagaatacatttctgcagatcatagtgggagaaaagccgcctgaatattttgatacgttcgtaaagaagtggtatgaaaacggcggaaaagcgctcacacagcaggcggatgactcttataaagaaacgatgaaatagttataaacgccaatatctagtttttgaaggaaaacctgcatactagatgttggtgtttttcattgacattcaaaaatgtgggtgatacactaaatacagcgtttagctgcagaaaggagaggtacgaaacatgtatcaagtcacaaaaagggacggggaaataacagaatttaatctgaccaagatcagcgaggcgatacgaaaagcgtttgaagccagagaaaaagagtataatcaggatattattgatctgttggcactgaaagtgactgcagattttgaaccgaagataaaagaacataaaattgcagtggaggacattcaggacagtgtagagtctgttctgatcaaagcaggatacgcagatgttgcgaagggatatatcctgtaccgcaagcagagagaaaaaatccgaaatctgaattctacacttttggattacaaagagattgtagacagttatgtgaaggtgacagactggcgtgtcaaggagaattctaccgtgacatattctgtcggaggtctgatcttaagcaactccggtgcgatcacagccaattactggctgtcagaaatttacgatgaggagattggaaaagcacacaagaatgcggatattcatatccacgatctttctatgctgaccggatattgtgcaggctggtctttaaaacagctgatacaggaaggtctgggaggtgtgacgggcaggatcacatctgctccggcgaagcatttgagtgttctttgcaatcagatggtgaattttctgggaatcatgcagaatgagtgggcaggagcacaggcattttcatcgtttgatacctaccttgcaccatttgtaaaagcagaccatctgacatatcgggaagtgaaaaaatgcatcgaatctttcattttcggggtgaacattccgtccagatggggaacacaggcgccgttttcgaatatcacactggactggactgttccaaatgacctcgccaatctgccggcgatcgtgggcgggaaagaacaggactttacatatggtgattgtaaagaagagatggatatgatcaaccgggcatttattgagacgatgatcgagggagatgcacagggaagaggattccagtatccgatcccgacgtattccatcacgaaagatttcgactggtcggatacggagaacaaccgtctgttatttgagatgaccgcaaaatacggaacaccgtatttttccaattatatcaacagtgatatggagccaagcgacgtgcgcagtatgtgctgccgtctgcgtctggatctgcgggaactgcgcaagaaatccggtggatttttcggaagcggagagagcacaggttccgttggtgttgtgacgatcaatatgccgagaattgcatatttatcgaaaaatgaggaagaattttacgagagacttgataaaatgatggatattgccgcaagatcacttcatatcaaacgagtggtgatttccaggcttctggatgaagggctgtatccgtatacaaagagatacctgggaagttttgataaccatttctctacaatcgggctcatcggaatgaatgaggcaggactgaatgcaaaatggatccgtaaagatctgacgcatccggaaacgcagaagtttacaaaagatgttctgaatcacatgagagagcggctgtccgactatcaggaagaatatggtgatctgtataacctggaggcaactccggcagaatctaccacataccgcctggcaaaacatgatgtggagcagttcccggatatcattacagcagcagaggactgtggaacaccatattacacaaacagctctcatctgccggttggctatacggaggatgtatttgccgcactggatattcaggatgagctgcagacgctgtatacatcaggaacggtattccatacattcctgggagaaaaacttccggactggaagtcagcggcagctctggtcagaaaaatcgcagagaattataagctgccgtattatacaatgtctccaacatattctatctgtaagaatcatggatacatttccggagagcagtatacttgtccgatttgtggagaagaaacagaggtatacagcagaattaccggttattatcgtccggtcaagaactggaatgatggaaaactgcaggaatttaaggaacgaaaagtgtatgatgtagaacactctcacgtgaagcaggagaatttcagggagacagaacaggaagaagaacagcgtattttcgaagaggtgaatacagaggaaggaaaagtacttctttttacaacgaagacctgtccgaactgtaagcttgcaaaagattccctggaaaaagccaatatttcttatgaagtagttgatgcgggagaaaatgaagaactggttagaaaatatggcgtcatgcaggcgccgacactgatcgtgatcaaagaagaaggtgtacagaaacttgcaaatgcgtccaatatccgggcatttgcagaaaaacgatagaaaaatagaaaacggaggaactcgatatgtatgatattggaattatcggaggggggacagcaggtctgacagcagctatctatggacagcgtgcaggaaaacggactctggtgatcgaaggactgaattttggaggacagattgtaaattcaccgaaagtagagaattatccgggattggagagtatcagcggaagtcagtattctatgaatctgctgaatcaggcgatgaagctgggagcagagactgcttccgagcgtgtaaaagaagtacgtgaggaagacgggatcaaaatcatcgtgacagaccagaaagaatatccatgtaaaacagtcgtgattgcaacaggagtatctcacagacatctggggatcccacaggaggaagcactggcaggatccggagtttcttactgtgcaacctgtgacggtgcatttttccgcgggaaagatgtagcggtgatcggtggaggaaatacggctctgcaggatgcagagtttctttccaactactgcaataaagtttacgttgtacatcgccgggatgaattccgtggggaaagcaatctggtagacgtactgaaagaaaaagacaatgtagagtttgttttggattccatagtcaaagatattgaaggcaaattcatggtagaaagattgttcctgcgtaataaaaagacaggagaagacttccatattccggtatccggtgtttttgtagcaatcggtcagattccgcagaatgaaatctttgacggtctggtacgcctggatgaaaatggatttattctggcatctgaggactgtatgacatctcatccgggaatctttgcagccggggactgccggacaaaagaagtgcgtcagctgacaactgcagcggcagatggaagtgtggcggcattggcggcttgtaagtatctgtcaatgaatttttaaggtaattaagaaaatcaaaataaaaccaaaatattgccaaaatgatcatgcagagaacaggctcccactttctttgtatggtcatttttttgtatctttttcgcaaactcacaatttcttgcattttaaaagatattattataaaataactatatgtgtttccgtggatgagcaagaaatggagtattcttaaattttatatccaacggagcaggatgatatcgggggaaagaaactatgagtgagaattataaacagcgttcgatcctggagattatgaatgacgtgctcggtacgatacgcgattactacgattcagaatatgtgtattatatcgagagagatgaagaagagattcttacaatctatgagtggtgtgctgaattcgtgccgtggcagcgggataagatcaagatgcttgataaagaacagtggccgcggtggatccgacaggatatcacggatacgacagaagcagactacagtgtttctcagccattggaagatggaattacggcagttcttgcagcggtaggggtacacagaggcggatgtgagatttcttttatgaggtctctccttccatatatttcacagtctattcttttgcagaagatgcagaagcagcaggaatatctgagttatcatgatgatctgactggtttgatgaaccggaacagcttcgtcagatatatgtcggacgtacagaaaaaagagcacaaatcactgggagcagtatctgtggacatcaatggattgaagaactttaaccgggaatttggacatgaatatggggatgaggttgtaatccgtgtaggtgaagtgctggaggagcatttccgcagctctctggtgttccgaatgaccggagatgagtatctggtagcggtagaggatgcgacatatgatacatttatcaagagcgtgaacgatgcacatcataaactggacaatatcagtcttggactggtatctgtcggttatgcctgggagaaagtggatattgatgcagaaaagctgatcggccgcgcagaaggtatgatgcgtgaagagaagcagaagtattataagaatttgaaaaaggggcatcatgagcctatcatcaaacaggatctgctcagcgatatagagaatggcaattttattgtctgtctggttccgaaagtggatgtagatactgaggaagtagtcggagcagaagcagtggtacgctatcaccacaaagatctgggtattatgaatccgggaaaatatctgacacttctggaagagaccaagctgtctcattatctggatctgtatgtgtttgaagaagtatgtaagacgctgcgcagatgggagacggaagatttgccgatgatcccaatcgctgtaaattttgcgggagcaacgctcagacagatagatgtagcagaaaaaatgacagctctgatcgagaagtatcatgtgtcctgtgagtatctggaagtagaagtttcagagtcttacagtgatatgaatcaggagatgcttgcagagacgagtaataagattcgaaagagcaatgtgcgggtgattttggaccacttcggagcaaaagaatccacagtagcgattctgacgatcatggaatttgacggattgaagatagataaaagtatcgtgaccaatattgtaggcaacggccgaagccagagtgtggcaaaagcagtaacagatgcctgctgtcagctgggagtaccggtttcagcaagtggtgtggagacaagagaccagctgaatgtattgaaagaacttggctgcagctgtgtacagggaagcctgtttaacaagccgatcacgattgatacatttgaagtccgttacctgaaaggataaaagtatgatacgtacctggcttgcagatatcagagcactgtatgatgaggaatgttatcagaaatattttgcagcacttcctgcgtttcgacaagagaaagcaaggaagctgttgtttcagaaagacagggctcagagtgcaggggcatggcttttattggaggagatcagaaagcggtacaaaatttccgaccgggcagtttacaatctttcgcattccggggattatgtgctgtgctcgatcgacactgatgcaagagagggcgtacagcttggatgtgatattgagaaagtccaaaaggccagaatggagttagcaaaacgttttttttgccgcagtgaatatgaagatattttcagatgtgattcaaaagaggcaagagcggaaaagttctgcagatactgggtactaaaagaaagtttcatgaaagcgaccagaaagggaatggcactgaagatgtcatcgtttgagatcctgctttcgaatccacccaggctgataaaaaagccggaggagtttgaagagacatattattattgtgagtaccctctggaaggatttccttatcgaatcgcagtctgttcgaacgattcagagttagattctagaatacaaatggagttaaaagaaatatggcaagagtaaatcgaaaagcgaaaaaaatactgatcacagggatgatccttggagcggcagcagggattttgctcacatttctggcagcaaacagcaagatgcatgacaaaaatgatgagatcaaaactgtcaaggcaaagtatgaaaaagaagcgaaatctttgaagaagcagctgaaggaagcaaagaatgagcaaaaagaagtaaacctgcagtcaaatgaatggaatctgctcctggtgaacagttcttatccgcttgcagcagactattcaccggaattgacggctgtagatgatgaagatcataaagtagactcccggattgtagagtctgtaaataaaatgcttcaggatgcgaaaacagcggggatgaatctgaagatcatttcagcataccgttcgtatgatgatcagaagaatgtgttcaatgataccatgcagtcatggctcagtcagggatattcgtatttagattcttacgatgagacgaaaaagtctgtagcagttccgggaacaagtgaacatgcaacggggcttgcactggatatcacatctgagtcgaaccagacactggatgagacacaggcacagacgcaagagcagcagtggctgatgaagaactgccagaattatggatttattctgcgttatccgaaggataagacagatataacccagtatatttatgagccgtggcattaccgctatgtgggagaagaggctgcaaaggcgatcatggaaaaaggaattacgctggaagaatatctggcacagatacaaaaataagcaggaagagtttttatttcgcaagccgggatagaaactcttttctttctatagcggaaaaacaggctttgcgattgacgcataaaatgggatttgctacaatgagagaagttgggtgacgggaaataaaaacatttcctgtctgatgtaaaaatccgagaaggaggaagagcatggaagatcttacatttggagaacaggtcaaggtagtattgagccgaaaaggcatgaccataaaggaacttgcggagattatagaagaaaagaccggaatgaaaatgtccagacagaatctgacgcagagactgggaagagacaattttcaggagcaggatatgcggatgatcgcgtcgatcttagactgtccgtttcagctgagtattttaggcggagaatctgctgaactgacgcctgcggatctgcgtaccgtagaagagatgcgcagaaaagaaggaaaattagaggatggagagccgacacttgaagagatgcagatagagcttccgctggaagagttaaagccacatgaggaagaagagaatcaggagcgtaccatcgaggagatcgcaaaggatattccgatttcttccgtgatgaagcgggcggaagaagaggatgcaaaacgagaagatctgtctgtgggtgatatcaatccatatacaggtcatgagtaccagtccaacagtgtcagaatgcatccgagccggatcggatatgttcaggtatacgacagaaggactcataagtggaaagatatgacagagtgggcatttcttggagagcaggagagaaagaaagcgatgcttggaagggagtatgtgccgccggtttatctggattaaaaggaggctgtctatggagtggaagaccttattatctgaaaagcggatgcggggatccggaaagaaacagaatgcgaaaaaatcggatttccgcagtgagtttgaaaaggactatcatcggatcataggaagtgcgtcatttcggagactgcaggataagacgcaggtatttcctctggatcagagcgattttgtacggacaagactgacgcattctctggaagtgtcttctcttgccaagtcgctgggacagaatatcggtgaagcaatcctggagcgtggagcggatcaaaagtttacccggaagatgaaggaggatatttctcatattctggaatgtgccgggctgatccatgatatcggcaatccgccgttcgggcatttcggggagctggcgatccgggactggtttgtgcggaagcttcccgaactgcattataagagacagactctggatatgatattgagtccgcagatgaaagaggacttctatcattttgagggaaatgcacaggcactccgactggtaacgagacttcattatctggtggatgagtacgggatgaatctgacctatgcactgctcaatacgattataaaatatccggtttcgtccacacaggtccatccggattccgggaatatcagagaaaagaagatgggatattttctggcagatgagaagatatttgaggagatcacgcaggagacgaagacagggaactgccgtcatcctctgacctatattcttgaggctgcggatgatctggcttataagacggcagatatcgaagatgcatttgtaaaaggatttctgtcgtatcatgcgtttaaagaagaactcgtatgtctgaatgagcaatatccagattccgggtttgacggagttttaaagctgaaagaactgtatcagagaggtcaggaaaagggtgttcaaaatccggaggcttatgccatcaagaactggatcattcgcgcgcagggatttctgatcgactgtgcgacaaaaggatttatgaaccactatgaagaaatcatggcagggacgtttcaaagagatctctttcacggtacctttggagaaaaactgatggaatgtctcggcaatatcgcataccggtatgtattctcttccagagaaatttaccggatggaagtcaaagaagcagtgatcctggactttttgatggatcgtatgatccaggctgtgttgtactatgataccgacagggagttaaatgccattgacagccgggtattgtcatttatttcagataactataaaaaggcttacagttatcaggcagaaggaaagagcgaggcagagaagctgtatctccgcctgcttctggtgacagactatgtctgtgggatgacagacagctatgcaaagcgcctgtatcaggatatgaacgggattatttaagacagcggcaccagtagccgaagtctttatccgtgctgcattcgtcttcggagagcgccagtttttgatggtattctctcgtaaactgaggaaatccgaataactcggcagcatgtgcttcacggggagaataaataccgggaacaccaagccactgatgtccgtcttcttccagtaaaagaagatgatggtagttgtggtatccatgcagcagaaagctgttgttggcaagccgccagaatggtttttgcagggaggagagatcttcataactgagtttgcgtatgcgggaagtcggttcgcaaggttgtgcggtttcttctggcggctcgcacattttttcttctgcaaggacagatggggtttcaggttctggagccggtatagattctgattccgagtccggctcctggcagggggcgggttccatccagtcagtcagaaggtttacagaaaatggccggttgcctgtagaagcggcgaaatatctgccgtctgcggtttgcagaagaaaaccatggagcttcgctaatgtcagattcggtggaaagtcagcttctgaaagtgtgacacgacaggatacacactgattttgtgtgggaagctctgccacagtttttttccggggtttgtctttctcgaaaaagaacatggacagaggaagtttttcctgtgatgcagcaggaatctgccggatggagatctggagatgacaggactgaaaagtctgcgtcagttttaaaaagcctacatttcgaatttttttgtccgcttgatattcatagaaataatagataccgggtgtcatataatacctcaggtcttgtctttcttctaatgtattcaatgtgtgggaaaaaagaaccggatcagggcagagagaaattggaaagaggaaacattatgaatcaggatgaaaaatatatgcgggaagcgatccgtcaggcaaaaaaagcatacgctctggaggaggttcccattggctgtgtgatcgtgtatcaggataagatcattggacgcggatataacagaaggacagtggataagaacacactggctcacgcggagctgcaggcgatccgcaaagcaagcaaaaaaatggatgactggcgattggaagactgcaccatgtatgtgacactggagccgtgccagatgtgttccggagcgatcgtgcaggcgcggatcaaacgggtggtagtcgggtgtatgaatcccaaggcgggctgcgcgggttcgatcctgaatcttctggatatgaaagagttcaatcatcaggtggaactgacaacgggagttctggaagaacagtgcagtgggatgatgaaacagttttttaaggaactgcgtcagaaacaaaaagataaaaaaaagaagtctgaataactcaaacttcctgtttttgcggaaaatcattcgtgcattacgcttcgaatgcatcaccccatacgttacctcggtagttaactcaacccaggcacccctacggcacccgagaggttctgcttagtgctgcttcgttcccgacctgacacggttcacagattcccgtcgcgtaggacccaaatctcaacgccactttccgagggcagctatgcaatgctgcaccctctgcgtaatatcacccctgctatagcggattgcaggtacaaggtaccgctaacaccccggctgcacggtttttaattttacatggttttgattcaaatgtcaacggatatggaggtttttatgaaagttttactgacagcgatcaatgcaaagtatatacattccaatctggcggtgtacagtctgcgcgcctatgcgggaaaatatgcacagcagacagagattgcagaatataccattaaccagacgatggatgatattttgtctgatatttacaggaaaaaaccggatattctatgtctgtcctgctatttatggaatattttatatgtggagcagctgatcacagagattcacaaagtgctgccaaagatgcagatctggcttggcgggccggaagtgtcttacaatgcagtttctgtgatggagcaatatccacaggtgacaggtgtcatgtgcggggaaggagaagagacctttctggaactgatggaatattggaatcaggagagggaaagtctggatacgatcaagggtatcgtataccgggagaatggaacctgccggcagaacccgccgcgcccggtcatggatctgagtaaagtgccgtttgtgtatgatcacattgaggattttcagaataagatcatttattatgaatccagtcgcggatgtccgttttcctgcagctattgtctctcctcgattgataaatgtctccgttttcggaatctggaactggtcaaaaaggagcttcagtttttcattgatcacgaagtgccgcaagtgaagtttgtagaccgcaccttcaattgtaagcacagtcattccatggcaatctggacatacttaaaagagcatgacagaggaaagacgaatttccattttgaggtggcagcagatctgttaaatgaagaggagatggagctgatcgcgtccatgcgtccggggctgatccagctggagatcggaatccagtccaccaatccggagacgatcacggaaatccgcagaaagatgaactttgaagaagtaaagcggattgtaaaaagagtgcaggaaaaaggaaacgtacatcagcatctcgacctgatcgccgggttgccgtatgaagattatgagcgttttgcacagtccttccgtgatgtctatgcattgcatccggagcagctccagcttggattcctgaaggtgttaaaaggttcctatatgcatgaaaagacggaagattatcagcttttatatcaggatcggccgccgtttgaagtgctttctacaaagtggctctcctatgatgacgtgatccgtctcaaaggtgtggaagagatggtggaggtctattacaacagcgggcagtttgtcaatacactgcgattattagaggaagagtttacagatacgtttgctttgtatgaaagtctgagccgttattatgaagaaaacggactgcatatgataaatcactcccgaattacaagatatgaagtattatttgcatttatcaaagcatgtgtagaaaagaatgtggaaaactatcggcagatgttgatactggatctctatttacgggaaaatgtgaaaaaaagaccggagtttgcaggtgaagtcagcgttgataagcaaaaagcttctgcattttatgaaaaagaggcagaagagcgccggtatttgaagggctatgaaggatatgataagagacagcttcggaaaatgacgcatctggagcagatcaatggaaatctctacgtgtttgattaccggaaccggaatgttctgacgaatcaggcaagcgtattttgggtagaaggaggagacgaggcatacccatccgggcatccaacacatgcctgcggcgggcagacttcgtctgatcatgtatgaaaaaacggacaaaagaaattttagcgattctggatgagcagtatggacgggagtacgtctgttatctgaattatgagacaccgtggcagcttctgattgcaaccatgctgagtgcacagtgtacggatgcaagagtaaatattgtgacggcagatctgtttcagaaatatgatacactggagaagtttgccaatgcggatttaaaagagctggaacaagatatcaagccgaccggattctaccacaataaggcgaaaaatatcattgcctgtaccagagatctgctgtacagattcggtggtgaagtgcccaggagtctggaggatctgacttctctggcaggtgtcgggcgaaagacggcgaatgtgatccggggaaacatctatcatgatccgagtgtggtggtagatacacatgtaaaacggatatccagacgccttggcctgacaaaaaacgaagatccggaaaagattgaaacggatctgatgaaagaactgccaaaagatcactggatcttatataatattcagatcattactttcggacggtcgatttgtacggcaagaagtccaaaatgtgagcagtgcttcttgcaaaaatactgcaaagagtttaaaatgtaacctaaaatacccattgggtatgagaatttaaagaggtgaaaacagtggattttaatgataaaagagtcaaaagagtgattgcgatcggagcgctggtactggtcgttgcgatgatcgcgacgatgatcctgccatatctggtatagaaaagtggctgttgcgaacaggaacatagagggttaagggagacggaaacgatgaaagttggaaatgtatcacagacagttttaaaacgttctgtactgaaacaactgcatacaaaaagaaaagagattctgacagacctttcggtggaagagatgtgtactgcggtacagatcagggacacagaagatgtggtctttgcttcggctgtagtttctggaaattccaaaaatatcggggtatatgcgatcatgcgtgccgtgttggatctggagacaaggggggcttcggcaattggtgtttcggtacaggtgattctgccaacatatgcttatgagtcgcggttaaaagagatgttccgctgtatggaagagcggtgtgcatcctgggggattgcaataacatgtgcaaaggcagagaccagtcctgcagtgagccagtccgtggtatcggtgactgcggcaggaagtgtggaaaaaggacagctgcgtacgcttgctcaggcggagccgaatcaggaaatcgtactttgtggttcgatcgcagcagaaggcgtactgcgtattttcgatgagaagagagaagagctttcaaagcggtttgttccggcatttatgcgtcagatccaggggatagaatcagaactggaggttttccatgcgcttcgcagtgtgaagcaggaaaatacaccaaaaggggaaccactggtgactgcaatgcagcagattggaagcggtggaatcctggcgtctctctgggaactgacagaggcggcaaatgtgggaatgcagattgaaatgtcccggatttcaattcggcaggaatgtgtggaagtctgtgaatattatcacctgaatccgtatcagatgacttccgcaggaacggttctgatggttaccagagacggcaatgctcttgtgcggtgtctggaagagagtggggcacgagccagtgtgcttggggttacaacggcagatcatgcaaaagtaatcacaagcggagacgaagtgcgttatctggacagacctgctccggatgaattgatgcgctggtgggaagagcaggcacaaaaagaggtaagatcagaataaggagaataaaaacgatggaaaagcgagaattgatccgaaaagaaattttatactatatagagaaaaacagcagagccaatcttggagaactggcagtactgcttggaacagatgaggtgacagttgccaatgagattgcagagatggagaaagacaaagtaatctgtggatatcacacgctgatcgactgggacaaagcaggtgtggagcttgtgacagcattgatcgaagtgcgtatgacaccgcagagaagtcagggatttgacaagattgcagagcgcatctgcaactatccggaggtacatgcagtgtatctgatctccggcggctatgatcttctggtttctctggaaggaaagactttaaaagaagtgtcgcagtttgtttcagaaaaactttctactctggattcagtgatcagtacagcgactcattttattttgaagaaatataaagaccacggaacgatcctttcttcaaaaagtgagtcagaaaggatgctggtgacaccgtaatgagaaatccattatcaaaaaagatcgtagagatccagccgtccggcatccgtaaattttttgacgtggcaaatgagatgaaggatgcgatttctctgggtgttggagaaccggattttgatacgccgtggagaattcgtgaggaaggcattttctctctggaaaagggacgtacattttatacatccaatgcaggactcaaagaactaagagaagagatctgcagctatctggagcggaaaatcggagtatcttatgatccgatgcaagagaccatggtgacagtcggcggaagtgaggccattgatgtggcacttcgctgtatgctggatccgggagatgaggttctgattccgcagccgagttatgtatcgtatcttccatgtacgatcatggcagatggcgtgccggtgatcattccgcttcagtacgaaaatgaatttaagctgacagtggaggatctgaaaaaagcagtgacgccgaagacaaaagtcctggtgatgccgtttccgaacaatccaaccggatcgatcatgacaaaagcagatctggagccggtggcagagtttatcaaagagcatgacctgtacgtgctctccgatgagatctattcggaattaagttatcagggagatcacgtttcaattgcagctctgccggggatgagggagagaacgatcgtgatcaacggattttccaaaggctttgccatgacaggatggcgtctgggatattgctgcggaccaaagctgatcattgagcagatggtaaagctgcatcagtatgccattatgtgtgcgccgacaaacagtcagtatgcagcgatcgagggactgcgccactgcggagatgaagtagaggaaatgagaaaatcctacaatcagagaaggcgtttcctgatgcatgaattcaaaagaatgggactggagtgttttgagccgttcggagctttttacgtgttcccgaatatcagtgaattcggcatgacttcggaagaatttgcaacccgctttttgatggaagaaaaagttgcggtggtgccgggaactgcatttggagagtgtggagagggattcttgcgtatttcctatgcatattctctggaagatctgaaggtggcgctgggaagactggagcgctttattgaaaaactgagaaatgaggataaagcatcatgttaaatatcgtgttacatgagccggagatcccggcaaatacaggaaatatcggaagaacctgtgttgctacgaataccagactgcatctgatcgagccgctgggatttcgtctcaatgagaaagcattaaagcgtgcggggatggattactgggcagatctggatgtaagaacgtatatcaattttgaggattttctggagaagaatccgggagcaaaaatctacatggcgacaacaaaggctccgaaagtctatacggaagtacagtatgagccggactgctatatcatgtttggaaaagagagcgccggcattccggaagagattcttgtgaaccacaaagaggactgcgtgcggattcccatggtgggagatatccggtctttaaatcttggaaattcagttgccattattttgtatgaagcacttcgccagcagaattttgcgaatatgaatctggaaggacatctgcatgagctgagctgggaacagcaatagaatgaaatagagaaaatcaggaaaaatggtcttatatgcaatgatgcagtaagatcatttttttcaatgtaaatctggacatctcttgcttgttgtagtataattcaaataaacagttccacaatataaaaactagttttacaatatgaaactaaaattgataggaaagaatgtcaggaggaatcaagatgggaaacaacagatttgatttattatcattaggtgagattttgttgagattatccccgccggataatgaaaggatcgtcagtggggagacattccagaagcaggttggcggtgcagagctcaatgtcgtgtcgggagtttcgattctggggcttcgcacaggcgttgtctccaagctgccggacaatgcactcggaatctatgcaaaagataaggtacgtttctgcggagtaagcgatgattttctggtatatgatgacagtcaggatgcccgtctcgggatttactactatgagaatggtgcttatccgagaaagccgggagtggtgtatgacagaagacacacttcttttgacaagatcagtctggaagaactgccaaaggagatgttccagagcaccagatgtttccacacaagcgggatcacactggcattgagtgaaaatatccgccgtactgccatcgagatgatcaaacgatttaaggaaaacggtacactgatttcgtttgatgtgaatttccgtggaaatctctggacaggaccggaggcgaaagcatgtattgaagagattcttccgtatgtggatatctttttctgctcagaagagaccgcaaggctgacattcttaaaagaaggcgatgcgaagcgtatcatgaagagcttcacacaggaatatccgatctctgtggtggcttctacacagagaatcgtacacagtccgaaaaagcatacgttcggttcagtaatctacagtgcgaaagaggattgctattacgaagaggagccatatcgcaacattgaagttgtagaccggattggaagcggagatgcgtatgtatcgggggcgttatacggacttcttgcgtatgattttgactgtcagaaagcattggagtatgggaatgcggcaggagcagtgaagaatacgatcaaaggagatcttccatcctgcagtaaaagagagatggatgcaatcattcgaaatcacaagcatgtaggaccggaactggaaatggacagataaaaaacaggacagacattctttttatttggagaatgcctgtcctgttttttgtgaatactaatgtagatgtgtgcagtttgcagcacgagaagaaaacagcatattttatgaagatttcgaaattaacagaaaaatagaatgatatggatttatattttgacattattacattttgcggtataatgacattaagttcatgcgcaatgcatagaatagttgcattgtaatggggaagtaaaggaaggtggtgaagaatcgatggtggaagaaacaatcaaagcaatccgtgaaaccgaagcagcggcagatgtgattgtaaaagaagctggggaaaaaagccagaagattctggaagatgccagacaagaggcagaacgtatgatcaaatcccaggaagaaacacaccggatttctgcacaggatgcgatgcaggatgccagagaaaaagccagggtatttcaggaagaggcccgtgtgcagacagagaaagaaatcaaggtgttaaaggagtttgctgtccagaaagaagcggaggcagtgagtgcagtgatttctcagttagtgttgtgaaaagaaattaaaaaaggagggagtgcactatggcggtactgcagatgcaaaaaatcagtatctgcgccctgaaaaaagatcgaaaagcagttctggaaaagcttcagaggatgaaggtgatggagatcagccagattctggaggaggatcctgattttacaacgatggatacgagacaggagcgaatggaattagaaaagagcgcttcactttcagatcaggcactggaaattctggatcggtatgcgccggagaagaagtcgatgttttctgcactggaagggaaagcgctgatcgaagcagatgattatcaaaaagtggtggatcagaaggaacaacttttatgtacagtcaagaggattcttgcgctggataaagaaaaggcagaacaaaaagccggtatcctaaagctggagaacagtatggaaagtctgactccgtggatggatcttcatgtaccgatgaattatggcggtacggcacatacagtgatgctgatcggaaccatgccgcttgccacgctggaagagatctatcagatgctcgcacaggatgcaccggaagtagatggtgtggatgtgtcggttatccattcggataaggataccgtgtatctggcggttgtttgtcttacacaggatgcagaaaagctggaagaagtattgagaagccgtggatttgcaagaccgtcccagatatgggacaaagagcctgcggcagtgaaggcggagctggaacaaacatgtcgggagtgcaaagagcgcattctggaaattgaaaaagaggtacggtcatttgccggtgagcgtaaaaatatccggattcttgcagatgattacagggtgcgggcagaaaaatacgaagtgctcggaaagctgccgcagtcagaacgggcatttttcattacaggatatgctccggcaaaagatacaggacgcattgaagagagtctgacgaaggcgtttacgtgcgtcattgatattgaagaaatcaaagaggatgaagaatcgccaacgcttttaagcaacaattcattttccgcaagtatggaaggaattgtggagtcctatggacttccgaagagaggagaatttgacccgacgacgattatgtcattcttttatgtatttttcttcggaatgatgctttctgatgcggcgtatggcgccatcattgcagtggcgtgtttcgtattattaaaaaaattcccgcggatgagccggggaatgtatcaatcgatcaagatgtttatgtactgcggaatttccacactgatctggggaattctgtttggcggatattttgggaatattgtagatattgtatcccagaagtttttcggaacaacgataacggtgccggctctttggttcattccattgaatgacccgatgaagcttttgatgtattcgatgctgtttggtatgatccatttgtttgtgggacttggcatcaaaggatatatgtgcctgaaagagaagaagatcctggatttcttctgtgatgtggtactttggtttatgcttttgatcgggctgatcctgatgctgcttccgagtgagattttttcatcgatctcgcagatacagattgtatttccggatgcagtgaacctggtggcaaagggactggcgatcgcgggtgcggtgggaattttgctgatgtccggcagggacaagaaaaatccggcgctgcgtcttgcgcttggtgcttatgatctgtacaacattaccggatggctcagtgatgtgctgtcctattcccgtctgctggcgctgggactggcaacaggagtaatcgcatcggtgatcaatcagatgggcagcatgctgccaaacaatattgcaggcgtgattttgtttctcgttatttttgtaatcgggcatacgctgaatctggcaatcaatctgctgggagcatatgtacacacgaatcgtctgcagtttgtggagtttttcggaaaattttacgagggaggcggaagagcatttcatccgttcaccccggatacaaaatatgtagatgttaaggaggaatcttagttatgagcattatggaaaatttaggaatcgtgtatgcactttgtggtgcggcaatcgcagtacttctcgcaggtgcaggctctgcgatcggagttggaatcgcaggtcaggcggcagcaggtgttgtaacggaggatccaggtaaattcgcgaaagtattgatcttacagcttcttcctggtacacagggactctatggtcttctgattggatttatcacattgtctaaaatcggaattcttggcggaggacttgcagaggtggatgtgacaaccggacttctgattttggcagcctgccttccgatcggaattgtaggtctgatttccggaagatcgcagggaaagacagccgcagcatcgatcgggatcattgcaaaaagaccggagcagtttggtaaagcaatgctgtttccggcgatggtagagacttatgcaatccttgcacttctgatctctttcctggctgtcagcggaattcaggtgtaaatgagtgagccaaagtgaacgaaaaaggagagcatgaaggatgagtggattagagaatatgaaacgtcagattctggacgaagcgaatcactcagcggaagaacagatctcgaaagccaggacaaaggcggaagagattttaagagaagcaagagagcagatggaggaacagagcgcagtcatggctaaaaagtcggaagacgagacaaaagactatgcacagcgcattgcatcttccagtgaaatgcagagaaagcaggctcttctgcaggcaaaacaggaagtgatacaggaggttcttaacaaggcatatcagcaggtactgcatttggaaccggaatcatactttgagatgcttcagaagctgctggaaacatatgcacttccgcaggagggaacaatctatttttctgctgcggatcttgcgcgtatgccgcagaaatttgaggacgtgattgaacagacggcacagaaaaaaggcggtcatcttgtggtttcgaaagaaccgaaggatatggacggcggatttgtgctggtttatggcgggattgaagaaaattgtacgatcagggcaatgttccacacaaagcaggatgaattgtcggatgttgtacagaaaatattatttgtatagagcgcagccgttttttgcaggcagcaaaagaaagcgagaaggagggattcgtcttgaatgaattggaatatatctacgcggttgcgcgcatacgggcgctggagagttctctgttgacacaaagtgtcattgaacagttgatggcgtgtcagaacgaaacacagtgccttcagcttttgagcgagaagggatggggagatccggcggatgcacacgatccggtgaagatgctgcagcgggaagaggagaaaatctgggaagtgatctcggatatcgctccggatttgtctgtttttgatgtgatgtcctacacaaaagtgtttcacaatgtaaaagcagcaatcaaagcagtatgtacagggacagaggatcggaatgttttttacaatgattgttccattcccggggcgcagatgctggagattgtaaagaataaagaattctggcgtcttccgccggcaatgtcagaggcagctcaggaagcgtatgacgtgctgcttcataccggtgacggacagttgtgtgatgtgatcgtggatcgggcagcgctggaagcgatttctgaggccggaagaaacgcggaggatgcgatcatccgtgattatgcagagtctgtggtagcaatcgcagatatcaagattgcagtccgttctcagaaaacaggaaaaagccaggagtttttaaagcgtgctctggcaccctgcgatacagttcaggtggagtttttggcaaaagcagcggcaaacggcatggatgcgatccgggattatctgctcacaactgcctatgcaggtggggcagaagcattggcagagtcaccgtccgcatttgagcggtggtgtgacaaccggatgatcgaaaccatgagaccgcagaaatatcaggcattttctgtgggaccgctggtggcatatattgtggcgcgggaaaatgagatcaagacagttcgaatcattctgaccggaaaacagaatcaatttccggaggaggcaattcgggaaaggatcagggagatgtatggataagatagcagtaatcggagattatgacagcatttacggcttccagacactgggtctttcgatctgccctgtcagagatgccgaagaagggaaagaaaaactgcgccagctggccctggagtgcgggattatctacattacagaggctctggcggcagaactgccggaagagatcgggcgatataaagaacaggtcatgcctgccatcattcagataccgggtgtatccggcaatacaggagcaggtgtagaaggcgtgaaaaaaaccgtggagcaggcagtcggttcggatatcctgttctcacaggaataatgggaggtagattcggcaatgagtaaaggcgtaattaaaaaagtagcaggaccgctggtcattgcctctggaatgcgcgatgcgaatatgtttgatgtcgtgcgtgtaagtaagcagagactgatcggcgaaattatagagatgcacggagacgaggcgtctattcaggtatatgaggagacatccggactcggaccgggagagccggtggaatccatggaagtgccaatgtccgtagaactcggaccggggctgattaccagcatttacgatggaatccagagaccgctggatgatatcatgaaaatttcaggcaacagtctgaagcgtggtgtggaagttccgtctctgaaacgaaatctgaaatgggagtttgttccgactgttaaagtcggagatgaagtcgaagaaggagatgtgatcggtacggtccaagagacacctgtggtacagcagaagatcatggttccttatggagtaaaagggacggtcaaagagatcaaagcaggagaatttacggttgaggaagtggttgccgttgttgccactgatacgggggacagagagcttaccctgatgcagaaatggccggtccgcaaagggcgtccgtatcagagaaagcttccgccgaagatgccgcttgtaaccgggcagcgtgtgatcgatacgttcttcccgcttgcaaagggcggtgtggcagccgtgccgggaccgttcggaagcggtaagactgtcattcagcatcagcttgcaaaatgggcagaggcagacattgtggtgtatatcggatgtggagagcgtggaaatgagatgacggatgttctgaatgaatttccggagctgaaggatccaaagacaggccagtctctgatgcagcgaacggttctgattgcaaatacatcggatatgccggtggcagcccgtgaggcttctatttacaccggaattacgatcgcagaatacttccgtgatatgggatactcggtggcattgatggcagattctacatcccgctgggcagaggcccttcgtgagatgtccggacgtctggaggagatgccgggtgaagaagggtatccggcatatttgggaagccggctggcgcagttctatgagagagccggacatgtgatctcacttggaaaagatggaagagaaggtgcgctttctgtaatcggtgcggtatcccctccgggtggagatatttccgagccggtttctcaggcaacacttcgtattgtgaaagtattctggggactggattccgcactggcttacaaacggcatttcccggcaattaactggctgaacagctattctttgtatctggatgatatggagacatggttcaatgccaatgtggcatctgactggatggaaggccgtcagaagatgatgacacttctgcaggaagaggcagagctggaggagatcgtaaaaatggtaggtatggatgctctttcaccgggtgaccggctgaaaatggaagcggccagatccatccgtgaagatttcctgcatcagaactctttccatgagatcgatacgtatacttcgctgaaaaaacagcatatgatgatgaagctggtcatggcattttatgagaaggcagtggaggcactttcaggcggtgcatctttgcaggatctgatcaatatgccggtcagagagcagatcggacgttttaaatatgtgcacgaggacgatctggatacagaatacgagaaagtaaatcaggaactggatgcggaaatttctgctgcacaggggaaggagggcttctaaatgccaaaagagtacagaaccatacaggaagtagccggacctttgatgctggtgcgcggtgtagaaaatgtaacttatgatgaactgggagaaattgagcttgcaagtggggagacaaggcgctgtaaagtgctggagatcaatggaaacgatgcattggtgcagttgtttgaaagctccacaggaatcaacctgtccaacagtaaggtcagattcttaggacgaagcatggagcttggtgtatctgaggatatgctgggccgtgtatttgacggactgggtcgtcctattgacaatggaccacagattctgccgcaggcacggatggatatcaacggacttccgatgaatccagctgcgagaagctatccggaggaatttatccagaccggagtctctgcgattgatggattaaatacattggtacgtggacagaaactgccgatcttttcagcatccggactgccccatgcaaaactggctgcccagattgcaagacaggcaaaagtactgggaacggatgaaaaatttgcggttgtatttgctgcgatgggaattactttcgaagagtccaacttctttgtggagagctttaaggagaccggagccattgacagaacggttttgtttgtaaacctggcaaatgacccggccattgagcgaattgcaacgccgaaaatggcgctgacggctgcggaatatctggcatttgaaaaagatatgcatgttctggtcatcctgacagatatcaccaactatgcggatgcgctgcgtgaagtgtctgcagcacgaaaagaagtaccgggacgacgcggatatccgggatatatgtacacagaccttgccacgatgtatgagcgtgcggggcgtcagaacggcaaaaagggaagtatcacgatgatcccgatcctgaccatgccggaggatgacaagacccatccaatccctgacctgaccggatatattacagaaggacagattattttgagcagagagctgtaccgaaaaggtgtgacacctccgatcgatgtactgccgtccctttcccgtctgaaagacaaaggaatcggagagggcaagaccagagccgatcattccaataccatgaatcagttgtttgcagcttatgcacgcggaaaagatgcaaaagagctgatggtgattctgggagaggcggcgctgactgagattgacctgatgtatgcaaaatttgcagatgcatttgaaaaagaatatgtttctcagggatacaatacggatcgaagcattgaagagacgttgaatatcggatggaaactcctttccatgctgccaagaaccgagttgaagcgtatcgacgacaagtttttggatcagtattatcaggcataaatgttatgcccggaaagagaggtgagaaacgatggcatcaaaacaggtaaatcctacccgtatggaattgacccgtctgaaaaaaaagcggatcacggcaatccgcggacataagcttttaaaagacaagcgggatgagctgatgcgtcagtatctggatctggtgcgggaaaacatggaagtgcgtaaaaaagtggaagccgggattctcgcagcaaataaaaattttgtcattgccaaagcggggatgtctgaggcggcactgaatactgcattgatggcaccaaagcaggggatcacactgacacccggggaaaagaatatcatgagtgtcaacattccgacatttgcatatcaaacgagaaccgcggatgaaaatgacatttattcgtatggatttgcatttacatccagtgatctggatggagcagtaaagtctctggcagatatcctgccggagatgatccggctggcagaatgtgagaaggcatgtcagttgatggcagcagagattgaaaagacaaggcgacgtgtcaacgcgttggaacatgtgattattcctgaggcagaagagaacattaaatatattaccatgaagttagatgagaatgaacgaagcactcagatccgtctgatgaaggtgaaagatatgatgctggaggatgcgcatcattataaagagaagatgcaggaatagaatccgtaagaaagcaagaggggcggttcaggtgaccagcccccctttttgtattagtgcgtttttttatatttttgaatgatggcattcatggtatcccattttgcttccatgtcagataccagcttaaactgtgtccggcatctgtccaggttgtgattctcacggtgaatcttaaagtaagtatctccctgcagataatctgtcaaaaatctcataccacattcgaaggtcattactttggctccaagaggcagcaattcaatttcttttgttgttaattttccggcacagccttcaataaatccttttgcgtaaatatcaaataagttcatatcacactggattttatccaggtcagtttcatcctctgcacctgtgcttgcaccaaaacggattgaatcaccaaagtcattcatggcaagaccgggcataacggtatccagatcgatgacacagattcctttgtgggtttcgttatcgatcataatgttatttaattttgtatcattatgcgttacacgaagtggcaattctttgttttcaagcatatctccaaatgcatttgcgagatcttcatgagcaagaacaaactgaatttcattctgaacagaatgtgcacgtccgcaaacatcttctttcacagcttttttaaatgtttcaaagcgcgcttttgtatcatggaatccttttattgtttcgtgaagtgtttctgccggataatctgccagtaatctttggaaattgccaaaagagactgcgctttgataaaagtcttcctcactttctacctggtcgtaacttgtagcgccttcaataaaattataacatctccagtattcaccctcggaatccacaaaatatgagtttccgtctttggtcggaatcacgtttaatgtttctcgttcaggatccccgccgttttcaatgatttttttacggagaaatgatgtcactcctaaaatattttccattaactcttccgggtttttaaaaatatttttattcatgcgctgtaagattacacggccttcggttccatcttctctttttaatgtgaccaaaaaggtatcgttgatatgtccgcttccgtaacgtactgccttcattaccattgcgttgaactggaaattgagcaatgcttccgtttccccgcaccagactttttccggatagataccgtcgtctttcatagtctgaattgcatttacgacaacctgtttatcattcttgtatgtcacaccgtaccatttatcttttgaggtaagcacagacacggttgcccgattttcttttaataaattacttactacggttgggaggaaatattcacattttaatggattatgttctaaaccttctttcagaaatgcagcaaatcctgctttgatttcctgaagaaatccttctgagaatccccacatattcatagaaacgacagcatccattggaagctctgtccaggaggctccatcatcctctgtaaaagcggcccgctctccctttttttcaatatgagtgcgttcggtaacttctactaaatatccattttcatccacagtacaaacgccccgtgcgacatgaccgttttctgtcaatgtattttttaaatgatatcctaccattgtaaaacggtatttatcatcatctttctgtgttgacaggaaatgataaattttctggaatgcatctcttccatagtaatcatccgcattgatcacagcaaaaggaccatctacaacatcaatacagctgagaacggcatgtgcggttccccatggttttattcttccgtctggaacttcaaacccttccggaagattcgtcaagtcctggaatacgtattctacgtccatgacgtctgccatacgatttccgattacttctttaaaatctttctcattttcttttttgataataaaaacgactttttcaaatcctgctcttttggcatcaaaaatggaaaaatccatgatgatatgtccctgatcatcgattgggtcaatttgttttaatcctccataacggcttcccattcctgcggccataatgactaatactggttttttcataatatattcctccatataattatcattgatttgatagatttgtgaaaattaacgcagattctctacaaaagtgtcgaaatctacaacggtcccgtttgctcttgattcctcggctgcaaacacgatcaggtgattatttacggatgttcggatgtcagaaacagagaagccttgatattccccagtcagatactcataaagagagtacacaatgccatcatcgccgccgccatgcccattcgtaatgccatctttggcaacaatcggaatttctgtagtctgctttgtttcgaattcatatattgtaataggagttccgagcccgtccattgctgcgtgcaattccccttttgttcccataatatgtataaatctgccgcctttgttgaaggcattcatagtaaaggtaacagtgatatcatcttcaaaaatcatattgacagtctgatggtctacaacatcgttatcacatttgaatacacattttccatattgtgttgtacgaagtgctgtttccaccatttcatcagtgggatttgcttctctggttgaggttgttcgaaaccagtcattttccttatcgtccagataaagtctgacagcattatatgggcaggtgtctgctttcggacatccctgaatacaatagtccggtgcatcttttggagcattttcctctttaaaataggataaggtgccaaaagattgtacttttttacacttctttccaattaaccattgcagaatatccatatcatggcaggatttttgcaacagcatacaggaagatcttttagagttcccccaatttcctctgacaaaactgtggctttgatgtacatttccaacacattcttcatgattaacagaaataatatctcccagtcttccgtcattgatcagttctttgattgtaataaaaaatggtgtatatcgaagtacgtgacaaacaatgactttacttcccatttgttccgcataatctgcaattttattgcattcctccgggtccggggatactggtttttccaataaaatgtcatattgcaaagaaattgctttcagtgtcggttccagatgttgtttgtccatcgttgaaataacagcaacatccgcgatctttccaagatcaagtaatggcttccaatcttcaaagcacagattatcggctatctgatgttttttctggatattatttctacggctctcgatgggttctgcaactgcaataactttgaatttgtcactcatctgagccataatatcggtatatgtttcgcccctgtttcctgcaccgatcaaaattacttttaaaactttgtccatgttcattctccttcttatttacaggactctttgttagtgttattatacacatataaaaagagcaaatctatgcaataaaagtccaaaaatatgtaattttagatcaggaatggggaggagctgtatgttgatcaaaaatgaatttccggcaattccgattatcgaacaaattcatataaccagtatgcattctttgtttaaaattcattatgagtgtggttttgaatttccaggtgagacgcacgatttctgggaatgcttgtatattttagacggggagctctgcgtttctgctgacgaacgtatctataatatgtcgcagggtgaacttatttttcacaaaccattagagtttcataaatttatcgtgaacaatccgaaaggagctaccgtgcttactttttctttttcggcaggtggtccattaactttttggcttcgcaataaagtgtttaaactttctcaggagcagacacaaattatagattctttacttgtatatatgcagaataaagttgatttaattaatatagaaacagaaaaaatagagtattattatttacatcctttttccagatttccatattattctcaaattattgtaagttacctttgccaattatttttgagtctcgcggagcggggaacattatcctctgtttcttctgttccggatgcgatcacgtttcgtaatgcgatcaattttttaaatacgaatctcgactgccagccaacggtaagtgaaattgcagaatactgtaatatcagtgacgccagtttgaaaagaatatttgataaatatgcagggataagcgtgcacaaatatttgttaaagttaaaaattaatgtagcaaaaaaattattgcaggatggcgggcaggtatctgttgttgcagagaatcttggatttgccagtcaaagttatttttcaaaagcatttaagagagaaactggttttactccatctgattttgctaaaaattcccagacatagttgactctcgtatgtctgggaatttcatagtcagaattagttacagtccgaattctttaaataaattctgctgatagtcatggtctttggccgcctttacgatatcctccattcggtcagccttggacagtgcaataatcagagcgttgatgcgtttttctgttgctttggtgctttctttttttgtaatttctacggctgattctacctctgcattgattttttcctgtacctgtttttttacttccgcatcaatctcatctttcatcaattcccgcagtgcatcacacattccttttacctcctcaaacttctgtttgttggcccgcacgatcaattccatgacggagcgatacagtgcgtttgcttgtttttgaaatgaataagatatttcacgtcatttttatgaaataaaatgaatgttagaaaaaatatgctttatattagcctaacatattttaaggaaaatcaccatatctcaaaaatcacatatattagtcatataatgtctgaaacggaagtgtggatctatgaataaaaaattaccgtattacatggcgtatcctctgcctcttcagtatgatgatgagcgcaaagagcgtagagattatgagtacatgaagagtctttatccggatgtggcaaaacggctgctcccgtatatagaggaagaatgtgacaggatggaatatgacaacagcatgatgtatgatgaatatcctgaccgtctgcagctgcatctgatgtgcaaaagagtctgtgaaaatgtaagaaaacatgaaaaaattttctatggaacagaatatgaaggacttctgtcgcaggcagaagaaaacagtgtcatgcagatggaagaggcagagcggatgcaggagccggaatctgaatgggaacctgaatttatgcaggtgcaggaacagaatcggcgggaaccggaaagaagacgtatgccgaactggcttcagaatctgattgaagttatgctgtatcatgaactatataaaagaagaagtgatcatcgcaggtctcgccacagaatttactaattacagattttgtgctatgataaaaacgatgtagacacgaagattttgggataaaagttaacatgattatggaaaaataagggtgaaaatacgtatgaagaatctgatttttataggaatgccggcagttggaaagagtacggtcggagtggttgtcgcaaaacggctgggaatggaatttatcgatacagatttattgattcagaagcaagagggacgtctgctcagagagattatagcagatgtgggggaagatggatttcttgccattgagaatcaggtgaattgtcaggtgaatgccgagcgcgccgtaatctctccgggaggaagtgttgtatactgcgaagaggcgatgaaacattttaaagaaataggaacagtcgtatatttgaaggcttcctatcgcacaataaaagagaggatccgcagtccgaaaaagcggggagtcgtactcagagaagggcagactttccgggatttgtatgaagaacggacaaaactttttgaacaatatgcagaccttacgatatgcgaggacggctgtcagatcgaggaaacgatcgatgcagttttgacccagatcgaggtgctggagaaaaaatgattttacaaattgaaattttatggtataataactaatcgtattatagggtaaaaaggcgaattatcgtttctttttgcttttataaggcgggggtaatgaaatttaacaagggactacgatagaattatcgataatcgaggtgcaatatggagcagtatattattaaaggcggcaatccgctggtaggggaagttgaaatcggcggagctaaaaatgcggcactggctattctcgcggcagcgatcatgacagacgagaccgttctgattgacaatctgccggatgtaaatgatatcaatgtgttgctggaagcgattcagggaatcggagcaatggttcagagagttgacagacacacagttaagattaacggaagcgcaattacagactttaatatagaatatgattatatcaagaagatcagagcatcttactatcttttgggtgcgatgcttggaaagtacaagagagcagaagtggctctgccgggcggatgcaatatcggaagcagaccgatcgatcagcatctgaagggattccgcgcattgggtgcggatgtggatattgagcatggcaagatcgtggcagaagcagagcatctgagaggaacacatctgtattttgatgtggtatctgtaggagcaacgatcaacgtgatgatggcagcagccatggcggacggtcttacgatcatggagaacgttgccaaggagcctcatgtcgtagatgttgcgaacttcttaaacagcatgggagcaaacatccgcggtgccggaacagatgtgatcaagatccgtggagtcaagagcctccataagacagaatattccatcattccggatcagattgaagcaggtacttttatgtttgctgcagcagcgacaaagggagatgtgacggtattaaatgtcattccgaaacatctggatgcgacaatctccaagcttgtggacatcggatgtgaagtagaagagtttgatgatgcggtaagagtggtggcgaagaaccgcttgagaagcacacaggtgaagacattgccgtatccgggatatccgacagacatgcagccgcagatcggggtagtgcttgcgctcgcgcagggtacaagtacgatcacagagagtatttttgagaacagatttaagtatctggatgagttggcaagaatgggtgcagtgatcaaagtagagggcaactctgcaaccatcgaaggtgtagagaagttttccggagcgagagtcagtgcgccggatttaagagcaggtgcggcgctttgtatcgcagggcttgcgacagacggaatcactattgtggatgatatcgtctatatccagagaggatacgagagatttgaagaaaagctgcgcggtcttggcggaatcattgaaaaggtttctgatgagaaagagattcagaaatttaagctgaaagtaggatagattcagacggaaatataagggggatacaggatgcaggacagtaagttctgcatcttttgataaataacagggaggtccagaagatgagcagtgaacgatatgatgaaggcgtaagggaacaaaagaaagcagaacgtaaaaaacaagtacataagcagatcgtgatccttgtgatcgtgcttttggtgattgcagcagctgtggcagcagtggtgattggcggacagaaaaaagaaaaagacagtcagccaaaagacaaagcagatataagcagtacagtcagcgccattgcggcaagttatgaagaatttctggcagatgtagatgcggacgcatccaaagaagaccgcaaacaggatgcaaagaaatttgcagaatggctggaaaagacgtatccaaaggaaacggcagagaagctgcagaagaaagtaaaatctgacgcattgaaggaagcagacttttatgcaagttatgagaagacacttcatgtgttatccgatgagtatcagggctatctgaaagatgacgctacagcagcacagcatcagatctatcagaaacagggaaatacagtgggacaggccgagatcgcacttggcggcaatctgacgctgacagaagaaggtatgaccttgggaatctatgatcagtcaggagagttaaagcagatgctctcagaggaactgctcaatgccatgacacaggcagacgtctttttcctgaatcaggaatgcagtatcagcagcgagggagaagctctggaaggaaaaggtgtacttcacgcaaatgcagaccggatgaagattctggaaggtctgggagcagatgttgtttctcttggaaatgaacatgcagcagattttggacaggatgcgctgaaagagaatctggaacttttgaagaatgcaaagatagcggctgttggggcaggagcagatgcaaatcaggcaaaacagccggtatatctaatcgtgaatggaatcaaaatcggatttacagcggcatccggcgtggaagatacatttgacctggcagccggagaaggaaaagccggtatccaggagtacacagacacaaagcagtatgaagatgtgatccgggaagctgcagcgaactgtgattatctgatcgtatatgaccatgaaggaaaaggcgatacaaataacgtagaagcgtaccagaaagaacatgcggcggcatttttggaggcaggagcagatcttgttcttggtgggcattctgatcgtctccagggcatggaatatatcaatggaaaaccagttgtatatagcatgggatctgtattgacagacggtacaagcagatatgcaggaatcctaaaacttacgattaaaccagaaggactggagcagatggaaatcgttccagcgattcagaccgaagaaaagaccgagtatttagatgccaaagaagagcagaaaaagatgtatgacgcagtggcagctctttgtccgaatgcagtgatcgatgaaaatggtgtgatcacagagaaaaaatagcaatatttttacaacagaatgaaatcccattgtgagtgagaaaaaatccgcagaaggcttcttttcgaagtagtctgcggattttttgtcgcagaaaatgatggggatatcatgaataaaaaatgaaaaaactgacaattcgacgaaaaagtggtgtaaaataaaaaataaaaagcagaaaaactgtaaaaacatacaaaaaaatgaaaaaatataatttctgcccataattgtgtgaaaatatgttataatgaaaaaaattgaagagaaaaataaaaattacttatgagaaagggttgaagtacatatgcaagaaaggtacaattgtcagtcagtcagtcagtcagtcagtcagtcagtcagtcagtcagtcagtcagtcagtcagtcagtcagtcagtcagtcagtcagtcagtcagt

SEQ ID NO: 6964 - DNA, 4443 bp, Unknown
  gut microbiota DNA sequence
aaaagtgaatagtggaaaaagatagtttgagacggtttgtattttattaagaaatacagatggtttcttttttgtgtactttttaagcaaatcaacatgggaatcaaacatgaaataaaaatgaggatagatcaatgataaaaatattgcgaaaaataatcgatattattttttggattgcagcggttttactgctcattttactgtttcttttgggaggagtcagattatttggatatacaccttacgtgatcacaagtggaagtatgattccggtgtatccggtggggagtgtcgtgtatgtcaatggtgtgaacccggaagagctggaagcaggggatgatatcagtttttatatgacagaagatgttgtggcaacgcatcggattggaggagttgacaaagcagggaagtgcgttaccacttatggggtgaataaccttgattcagaaggtaatcaaatcaatgacgcaaaagccgttgattttgatcatataatcgggcgggtggaatactcaattccgatcgtaggatatgtgtatatgttgataaggacgacgtcgggaaaggcaggtgtgatcattatagtccttagcctattcgcagtttcacgaatcctgcaatacttagagaaggagaagagaagatgaaagaaacaaacaaaagcagaaacaaatcaaaaatggcagcagtcattgccgtattacttgtgtgcgttttggctgtcggaggtacgattgcgtatctgacaactcacagtaaattaaccaactcattcacagtaggtaatatcggaccgatcaaaccagagaaaccaggtccggatcctgaagtaccgattgacccagacgatacaacaaaattaaatggaaacctgtatgagccacattgggtagcagattcaaaattgatgccgggaaacactgttgcgaaagacccgtatgtaggtgttggacctggaagtgaagcatgtgatgtgtatgtttacgtaacaaatgaaatggtaaacaatcagatgatgtattttgcaatgaacgagggatggtctgcagtggaagctgacgcgattacagtagatcagaaaacatattacacaggcggtctgttcaaatatgatgcaggtttagatgcatctaatgtaaaagataaaaatgtgtggacagacaaagcgctgtttgataacgtacttgtttccaaagatgcaaatatcgaagactttgtagcaaaagaagatgctacaggcagaacaattactgtacaggcattcttgcatcagtcaaaagatgctcagggaacagagattgaagacaatgtaatcttagaagcagccaaaaaagcatttggtattacaaaataattgaaaaagataaatttacataatcatttaaaaatatgcaggatttgattagcgaataaaataggaagcaggaggagagagctatgaaaagtatgaaagaaaggataacaattatttgtattatttcgatattgctttgtgctctttcctccgttgctttttcaacgagtgaaggcacagcggaaaatattatttcgtttggcaggctgaaaattcagctgatcaataacaggatggatgaaaatggagaagaagtctccgtaacgacagaagaggaaaagttaaacgggaatcaggtatctcgtatcataaaagtaaaaaatatatgtgaacacccggtatatgtcagggtcaagattgagtttagcggtgaagataaacaaggaaagtttcaggcgggagagtatgtctcgttccaagatccgaccggagaatgggtaaaacatggagagtggtattaccatagcaaagcgctggagcaggatcaggtgacgggcaatctttttgaggaactgatatttgatttagatagattaaagacagaccatgcaggaagcaaaattgaatttgtagtttccgcacaggctgttcaaagtgaaaataacggaacatcggcagagacagcgaatggctggccgaaggaggcagaataatgaagagagaaaacgaaaggcaaattaagaaaaatttatcaaagatcttgggtgtgctggtactctgtcttataatgcctctcttattttcaatttctgcagaggcgaaagaagcagaggaatctcagcagcaagagaaagtgcagcaaacagagagaataaacgaaattaatacatttgaagatttttttatttttgcaatggcaagtcagacactggattacgagggacacagggtggtcctaaatacagatttggatcttacagatgctgatattaaggccatgttggaaaaatatggtgtaacgcatcttacggttggaacgaaggacagaccgtttaaaggaacgtttgatggtcaaaatcatagaatcaaaggtcttgtctatgaaccgaatattataaaggacccgaatagtggattgttttcttttacagatggagccactattcagaatcttactctggaaaatgcagatatagaagcaatttatcaaggcggaattgtggttggtcatgcaaaaaacacacacctggaaaatctgacagttttaaacagtaagatcaagctgtcttcggcaaacaatgtaatctcgctgattacaaaccttggattctgtggtggaggaatcgcaggaattatggaagacagcgtaatgtataactgtgagatcagtggaacagagattgttaataacagtacatcgggagtcaccggagtcggaggagaaggtctgtatatgggcggtctggtcggctgggcagaagattctacgatcgaatattcaagagtacgttctaattatgtgggagaaagcaatgaattacaggaaagcgttgtcagaaatgattatgatatcgcagtcggcgctcttggaggaaaatccgtttatgccggaggaattgtcggtggtgtgaatacagctgatggagaaacaaggattgtagattgtttctgtacagcagacgtatctttttatgcggcaaactatgtcgcagtcggttcgggaattgcgggatatgcaggcggtatcacaggtgcacttaggggaaattcccacattgagcgatgtcattatgccggaaatattcattccaaacagtacaatgccatccttgtgattccgattattcagacagatgtaaacatcagtggtattgcaaatattaaagagagtcaggcaacggtgacagattcctattttaaacgaagtgaaagcagtaccagtaaaacgataagagcggtggaagattggaacgatacgccacagtattcagcaaaagatgataaaacatatgaagatcgtgagttctggaaagatcatgactatgattttgaaggaacaaaaatcagaggagaagctacagaacacatcaacaaatgggtaatggattatgatttgggaattccggttcacggaagccatatgtctgtgacatttgacttcccgggagcaggggtggtatccgttgatccgactgcgcttgtcaatgaaaaggtatcaacggatgacgcataccattttgcagtccagggcatccaccctcgcggggatgtcaatgcaacgctggaagtaaatccggtggacagcaatccggaagataagattaccgaatacgagtttgccggatggtttaagcagaaagacgtaggaaaagattctgtatcggatatgtctgaactggaagcaatcacacatgcagaaggagcagaaccggtcagtcaggaacaaaggtacacatttaaatttggaaataacgagacagataaggatttgtatattgcctgtctgaaagcccggattgcattccatgaacttgacggaatggagatgacaagcgatacgaaatactatacttatcgggaaaacctggcagatgttgtgccgacggttacgccggatggagccgtattctatggatggacaacggagccaaatccggacgaatcaggcggtggctattccgcgattacttccggaaaattggaagaacttttgaataagggggcaatttaccatgcaggagatccggttgagaaaaccatggagttgtatccaatctttacaagttatatcacaaatatcaaaacagtgtttgaaggacatgaacaggatgaaagtgagcttgtatccgagcggcaaggtgttggtcacacgtctattggaagcgatgacactggtgtattcattcaggtgacaggagcagaagcagatggcgcatttccggcaggatatcgtttccttggatggtatcagcagatcggagttgatgagcagggacagccaatcgaggcgcgagtcagcaatgagcagacatactatgtgccggatgtgtcgaaagaagtaacctatacggcgcggtttgagtattgtatagattattatgtgaatacaaaagacaatgataaagtggatggtgaataccaatatt

SEQ ID NO: 6965 - DNA, 71069 bp, Unknown
  gut microbiota DNA sequence
cacaacaaaaataaagatgtattagaagaattttgaacaaaattccctgtatcaggttttggaggagcaatatcatattcagattaccacgacttctttgaaattaaaagctgtctctgcatacggaaatatctcccgatttattgatgtaaagtgattactgctgtacaaatcgaaaaagtggagttaaaattttgtgaaagaattagaaatagaagaatgaggaaagaggatgcttatatggcatccatgcagagttttgcaatgagagcaagttttcaacttccagttgaaattgttctggaaggggaccggccagtgaagtcggagacatttatgatttgaatgtgggtactgatagacaatgcccctatgtcggagaagacaaaagaccaattagtatgtatgttgatgatgagcggttttgtgattttattttgagggataaaagggtatagagagaaaaagaaaacagaagaataaataaaaaaggatagccgaagtattcagatttcacttttgaagacataaaaagtgaaatctttttttacttttaacccaaattttatataaatgtgatattggattatacgaggcagaggtaatctataaaagaacattgcgcagattgtttgtgcgatggaataaaaacaaagatgtgaagaggtcttttatgaaaaaaacatatgtacttgatacaaatgtgctgattcaggcaccctatgcggtcgaatgttttgaggaaaatacagtggtacttccgatgacagtgttagaagagttggataacatgaaaaaagaagagggagaaaaaggtgccaatgtacgcaaagtgattcggattttggacgcacacagagaaaaaggaaatttgctggaaggggtgcgtatggaatggggagggattctgcgtgtagaaaaaaattaccggaacgttgaattgcctccggatcttccggaacataaatctgataatcgcattctgaaagtttgtgtagggctgtcaaatgatctgaaagaacaggtgattctggtgacaaaagatattcttttgcgtatcaaagcacagttgcttggaattcaggcagaggactttgggacagagcaggttgcggtacatgaggagcagtatttggggaggagagaggtgtttgtaccagaagaattgtttaaagattttaagaaaaagggagttccggtagaatgtgtatattgctgtgatatgagcgggaatcacacttgcccggaattgtttgaaaacgaatttattctgttaaaagcggatcagtcttcgaaaaagactcagttggggcgggttgagaaagggatgatccgaaagcttgattatagaaaagctgctccatatggagttagtccaaggaatgtaggacagtattttttacaggaagcattgatgcagtctgcagagaaagctccgcttgtcattgtaaaaggaatggcagggacgagcaaaactttttattcactggcagtgggactggaaaaattgttaaacaatccatctggagaatatcggaggatcctgatctgtcgtccgaatgctttatttgattctgacattggatttcttccaggtgatgagcaggaaaagatttctcctttgatgcgtccgattatggataatctggaacaattggtagattccagtgatcgtgagcgatattcaaatgagcaggaattgaatgataaaatacaggaaatttttgacagaggaatcatccagacagaggctctgacctttatcagaggaagatccatcatgaaaacatatttgatcatagacgaagcgcaaaatatgacaccggcacagattaagggaattattacgcgtgccggaaaagaaacaaaaataattttattgggagatccaaatcagatagacagaccttatttggatgaaagaaccaatggattgagttatgctgcagagcatatgaagggaagtccgttatgctggcaggttactttgttgccggaagaatgtgaaagatccgtgttggcaacggatgctatccgccgtttgtagaagaaaagcgagtaaaaaacatagaaaggaactgtttagatgaaagaatcagagaaaaaaataaagaaaagtccatatatgatgaatcgggaattatcctggttgaagtttaatgagagagtattgaatgaggcgggaaatccgaaagtcccacttgcagagaggttgacttttgtatcgatataccagtcaaatttagacgaattctatcgagttcgagtaggaacgctgatggatcaaatggatgtatcagaagttgttcgtgagaataaaaccaatatgacaagtgaagagcaagtgaaagcaattataagggcaacacgagagctagaggagaaaaagacggttatttatgaacaattgatgggggaactggagccgaaaggaattcgtttgatcaattttaataagctgtctgcagaagaaggaaaaattctggaggaatattttgacagggaaattgcaccctacttatcagcgaatatcgtaagtaaacagcagccctttccttttttaaagaataaggatatctatgctgttgctcttttggagtcgaagggtgggaagacgagaactgcaatcattccatgcagcaacaatgtgttccgcagattgatcgatattccaactcgaaagggaacctttctgctttcagaagaattaattctgcaatttcttccgaaattctttaaaaattatagtgtgaaagaaaaatctttgattcgtgtcacaagaaatgcagatattgacacagagatgatttatgacgaggatctggattacagagatgcgatggaaaatttaataaaagagagaaagcggatgaacccggtcaggatggaatttaccggaactctgaataaaaaaatgatgcatgcgttatgcaaaacgatccacgtggaaaaggaacatgtatttaggtcggaagtcccattggatctgtcatttgtctttgctattcagagctatctgaaaaatacaaatgcaggggagttgttttatccaagacgaaccccaaggccaacccctcagttgaatgataaggaatctttgattccgcagattctggaaaaagatgtgcttttatcttatccgtttgaaagtatgaaatcctttatcaatctgctatatgaagcagcggaggatgagtcggttgtatcgattaaaatgacgttgtaccgtttggcaaataaaagccagattgtagatgcactggtggaagccgcagaaaatggaaaagaagttgttgtactggtagaacttcgcgcccgctttgatgaagaaaataatattgaatattccagaaaattggaggaggccggctgtcgtgtgatttatggattaaacggatataaagtacattcaaaattatgcctgatttccagaaaaacagagcaaggagtgtcctatgtgacacagatcggaactggaaattataatgaaaaaacatctgcgctgtatacggatctgtcattgattacaggaaatcaagaaatcggaaaagaggctgctgaagtgtttgcagcactgttaagaggagaaacagtggaagaaacccatcttttattagtagcaccaaaatgtttgcagaataaagtgttggatatgatagaagaaattcaacatgtgaaaaatggagaagaaggatacatcggaattaaaatcaattctttgacagacaaggtgatcattagcaaattagtcgaagcgtctcaggcaggcgtaaagattgaaatgattgtcagaggaatctgctgtctgattccaggtgtcaaagggtatacagaaaacataactgtgataagtattgtagggcgtttcctggaacattctcgaatttatcgatttggaacgaaagaaagagagaatgtgtatattgcctcagcagattttatgacacgaaatacgcttcgtcgtgtggaggtggctgccccggttctggatgaacgattaaaaaatcagctggactggatgtttgaaacgatgatgaaggatgatgaaaagggaaaatgtctgacggaaaaaggaatctatgtggatcgaaatcttcatgtacagaaattgaattcccaggagtgcttttatgaggctgcttatgcaaatgcggaaaaaagacagaaatagcagaaaaattttcagacggaaaaatggaattggagaaggcgaaagaattgaattacaaagagatattacaaaatgaggaagtaaaagcgtatttggagaagggcaacgaaaatctcggaattcttgggtataccgatcattccgaaaaacattgtgcaatagttgcaaaacgtgcagggatgattttgtcaaaatttggatatacagaacatgagattgaacttgcagagattgcaggggctatgcatgacattgggaatgtgatcaatcgaaagaatcatggggaatatggggcaattctggcatgttcaatcttggaaaagttgaaaatgccgctgagagacagaatccttgttatgtcagcgattggaaatcatgatgaatctacaggggaggccatcgatgcaatatcagctgcgttgattcttgcggataagacagatgtcaggagaaatcgtgtaagaaataaagaaaaagcaagttttgataagcacgatcgtgtgaattatgcagtgacaagtgcggctgtaaaagtgaatgcgcagaagcatctgatcgcattgaatttacagattgacgaggagatttgtacaatgtatgaatattttgaaatttttctcggcaggatgatgatgtgtaggaaagcggcagaagtactgggagccaggtttaaattaaccgcaaacggaagcaaagtattataggcatggaggaaaaatagaaaaagcagtcggtcggtttgcaagaacagaagcagagataaaagagtttgcaaaatagagtaactctcctgaaagaaaatatggtatagtaaaaagaaaaacgaatacatggagagaaaatatgaaaacgattatcataggaattgcaggtggaaccggttcaggaaaatctacatttacgaaaaaattaaagaaagaatttaaagatgatgtggcagttttatatcatgacaattattacagggatcagagtgacatcccgttagaagagcgaagaaagacaaattatgatcatccggatgcaatggagacagagcttttgatccggcagttgatgaacctgaaagcaggaaaggcagtagattgtccggtatacgattatacacagcatacaagatcggatcaggttgtgagggtggaaccgaaaaaagtaattcttctggaagggattcttgttctggcagatgagcgtctgagagatttgttggacatcaaggtttatgtggaggcagatgcggatgaacgaatcctgcgtcggatcatctgcgatgtcaaggagaggggacgtgatatggaaggtgttgtggagcagtatctgacaacagtaaaaccgatgcattatttatatgtagagccgacgagatgtatggcagatattgtgatcaacagcggaaagaatccggtggcatttacactggtaaaaaacaccatacaaaaaatattggatgaggcagagtaactgcagatatccggacaggctgtaatagaaaggatgagattgtgcaaaagagtataaacaaattgcgaattctgacaccggaaaaatttcaggcggagtatccgcatatttttaaaagaaattttggtgaaattgcgttgaacagagtgcatttctgtaaggcagaatgtctgcgtcaggcagtcacaggaacatttgcgattccaagaaaaacaaagctgacaggagataagatcacgtttgggtactgtattgcagaggaacagctgatctttattgaaaatcaggatcatatcaaaatagagatgaaaaaagtccgggaatatcaggatgaagagcgtacttcgccattgttgcttttgtttgactggatggagtatcttatcaaagatgacatgctgtttctgcaggattatgaagaaaatctttcccatctggaagaggaactgctggagggaaatatggaagattttgacagaaaaatcctgttatccagaaaggaactttctgtgctgagtgcgtattatgaacagttatcggatatgggggaaactcttcagcaaaatgcagcgagacatcaaacagaacaggaagcattgctttttgggcttttctgtgagaaggcaggacgattgtatgacatggtgcagacactcaaagagtattccatgcagcttagagaaatgcatcagacgcagatcgatatccggcagaatgaaattatgaaagtgctgacgattgttacaacgctttttatgccgttgacgctgattgcaggatggtacggaatgaattttgcacatatgcccgaactgactgcaccgggagggtacgggatcatctgtgttgtgtgtctgcttcttattgcagtggaaatctggatttttaaaaagaaaggatggtttaagtagtcatcatttccaataacgcagccccttcagtcacaccgttatgatcgcagtccggaagcatatgatcggcttcttttttcagaatctcaacggcattgcccatggcaaacttcatttcggaagcctcaaacatactcagatcattttctcagtccccgatgcaggcaatctcagattttgcaataccaagtgattgggccagatgcgtcagagcgcccctttggagggttctgatgaaaagatctctgcatactgaccggtgtaggcagcacgaagagacggggagtttgcaagatgcattttgagctgcggcatggagtttttggaaaaaagtaaaactgcagttctttcacatcacatgaaagctcctggatcgtctgttccatattttggacataacggacttttctggcatcttttccatagatcagacgtcccagaaaaacaaggctgtgtccctgcagcagatactcatgtctgatatgcgcagtgataccaagcttctcgctttgacaggcatttaacaaagaaagagcagtctgctttggaatttctgactggtagagcgtcttttgcgtgtgatagtctgtgacctttgctccgtttgaggagatgacatagcgaaacagggaattctgatctgtcagctgatgcggaagtcaggttccatccatatcgattgccagtaatttgatcataatcggtgccttctttcaagtctgtgaatttatggagattattatttatagtgtaacaccttcaaatcaatacgaaaagacttctaaaaaattttttcccacataaaattagaaaaaatatagtaattctatcagatttatagtatacttaaaacatactgaaaaagtaggaattgtaaagaatgagggaaaggatgaaaacaatgaaaaagattttaaaaagtctgccgtttcagcttcttttgggagtgatcatcggaattgtgctggggctgatttcaaatgaagcggtcatgaatgtgatcgtcacgatcaagtttgtattaggagaactgattaatttctgtgtaccgctgattgtgatcgggtttattgcgccatcaatcacgaagctcgggaaaaatgcgtcaaggatattaggagtggctgttcttcttgcttatgtatcctccgtcttagcggcgctgggatcaatggcagccggatatggactgattccgcatttatcaattgtttcggaagtagacgggctgaaagaacttccggaaattgtattccagttggaaatcccgcagattatgtccgtgatgagtgcgcttgcattttctattttgatcgggcttgcggcaacctggaccaaggcagagacagtgatccggctattagatgaattccaacagatcgtactgatgatcgtatccaagattgtcattccgatccttccggtatttattgcgcttacattctggtctctggcatacgagggaacgatcacaaagcagctgccggtatttctcaaggttgtgctgatcgtgatggtggggcactttatctggatggcggttttatatgcagtgggtggaatttactccggaaacaatccgtggaaagttgtaaagcattatggtccggcatacattactgcagtgggaacgatgtcctctgctgcaacgcttgcagtggctttaaaatgtgccagaaagtcggagccggtactgagggatgatatggtcagctttgggattccgctgtttgcaaacattcatctttgtggttctgttctgacagaagtattttttgtgatgacggtctcccaaattttatatggaaaactgccgtcagtcggaaccatgatcttattttgtgcactgcttggcgtgtttgcaatcggagcaccgggggttccaggcggaacggtgatggcttctcttgggcttatcacgggagttcttggatttgatgccacaggaacagcactgatgctgacaatctttgcattgcaggacagctttggtaccgcatgcaatgtgacaggagacggtgcactgactatgattctgactggatatgcaaaacggcacaacatagaagagcaggttggaacggttgaattttaaaattatggaaaaggcagggggcatattgtgggacagccggcaatatgtcccctgtttgcgggaattcttttactttacaacagaaaggacggattttataataaaataaaaagaagtacacaggagcagaggttatgacgataaaagagattgcacagcttgcacaggtgtccagtgcagctgtatcacgatatatgaatggtggatatgtaagtgaagagaaaaaagaacggattcgggcagtgatcgaagaaaccgggtatcgaccatctgtacaggcacggacacttcgcacgaagcgggcatgtctgattggtgtgatcgtgcctaagattaattcggaatcgatcagcagaattacggagggaattggacagatattggccaaaagcgggtatcagatgcttctgacaattacaaataataattcttcgaaagaattagaatatgtggatctgtttgaagcatatcctgtggacgggattattctggtaggaactgtattgaccagggcacataagaaaaagttgaaagaatgtaaggtgccgatcgtggtgatcgggcaatatacaaaagaaacaagttgcgtatatcatgatgattatggcgccgcaaaagcactggcagagcaagttggaagagaagcatccgggagggttgcttatatcggagtgacaagagaagacaaagcagcaggagctgcaagagaagatggatttcgggagggactgaaagaagtcggaaaagaactggaggaatcctgccttcgcagagcaaaattcaccatggaatcaggatatgagcaggcagtggatctgttggaaaaagaacatgatatcgatatcatatcgtgtgcgacagataccattgcggcaggtgcgattgaggcgattgcccagtattcgccggagagaaaaattcaggtgacaggatttggggataatcagtttttaaaggcagttacaggggggatccgaacggtacattttgcatatcagacaagtggaataaaaggtgcagagctgttactggagatgatagaatcagaaaaaacgcgcatgacggagatgaaactgggatgtgaactggtgtaaaaagatttctggaaaaatagacaaaaaagcagagtataaattagtaaaaatgccatctttacaaatggcatttttttcattattataagcttgtcagatatgaaatcgattgcataatttggaagataaaaatttataagtcatgcaggaatctatatcgcgaagggaaaaagagtatggtaaaaaaatggtggcagaatagtgttgtatatcaaatttatccaaaaagcttcttagacagtaatggagatggaataggggatttgcagggaatcatccaaaaaattccatatttaaaaaaactaggggtggatgtgatctggctttgcccggtgtaccagtctccgcaagacgacaatggatatgacatttcggattatgagagcattgatccggaatttggtacaatggatgacatgaaagaactgattcgtgcctgtaacagagaagatattcggattgtaatggatcttgttgtaaatcatacatccgatgaacactggtggtttcaagaagcccaaaagagcaaagaaaatccatatcgggacttttatatttggagaaaaggtaaaaatggtcagccacccaacgatctgaaatctaattttggagggagtgcatgggagtattcagaagaaacgaatgagtactatttacacttttacagtaaaaaacaaccagacttgaactgggaaaacgagaaactcagacaagaaatttatcgaatgatgaattactggctggagcttggaattgctggatttcgtatggatgtcattgatctgataggaaagattccagatgaaaaaataaaggaaaatggaccaaggcttcatgaatatttaagagagatgaatgagaatacatttggaaaaacagatgcgatgacagttggagaatgttggggtgcaactccggaaattgcaagactgtatactgcgccagaacgaaaagagctgaatatgatctttcagtttgaacaaatccagttggacaagcaaaaaggtggtcagcgctgggatttaaaagaacttgatttaagggaattaaaagcggtttttagcaaatggcaatatgagctggatggatgtggatggaatagtcttttttggagtaatcacgacttgccacgtattgtttcacgttggggaaacgatggaaaataccgagagctttctgcaaaaatgctagcaacgcttcttcacggaatgaaaggaacaccttatatttatcaaggagaagagcttggaatgacaaatgttccattcactgcaattgaaaattttccggatattgagacacagaacatctataaagaaagacttcgggcaggattttcagcagaagaaaccatacatgcgatccgcaaaaaagcaagagataatgccagaactccgatgcagtggaatgcagaagaaaatgctggctttacaacgggtacgccgtggtatcagattaatccgaactataaggaaatcaatgctgaggatgaaacagccagagaagattctgttttttcccattatcaaaaactgattcagttaagaaaaaaacatgaaattatggtatatggggaataccatctgcttctcccggaagatgaggatctttatatttataccagaaccctggggaaagaacaatggctgattctgtgtaattttcatgaaaaagagcgggaaattgccagtacacaaataggaagtgtgttactgagtaattatacggacacaccacagttaaaagaactgcatttgttgcgtccgtatgaagcggtaatttatcgacttccagagaaggtggaaatgcacaatgtttgtgctgtatatagtgacaagagtgtcagcattacagaagaaatagaagaaggagaaagcagagaatgaatatagtgtatgatgaggaatataaatcattccatttgtacaatgaaaagatcagttatgtaatgaaaatagaaaagaactgttatttatcacactgctatttcggaaagagaattcgcagatggaacgaagctgcgaaaatgtactattatgaccggggattttgtgcaaacccggacgagacagatcggacgttctctctggatacgatgccgggggaatatccagattttggtcagggagattttcgaagtccggcaatggagttagaatttcaggatggagacagaaatacaagattccattacgcaggataccagattagtgcagggaagttaagtccggagaaacttccccatgtttatgtggagtctgacaaagaggcgatgacactggaaatctggatgaaggatgaagtacgtggtttgcggctttctctgtattatacaatttacgaggatgcggttcttacaagatttgtttcgataaaaaatgagagtgaggatatagtcaaaattcacagattactgagtatgagcctagatctgggggaacaggattatgatattttgacccttgggggagcgcatacagaagagaaaaacgtatacaggagacatctcctaggagactcaattgttgttgaaagcagcaggggaacaagcagtcctcaagcgacgccatttttaggaattatgagaaaagagacaacagaggagcagggggaggtattcggagcaaatctgatatacagtggcaatttctggggatgtgtgcaatgcggacagtatggaacaactagagttcagttgggaatcaacccatttcagttctgttggaatttaaaaccaggagagcagtttgacacgccagaaacagtgctggtgtattcaacagaaggcttgggaggaatgtcggcaatttttcatcggctatatcgaaaacgtgtgtgtcggggaaaattcagagaaaaggaaaggccggttcttttaaacagctgggaaggaatgtattttgcaatcagtgaagaaaaaatgctggagcttgcagatacggctgtagaagcaggaatagagcttcttgttatggatgatggatggtttcgaggaagaaatagcgatacaacatccttgggagattggatagaagatcaagagaaatttcctgaaggtcttcagaaactggctgaaaaagtcagggaaaaaggagtagaatttggaatatggtttgagccggagatggtttctccagaaagtgagctgtataaaaagcatccggattgggtgatccgaagtaagcgctatcgaccgattcgaagtcggaatcagcttgttctggatcttgcaaatccagaagtgcgtgaatatctgattgaggcgttaagcaaaattttgaagaatggaaatattacttatgtaaaatgggatatgaaccggcatttgacagatcttggaagtgcttttctgaatcgagaaaatcagggagaattatcacatcgatatgttttgggattgtattcgattttggaatatctcacagagatgtttccagatgtgctttttgagagttgctccagcggaggaggaagatttgatgcaggaatgctttattatatgccgcagacatggacaagtgataatacagatgctgtgtgcagattaaaaattcagcatggaacaagtatgctatttccgacagtcagcatgggagcccatgtttcggctgtgccgaatcatcaggttggcagaacgacatctctggaaacacgttatattgttgcagctgctggaaatctggggtatgagcttgatttacaaaaactttctcaggatgaaatggagctgataaaaaaacaaattgcacaatacaagagaatccgcaggacagttcagtttggggcttattacagactggcagatccgttttctgaaaatcagtctgcatggaattttgtttcagaagatgggaaacagattgtttttagtcatgttcagattctggcaagatctgcatataggattccaacattacgtctcagggggttggatccaaaggcagaatacaaaaatgtggaaacaggggaggtgtttggaggggatgaactgatgtatgcaggaatcacgattccaagagttcggcaggatttttcagccacaatgattatatttgaaaagatgtaaagacaaggaactacttatgagaaatggaggaagagaaaaatgggaaaagagcaaagttaccaaaatgcggcgaaagagattttgcgcctgattggtggaaaagagaatgtgatcagtgcagcgcactgtgcgacaaggctccgtctggtgttgaagaatgaaaaactggcagatgtagatggaattttaaatacagagctagtcaaaggacagtttgcaactggaggacaatttcagattattatcgggagcggaacggttgacgaagtatacaagtattttattcagtatgcagaattacaagaaagctctaaaaaagaagtgaagcaggcagcagatcagaagatgaatccactacagcgtttagtaaaaatgttggcagatgtgtttgttccgattattccggcgcttgtggcaagtggacttctaatgggattgaacaatgtattgacagcacaagggttatttgcagcaggaaaatcgttggtggatatgtatcctcaaattgcagatgcagcagctatgattaatacatttgccagtgctgcatatgcgtttttaccaattcttgtaggattttctgcaacgaaaatgtttggcggaaatccatacctgggagctgttatgggaatgatcatggtttcaggagatctgttgaatgcgtatgcctatggttctgcgattacggagaatacagttccagtatgggagattggtgcattgacaattgaaaaggtaggataccagggaacggtgcttccagtgctcgcagcagcagcaattcttgcttttcttgagaaaaaattgcacaagacaattccagaatatttagataatctgttgacacctgcgctttctatcctgataactgcatttttgacatttactgtggtaggtggtgttatgaggacggcaggagactggattacaaatggtgttctttggttgcatgatagtttgggggcagttggtggatttatttttggatttatttatgcaccgatgacaatgacaggaatgcatcacagtctgctgccggttgatatacagctgatggcagcaggcggttcgttcttatttgcaattgcagcgtgtaataatgtggctcaaggtggagcaacacttgccgctgtattatgcacaaaggataaaaaaatgaagagtattgcagtgtcatccggtatttctgcattacttggaattacagagccggcaatgtttggggtgaatttgaaaatgaaatatccattctatgcagcaatggttggttcagcagtgggatgtgcttatgtgactttgacaaatgtactgaatatttctccaggagcagcaggtattatagggtttgtatgtattaaatcaggaggaatgcttaattacatgattggaattgcaatttcactgattgttggatttgtgttgactatgggactttcaaaaatgaaaagatttagtaaggcataagcaataggaaaatgaggagagaaaacagatgaatgcattgacaagagatcttgcagatctggtaaaaatcgtagaagcaaaagcagacggaaaagattgcttccgtcagaagctgcatttgatgccaccgacaggatggctcaatgatcccaatggactttgccagtttcacggcgtttatcatgcattttttcaatattccccgttcaacgccaatggtggtttaaaaatgtggggacattataccagtgcggatatgatcacatggaattatgaaggtgtcagcctgtatccggatcagccgtttgactgccatggcgtgtattcgggatcagcgtttattgaagacggaaagatgtacctgtattataccggaaatgtgaagcttgaggacggagaatttgactatatccgaaccggccgggaggcaaacacagttctggtggtcagcgaggacggagagcattttggcagaaaaagagaactgatgagaaacagtgattatccgcaggatctgacctgccatgtacgtgatccgaaagtctggaaagaaaacggcatgtattacatggtgcagggagccagaacgcagaaagatgaaggaaaagtgctgatttttgagtctgaggatcagctgaactggatctacaaaagcgatgtaaagacagcagagcgatttggatatatgtgggagtgcccagactattttgaaacagaaggcagaaagattttatcgacttccgtgcaggggctggaaggcggcgtgtgggatgcacgaaatgtgtaccagtccggatattttctggtagagggggatatcctttccgagtatgtgctttctgactatgaactctgggactatggatttgattattatgcaccgcagagttttgaaagtgaggatggacgccggatccacatcagttggatgggaatgccggattgtgaggaatacacaaacctgacgctggaagatggatggcagcactgctttacatttccaagagaagtgcatgtcaaagataaaaaagtgcttcagcagccggtaaaagaactggaagcactgcgcagaggagaagaaagagcagtctctgttctggagaagaaaggtacaaaagtctttgaggcagaggtgcagaatatcacaggaaatcacttccgcgcagtactggcaaaagaactggttctggaatatgtaaacggaagatttgagatgaagtttacaagccaggataagacgtccgtatccgcgggaagaagtcttagattccgggaagtaagtgaagtcagaaacgtccggattcttgcagatgtttcttctgtagaagtgtttgtcaatgatggagagactgtgttttctacaaggtattatccgcaggattatgaaataaaaatagaagctttggatgccaagattgcattctgggagctgtaaaagcaaaaatgttcccatcgggattttctgatgggaacatttttgttatgtaagaaagactgtcaaatgtacaaatcagtttgcatcttctttgtctttgggcagtacaatgttgaggagtactgcaagcaatgtagccactacaaccggtgatttgccgaagatcatcacaaaccagtccgggaagctggcaagagaatcacttgcctgtgagattcccattcccagtgctgccgcaagtcccacgatggaagtattgcgaaacgtcatattttgtgatgtgatcagtttcattccggtcatggcgatggatgcgaaaacagacactgtggcaccgccgagtacacaatacggaattgtcgttaaaagagacgagaatttcgggatcactccggctatcaacagaatcagtgccgcaccgccgagtacacagcggttgataacttttgtcgttgcaacgattcccacgttctggctgtatgtagcagtcgggagtccgccgagaagagaaaatagaatattggagattccatatcctacgattcctccctgcagttcctgatctgttggcatacgattcattcctccgctggttgtggcggaaaagtcgccgattgcctgaatggagttgattgcaaacagaagaccgattgcgacacaggcggaaggttcgaagcgaattccgaaatgaagcgggcttggcacctggaagagggcagcatcatggataggagaaaagtctaccattccgaagaacagtgcgatgatatatccaccgatgataccgatcagaatggatgccagtttccagattccttttccaaaatgattcaataccgttacaatagtcaatgtcaaaatagcgaccagccaattttgccaggaaccataatcttcgctgcctacccctccggccatatagttaatggcagtcggatacagagaaagtccaattgtaaatacaacggttccagtgatcagaggcgggaaaaatttgcggatcttccggataaaaagtcccacaaaaacagccacgataccacctgcgatcatagcacctaaaatggtggcgacatcatactcttcggcaatggactgcatactcggaacataggcaaagctgatgcccatgatgaccggaaggccggatccgattgtaagataccgggtcttgataaatggaaacagttgtaacaatgtggcaagtgcggaagtgaccaaggcagcctgaattaaaataacagagtcagcttccgaaagtccggctacaccggatacaatgatagcaggcgttacacagccgacgatcattgcgacaacatgctgcagtgcaagtggaaatgcctgattaagggcaggcactccgcttagttcaaaaatggtagagcgggttgtctgatgtttcataaataaggtgtccccctttattcgagatggatccgggttcctgtaagcccctgaattccttctctggctttttctagtaatgtgatcaaagattgccttccgggtgcagattctgcaaattctacggccgcctgcatcttcggaagcatggagccgggagcaaaatgaccttctgcaatatactgttttgcttcagctactgtgatatcatccagccatgtctgttctggtgtcccgaaatgaatggctgctttttctatagcagtgaggatgatcagaacatctgcatccagttcttttgcgagaagcgcactggcaaaatctttgtctatgactgcactggcaccttttagatgattgccctgacgaatgaccggaattcctccgccgccacaggcaatgacaaggtcaccggaatccaccatcgtccggattgtgccgatttcaatgatctcctgtggttttggagaagctacgacacgacggtagcctcttccggcatcttctttcataatgtagtcatatttctgcgacatttcgtctgcctgttcttttgtaagaaaacgtccgatcggtttggacggacaggcaaaagctggatcatgttcatccacacgtacttgtgtgatcatagttgcgacaggaatatcggtgatattgcgatttaagagctcttcacggagagcgttctgcagatcatagccgatataagcttggctcatggcaacacagacagaaagaggggtattgggctggtgtgcatcttcgtgagtcagggcgagcattgcgttgttgaccattcctacctgagggccatttccatgagcaatcacaacttcacatccttcctcgatcagatcaacgatggcgtgcgctgtgatcttgacagctgccatctgttccggaagggtgttgcccagggcgtttccgcccagggcgatgacaattcgtttcttccttgtcatatctattcctccctgattgatgcgattgtttctacctcacataaaactccttttggcagatcttttacagcaacgcaggatcgcgccggtttgcctgtaaaatattttgcatagatttcattgaatgcagcaaagtctttcatatctgcaaggaagcaggttgttttgacaacatctgtaaaatctgcattctggctgttaagaagcgctttgatatttaacatgacctgttcggtctgttcctcgatcgtcgttccgacaacttctcctgtttctggagaaagtggaatctgaccggagaaaaatgcaagtccgctgcagacgattccctgagaataaggtccgattgctgccggtgcatttttggtttctacatattttagcatagcttagtccctccttgaatataatccatttcgcatcgtgttctagtataacaggttttactcaaaaactctaggtgtggatttctcttccagcttctttaagatatcagcaggatctgcaaattttgcaagaaagatcatggctgcgatgatatacggtttgtagctggcttctttataaagtggtgttctgtagcggtcgaatacgctggcatcgacttcaccggattcgcagctgacacctgtgatatctgcaggcagacagtgcaggtagagcgcgttaccgtctttggtcgtcttcatcagttcttctgtacaagcccagtctttgtgctgtgcgttctgttccagaagttctttttccagagcatcgattcccgcaaagtcaccgtttccatataattcagtacgtttttccatggcagcaaacggcgcccagctctttggataaacgatgtcggcatctttgaaagcttctgccatattgttggtctttgtgaaagaaccgccggattttttcgcattttcggcagcaacagcctccacttccgggaagacttcatatccttccggatgtgccagtacaacgtccattccaaaacgtgtcatcagtccgatcacaccctgtggaacagagagcggttttccgtaggaaggagagtatgcccaggacatggcgatcttcttgcctttcagattctcgacaccgccgaattcatggatgatgtgcagcatatcggccattgcctgtgtcggatggtcgatgtcgcactgcaggttgacaagtgtcggtttctgctgaagaatcccgtctttgtgtccttctgtcacagcatctacgacttcgtgcatataagcatttccttttccgatgtacatatcatcacggattccgatgacatctgccatgaaagaaatcatgttggctgtctcacgaaccgtctcaccatgcgcaatctgcgattttccttcatccagatcctgcacctcaagtccgagcaggttacatgcggaagcaaatgagaagcgggtacgtgtggaattgtcacggaataaagagattccgagtccgctttcaaatacttttgtggagatgttgttttctctcataaaacggagtgcgcctgccagtgtaaatactgcttccagttcgtcgtctgttttttcccaggtcaggaaaaagtcagagttgtacatgtctttgaagttgagtgcgttcagtttatcgatgtaatcctgtaatgttttcatagtgtgattcctccatatactcaggctgtgcctgttgtgtttcttgttattttgaaagtttatttacaatataaagtcggcagtgcagcgtaaacagcggcacatactaccaggtctgccttccaggtcttttcatttggtgcatgagcctgtgcttctgctccaggaccaaatccgatacaaggaatgccgtttcgtcccatgatggaaacgccgtttgtagagaacgtccatttgtcagtcagtgggcgggcttttctcatcttagcagtctctggtgttccaatcctttcttctccgtaaagtcccttgtaggcttcttccagagcttttgtgactttgtggtcttttggaatgacccaggtcgggaagtagcattcgatcggatataccagtccggtataggatggtctgtcatagttgtacatggaaaccgttacatcctccccatatttctgtacgcttggaagtgcacgaatctcatccagacagctttcccatgtctctccggcagtcatacggcgatccagagaaacagagcaggagtctgcaaccgcacagcggcttggagaagtgaagaaaatctcagaagttgtgatggtaccccgtcctaagaatcttgcttcttcccattccggattatatgtttcatccagcatttttacgagtcctttgatttcagttgtctcttcggcatcgttttcgttcagtgcacggacatcctgcaggatatcagccatcttgtagattgcattgtctccacgctccggtgcagagccgtgacaggatacgcctttgacgtctacacggatctccatacgtcctcgctgtccgcggtagataccgccgtcagtcggttctgtggataccacaaattccggacggactttatcttcgttgatgatgtattgccagcagaggccgtcgcagtcttcttcctgtacggttccggtgacaaggactgtatatttgtcacttaaaagtcccagatctttcatgatccttgcaccgtaaactgcagagacgatacctccgagctgatcagaagtaccacgtcctccgatctctgtgtcagattcgaatccttcatatggatcgaattcccagttgtcacggtttccgataccaacggtgtcaatatgtgcatcaaatccgatgagtgtctctccagttcccatatatccgagtacatttccctgcggatcgatctcgactttatcaaaatccagtttccgcatctcttcggcgatccgttcaatgtgatccttttccccacagctctcacccgggaattttacgatctctctgagaaattttgtcatatccgcttcatagttctgtgcagcttctttgattttgttgaaatccattttaaaatcctccttgataaacataatgaatgaaatggtttcctgatctaacgttcattgccgtcccatacgatggattcgtaacgggcaggatcggtatctccttcggtggagaaaagcagtacccgggaagtttcatccaggcccaggtgttctcttaattcctgatattcgtccatgcacatgatgcaggcgagcgttccaaacggtgcggctccggattctccggaagtgaccggcgtatctcccttgatcggtgcggcgagcatccgcattccttttgcagcgacccagtctggtgcagcaacaaaggtatccacatgattctttaagatatcccaggagatggtgttcggttcgccgcaggcaagcccggccatgatcgtcggcatgtcaccgtctacaatgcggatcgcaccgtctccggcagcagctcctttgtaaaggcaggcagccgcttcggcttccacaacgaccactttcggcggggtcttgggatagcggttcgcaaaatatccctgaacagcaccggcaagggatccgacaccagcctggataaatacatgagtcggggcttcgcagccgtcttcatgaagttgatcgtcggcttccatggccatggttccgtatccctgcatgatccatgccggaatttcttcatagccgtcccacgcagtatcctgcacgatgataccatgttcagttctggcagccatatcggcagccatgcgcacgcattcatcgtagttgcattcttcgatcgtagcagtggcgccttcttttcggatgttgtttaaccgtgtctgtgtacttcctttaggcatcaggacaactgccttttgtccgagcttgttggcagcccaggcaactccgcgtccatggtttccatcggttgcagtaaagaaggtggcctgaccgaactcttttttgagcgcttcagaagtgaggatgttgtagggaagctcgctgacatctttccctgtctgctgtgcgatgtaacgtgccatggcaaaggatccgccaaggactttaaaagcattgagtccgaatcgataggattcatccttgatgtaaagtgaaccaagtcctaatttttcggccatgtggttcagttttacgagtggtgtgacactgtattgcggaaaactttcgtggaacgtgcgggctttttccacctcggaaagtgccatgaccggaaggttggcatcctcggtcttcggcatatgattgactgcccatttgattgtctccatgtgtaaaacctccttatgatctgctattttcctgcatccatataactgtaaagtgtaaatttagaaatattgagaagatttgcgaccttatctcctgattttgtgatcagaaacgcacccgcatcattcagatagcggaccacctggatcttatcttccttggtcattaaagccaccggttttccgaccagtgccacgccctgctgcatcagatcgtttaacagctcttctacattgcgtgtgatcgtctgcggcgagtgcggcttgctgactgtgtaagtatctgtttccggttcggtgtgaagaagcgaccccagtgcactgtctatcgtaagaagtgctgtgatgtcatagttgatggaaaagatataagaaatcttttcatcggcatcccgtatgtaaagggtactggatttcaaaatccggccgtcctccgtgcgtgtgagataagaaagcttatcttgtactttggcagcgtttttgtgcaaggtctccagtacgatcccggaaggtccgtctccggacttgcggtttgtcacctgtccgttttcaatgtggacgatggaggtctccagatccttgttcagatcatgaatgacaacttcacaggaagttccgaactgttttgcaatgccatgcgccatttgctttagaagcttgagtgtatgatccatagtcatccctccctttgtgaaaaacattggtaaaatctgtcaaaaacaactgcttctaaactcataatatcataaaaatccataaaatcaatagtttttctaaaaaagttttagaatacctaaaaaagttttagaatcgtgttgcatttgtgcagttttgatggtattctataaacagcaaaagcggttctggaagatatgcacaaaaatagaagactttcaaaaagaaaaggagaggttgatatgcttattttaggaaacggcaggatgatcacaagagatgcggacaatccatatctggaatgcggggccgtggtgattgacgggacaaaaatcgtgaaggctggtacgctttcggaagtgaaggcggcgtatccggatgcggagtttttggatgcaaagggcaaggtgatcatgcctgcctttatcaatgcacacgaacatatttacagtgcattcgcaagaggactgtccgtcaaaggatatgacccaaaaggatttttagatattctggatgggatgtggtggacgattgaccgcaatctgaccttgcatgatacatatttaagcgccatggctacatatattgattcgatcaaaaatggtgtgacaacggtatttgaccatcatgcaagctttggttccatccgtggttctttatatgagattgaaagggctgcgaaagaaaccggagtccgctcctgtttatgctatgagatctcggatcgtgacgggaaggataaggcaagagattccgttatggaaaatgcagagtttatccgtcatgcacaaaaagaggataccggcatgatcgcgggcatgatgggaatgcatgcacagtttacaatttctgatgagacgatggagctggcggcagcgaacaagccagacggcgtgggatatcatatccatgtggcagaagggatcgaagatctgcatcattgtctgaaacattatggaaagcggatcgtggatcgtctgatggactggggaatcctgggagaaaagacactgcttggacattgcatttatatcaacggccatgagatggatctgatcaaagagacgaacacaatggtggtacacaatccggaatccaacatgggcaatgcctgcggatgtccgccgacgatggaactggtgcacagagggatcctgaccggacttggaacagacggatatactcatgatatgacagagtcttacaaagtggcaaacgtactgcacaagcatcatctgtgtgatccgaatgccgcatggggagaggttccgcagatgctttttgacggaaatgtcaaaattgcagagcgttatttcccgcagaagcttggtgtattgaaagaaggagctgctgcagatgtgattgttgtggattatgatccgctgacaccgatgaacggggacaatgcaaacagccacattttattcggtatgactggaaaacaggtagtaaccacagtggcgaatggaaaagtattgatgaaagacagagaacttgtatctatagatgaagcaaaagtgatggcagactgcagacaggcggcaaaagagctggctgagaggatcaacgcataaggagggcatgaggatgagtgaagttatgacaccgatgtcatttgaacagttggtagaatgggtattacaggaaaagaaaaaaagaggaaccgtgttcggacagcatcatgcgtaccgggcagatggaacacataaccggacgatgttcgggcgtactctggagacgccgattggaccggcagccggtccgcatacgcagatgacacagaatattgtggcagcctactatgccggcagtcgtttctttgaattgaagaccgtacagatcatggatggagaagagctggcggcatgcatcaaccgtccgtgtatcaaggcggatgatgaaggatataactgcgagtggtccacagagctgacagtaccgcaggcaatggaagagtatatcaaagcctggttcttattgaaagtgatcgccaaagagtttggacttggagatatgaatggatttcagtttaatgtcagtgtgggatatgatctggcaggcatccagtccccgaaggtggataccttcctgaattccatgaaacacgcagaagatacagagattttcaagaactgcaaggcatatttactggagcatgcggattggtttgagcacgtgacaacagaagatatcgagcagatcccgccggaaatctgcaattccgtgacactttccacactgcatggatgtcctccgcaggagattgaacggatcgccatgtatctgcttacggaaaaaggattccatacctttgtaaaatgcaatccgacactgcttggatatgagtttgcgagaaagaccatggatgagatgggatatgattacatacagtttggagacttccactttaaggatgatctgcagtatgaagatgcagttccgatgctgacacgcctgatgaatacggcgaaagagaggaatctggagtttggagtgaagatcaccaatacgttccctgtggatgtgaaacagaatgagcttccaagcgaagagatgtatatgtcaggaaaatccttgtatccgttgtccatttcactggcagcaaaactggcaaaagaatttgacggaaggcttcgtatttcctattccggaggagcggattactataatatagaaagaattgtggatgcaggcatctggccggttactgtggcaacgactcttttgaaaccgggcggttatcagagactgacgcagatggcaaagcttctggacaaggagaatgctccgtttgaaaaagtggacgcagaatctgcaggaaaacttgcagaagaggcggtgaaagacccgcattatgtgaaggcaatgaagcctttgccgtcaagaaagatgaaaaaagaagttccgctcatggattgtttcgtggcgccgtgtaaagagggatgcccgatccatcaggatatcacaacgtatctgcagcttgtgggagaagaaaagtatgaggaagcaatggaagtgatcacagagaagaacccgcttccgtttattacaggaacgatctgtgcacataactgtatgagcaaatgtaccagaaacttttatgagacacctgttcatatccgggagatgaaattaaaagcggcagaaaatggatatgaggcgctgcttgaaaaacttccggtgccggcagtgacaaaagcaggaaaagcggcagtcatcggaggcggcccggcaggaatggcggctgcatacttcctcagaaaaggtggtatggaagttacgctatttgaggcaaaagaatctttaggaggcgtagtacgtcacgtgattccgccatttcgtatttcggaggatgccattgaaaaagatgcggaaatcttaagaaagatgcaggtggacatccgctgcaatacaaaggtggaatctttggaagaactgaaaaagcagggatatacaaagatcgtactggcagtgggagctccggttcagggaagcttaaagctggaaagcggaatgccgaaaaatgcactggaatttctggcagaatttaaacagacagacggtaaggtttcacttggaaaacatgtggttgttatcggaggcggaaacacagccatggatactgcaagagcggcaaaacgaaacgcaggcgtggagcatgtttatctgatttacagaagaacgagacggtatatgccggcggatgaagaagaactggtgatggccctggaagatggagtggaattcaaagagttattgtctcctgtaaaactggaaaacggccagcttttctgcaaagtgatgcagctttccgattatgatgtatcgggcagaagaggagtgacagagaccggggagacagtttgggttccggcagatacggtgatcgctgcagttggagaaaaagtgccgacagactggtatcaggcaaacggtctggcagtatcggaaaagggaagattatatgtcgatgaaaagacattaaaaaccagtgatgacaatgtctatgcagcaggcgatggtctgtatggaccggcaacagttgtagaggcgatccgggacggacgaaaagtggctgaggcaattgcaggagaagtgttggcgcgtgattttgataaactggcagaggaagaaaaggtctatgccaagagaggggtattaaaagaggaacagaaagagacaaaagaggcaggcagatgcctgggatgctcgacaatctgtgaaaactgcgtagaagtctgtccaaaccgtgcaaacattgccattcaggtaccggggatggaaaaacaccagatcatccatgtagattatctgtgtaatgagtgcggcaactgtaagagtttctgtccatattccagcgctccatatctggataaattcacacttttcgaaacagaagcagatatggaaaacagtaagaatcagggatttgcagttctggatcaagagacccgacgctgtaaggtacgcttctttgggaagacctttatctgggaaccggagaaaccggcagctcttccggatggactgggacgcatgattgaaactgtgtgcagggattactcttatttgattcggtaaaatcaaaggttgcaggatctgtgggatttcggtaaagtgaaaggggcttctgatgaagaagccctaaaaaaagaaagagacagcaaacagacatgacaagtatatggaaatgggaaagcggaaatctacagatcaagaagtccctcttagatggactgcagattacagagacagcaaaagaagtgatctctgtagtgggagcaggaggaaaaacaactacgatccgcaggcttacggatgaaatggaaaaaagacagaaaaatgtggcagtgaccacgaccacacggatgaaaaaagaaccgcattttttactcggtgcggatgcagagcgcattacacaaagatgggggcagactcatcaggtgtggtttggagaacaggatgataatccggaaaaggtcagaggtgtttcagaagcgcttctggatgaggtgagaaagtatggtccggatttgtttttgatcgaggcagacggagccagaaggcttccctgcaaagtaccggagtcgtgggagccggtcatctatcaaaaaagtacacgggtgctggcagtttacggtctggacgcagtgggaaagtcctttcgggaggcgtgttttcgtcccgggctggcagcagaaattttggagaagaagataacagacccgatatcagcagtggatattgcgcggctggcacttgaaagccgcggcgggaaaaagaatgtcaaagaaaccatgcggtatcaggtgattttaaataaagcagacaccacgcgaagaagacagtttgcgcaggaaatctgccgggaattggaaaaacgcgggtttgcagatgtgacagtgacagcagaaggaaggcaggaagaagaatgaagattgtaatcaaaggagcaggagatctggcaacaggaattgcctctcgcttataccatgcaggacatcagattgtgatgacagagattgcggttccgctgaccgtgcggcgaagcgtggcgctctccagagcagtttacgaaaacgaggcagaggtggaagatttaaaaggggtgctggtaaaggatgctgcagaagcagacaggatcttacaaagaggagagattccggtactggtggatccagaagcagatattatcgggtcgtttcatccagatgtagtagtggatgcaatcctggcaaagaagaatctgggaacccggatcacggacgcgccgtttgtcatcggtgtaggaccgggattttacgcaggaaaagactgtcactgtgtcatcgagacaaaaagaggacatacactgggaaatgtgatctgggaaaaagaagcaatcccaaataccggagttccgggaaatataggcggctttacaaccgagcgtctgatccgtgccagtgcagatggaatcatggagcctgtggcagaaatcggagataccgtagaaaaaggccagcttgttgccaggaccgggaagcagccggtctatgcaaagatgagcggaattgtccgcggaatgctccagaaggatgtacaggtcacagaaggattgaagatcggagacattgatgccagatgtgaaccagagcattgtgttacaatctcggacaaagcaagggcagtcggaggcggtgtgctggaagcggtatctctgtttggacagatctatggaaattatggagtggcacttctggcagcaggggaagcaaaacggtttggaagtgacaagttgtcggaaaaatttcagggaatccctctttatcggcatgcacttgagaagctggaagcattttcgggactttccagggtggtcgtgaccgcaagagaagcactggcagaagaagcgcagcgcctggggatccatattgtagagaacagacagccggaacagggaatttcacattctgtcagtttggcgctgcaggaactgctctcacaaaatccagacctggagggtgtgttgtttctggtctgcgatcagccgggaatccaggctgctacaatccagaagattttaaacgagggatgccttcataaaaacagcattgtctgtgccggatatgatggaatgcgcggaaatccggtattgtggggaagcacgtattttcaggagcttatgcatctgaccggggatacgggcggcagacagctgatgaagcaatatgaagagaagatccggatcgtggagtgtgcgccggaagaattaaaagacattgacaggagagaagacatgacggaataaaacggggagtaccccaaaggaggttttcatatgctgatggttcatgtaaatggaaaagattatgaggtggagcaggatacgaagctgatgcggtttcttcgggatgatttaaggcttacttcagtaaaggacggatgcagccagggcgcgtgcggaacctgcacggtgctggtggatggaaaagccacaaaggcatgtattccaatgctttccaagctgcagggaaaatctgtagtcacagtggaagggctgagtgaacgggagaaagaagtttatgcatatgcatttgcaaaggtcggcgcggtgcagtgcggattctgcattccgggcatggtgatgtgcgccaaggggcttctggatcagaatccggatccgagccgtgttgaggcggcggcaaccattcggaataatatctgccgctgtaccggatatcaaaagatcatcgaggcgatcctgctctcagcaaagatgtttcgggaagatcttccggccaaagagaacagcggcgtggtctctgtcggggcaccgatcctgcgtgtggatgcaaaggagaaagttcttggaaccgggcagtatccggatgatgtgtatctggatgatatgatctatgccagtgcggtgcgctccgaatatccaagagcaaaagtgctggcgatccatacagagaaggtattggaattagaaggtgtgatcggagtatatacggcggatgatattccgggttctgtgaaggtgggacatctgaaaccggactgggatacaatgatcccggtcggacatgtgacacattatctgggagatgccatttgtctgatcgcagcagagacaccggagattctggaacgtgcaaaggcattggtaaaggtggattacgaagtgctgcaaccggtgctggatccgtttgaagcattaaaagaggacgcaccccgcattcatccgggaatccagccggatggaaatgtactcgcccatgagcatctggtcagaggaaatgcagaagaagtgatcgccaactcgaaatataaagtgaccagacattatgaaactccgtggacggaacatgcctttttggagccggagtgtgcagtggccatgccgtttgatgacggagtatttatctattcttcggatcagggaacctacgatacccagcacgaatgcagtatgatgcttggacttccgccggaaaaagtgattgtggaaaacaagctggtaggcggcggatttggtggaaaagaggatgtcagtgtacagcatcatgccgcactggtggcatacctgacaaagcgtccggttaaagtaaagctgtccagacaggaaagtatcaccgtgcatcccaaacggcatccgatgtggatggatattaccacagcatgtgatgagaacggatatctgactgcaatgaaagctgtagttgtatcggatacaggtgcgtatgcatctctgggcggaccggttctgcaaagagcctgtacccatgcggcagggccttacaatttccagaccattgacattgacggaaaagccgtgtataccaacaatccgccggctggagcatttcgcggattcggcgtgacacagacctgttttggagcagaacggaatctggatctgctggcggagatggtgggaatctctccatgggagatccgatatcggaatgcggtgcggcccggacaggtgcttccaaacggacagatcgcagatgcctctacaggaattgcagagacactggaggctgtcaaagagatttatgaacaggcgccgtatgcaggaatcgcctgtgcgatgaaaaatgccggtgtaggcgtggggctgccggactggggaagatgccgtctgctggtgcagaataaaatggtacagattcatgcgggagcttcctgtatcggtcagggacttggaacagtcctgacacaggtggtttcgcagaccgctcagattccggtggagcagatttggtactgtcctgcaaacacatccaattctccggattccggaacgacatccggttccagacagacattgatcacaggagaagcggcaaaacgggcctgtgaaaaattgtgtgaagatttaaagacacattcacttcaggaactggaaggaaaggaatactacggagaatatcttgcaaagacggataaaatgggcagtgatgttccgaatccggtttctcatgtggcatatggatatgcaacacaggtctgtattttgaatgaagatggaacgattcagaaaatggtggcagcccatgatgtggggaaagccgtaaatccaatcagtgtggaaggccagattgagggcggtgttgtcatgggaatgggatatgcactgacagaacagtatgagatcaaggaagggcgtccggtttccagatttggaacactgggattgttccgggcagataaggtgccgcatattgagtccatgatcatcgagaaaacaggagtagaaccgggatacggtgcaatcggaattggagagatcacatcaatcccgacagctccggcgatcacgggagcctattataaactgactggtgagttccagacgaagctgccgcttcatggaacaccgtatgaaaagaaaaagaaataaagaagaaatgagcaggcgctgatttctcaggagattcaacgcctgcgcgatttacacatcaagttgtttttgaaaataacttgatgtataataaaagaaaaacacaaaacgaggaggtatgagatgaaacgaagaaaaatctggagtattctggcactggcagcattgacaggttccctgcttgcaggatgcggagaagtaaaaacagaagaacagacaaaagaaacaaagcaggaggaaaaaccggcagaattactggtggctgctgcagcgagtctggaatattcttatgaagaagaactgcttcctatgtttgaaaaggaaaatccgaatattaccgtaaaaggcacctatgacagttcgggaaaattacagacacagatcgaagaggggattgaggcagatgtctttatgtcagcggcgacgaagcagatgaatgcgctgacggagcagggattggtggagaaggactctgtggtagatcttcttcagaatcagatcgtactgatcacagcagcagattctacgctggatctgcagaactttgaggatattaccaaagtaaatgtgatcgcaatcggagatccggaaagtgttccggtaggacagtattcgaaagaagtgctgaccaatctgggaatctgggatatagtgtctgcaaaggcaagtctcggaaccaatgttacagaagttttaaaatgggtagaagagggcagtgcagacgccggaatcgtgtatgcgacagatgcagcgactacagataaggtgaaagtagtggcagaagcaccgaaagacagtctggcagagcctgcaatttatccggtcggcgtggtaagcgcatcgaagcataaagatgcagcggaaaaatttgtagagtttttacagtccgaagaggcactgaaagtatttgaatcctacggttttcagaagaatgcagagtaactggggaaggagagcacatggagatttcaccgatcattgtttctatgaaaacggcttctgtgtccattgtgatcactttttttctgggactggcagccgcatatggcgtggagcgtatccgcagcagaaagctgcagctggtctgtgacggtattctgacgcttcctcttgtcctgccgcctacggtggcaggatttttcctgttgtacatctttggggtaaaacgcccggtggggagattttttctggaatttttcgggacaaagattgcattttcatggcaggcaacagtattggcagcagtggcgatttcgttccctttgatgtaccgttcggcaagaggagcgctgcagcaggtagatgaaaacctcctttatgcaggcaggacgcttgggatgtccgaatggtgcattttctggaaagtatggtttccaaacgctatgtccggaattttgtcaggcggaatccttgcatttgcaagaggattaggagagtttggagcaactgccatgatcgcaggaaatattgcaggagagaccagaacgcttccgcttgcagtatattccgcggtgtcagccggaaatatggaagaagcgtatcagtatgtgtggattctggtgatcatttcattcctggtagtgacaggaatgaatgcagtcacgcacggatttcagaaatttagccggaggtagtacagatgaacgtattagaagtgaattttgagaaaaaactcaagaactttcccctgcatatacaatttcaggcagaaggcggatgtatcgggattctgggagcttcaggctgcggaaaaagtatgacattcaaagcgattgccggaatcgagacacccgattcgggaaaaatctgcctgggaaaacgggaattgtttcacagaggtcataaagtaaatctgccgcccagaaaacgcagtgtgggatatttgtttcagagttatgccttatttcccaatatgacagtgtttcaaaatattgaagcaggaatccagggaaaaaaggcggcgaaaagagagcgggcaatggaaatgatggaaaaatttcatctgtcagagctggcatccggctatcccgcccgtctttctggaggacagcagcagagagtggccctggcgaggatactggcttgtgaaccggaactgctccttttggacgagccgttttctgcactggacagttacttaaaagaagaactccagtttgagttgaaacaacatctccgggagtttggaaaaacgacaatcattgtaagtcatgaccgggatgaaatatacaagttgtgtgacagaacgatggtgatgggccagggcgaaattctggtttcaaaagatacgaaagaactgtttgaacagccggagcgtgttattgcagcgaggctgacaggatgtaaaaatatttcgagagcgaaaaagcgtggaatgcataaagtgtatgcaatggattggggcgtggaactgacggtagaccggaaagtttcagaaaaaatcacccatgtaggaattcgggcgcatgattttcatccggcggatacttcgtcacatgatagtgagaataaaattccggtggctgtggaccgcgaggtacgcgcgccgtttgagtggacgattttatttcgaaacagagaaaatccgaaagaaaatatgtggatgaagatggagcgggaacagacacagatcccgcagtgggtacaggtggacccgaaacgaattttgcttttagaagaataggaggatgtgagagatgtttcatccgacattaaaaattaaaatatatcaggaagatctggtgtttggaccgggactggtcattttgatggagcacattctggtgacggagtccatgaaggatgcctgcggggaaatgggaatgtcctacagcaaaggctggaagatcatcaaccgggcagaaaaagaactgggctatgagttgttggagcgcaggcacggcggaaaaagcggtggaaaatgtacggtgacagaaaaaggaaagtccctgatgaagcgctatcgccagatggaaaaagaaacaagggactgcctgcagaagagctttgaaaagtattttccggaatatcaaaggattcggtagattttcctttcattcagaagtataataaaaaacaggccacagaacaaaacagtgagccggaaatggaggaaaaaagatgccgaactggacaagaggacagctgaaaaacaatgcaaagatgaatttttataaaaattactggatgtgcgtaggcatggcattgattttgacacttgtgctgatgatggaaccggatggaccgaaaaaagagatcatgttgaagatcagagattacaccgatattcttcctgcttatggatatcagggctggttgtcaagtctgtttgatgggttgggatactggtttggagtattatggtccgttttttcattgtttattgcattggtactgcttctgatcaagattgttgtgggaaacgtggtctatgtaggcggcattcgtttctttattcagaacaggagagagaatccgtctgcgggaactatatttttcggatttcagagtggaaattatggaaacatcgcattgaccatctttttgaaagatctgtatactgcactttggacacttttgcttgtcgtgccggggattatcaagcactatgaatatcggatgattccatatattctggcagagaatccgacaatgccaagagaagaggcatttcagatcagccgccgcatgatgatggggcagaaaatggatgtattcgtattagatctttcatttatcggctggtttattttagaaaagatttcatttggactggcaggattattttttgtaagaccttattatgagactgtatttgcagagctgtatgaggcaaataaacagaaggcataccgggaaggatatatccggtaatatgaaaaggggctgcatcaggactttcatcctgtgcagccttgagaaaagggaaaatttatctaaaattaggtaatgtcaaaaataaatatctgggcgaagtccaatgaccacagatgcgctgcatgtgcagccatcgtcttctgtttttgttgatagatatagaataccagtgaattgtgaatgagatgtgacaagaagtgaaaaaatatcttaattaaatgtaatgaaagtataaaaaggagcttatagattttttagaattaggaagtctgattgacgagatgcatcgtgtttttggaaacagagttccagaaatccctgcgtgcatcgtactgctccaaaagccaggaaatcgcagcatccattccatcctcggtcatgggaaatgtattctgtgttttttgttcgtctggtgtcttttcaaatgaccatggctccggatatacaaatacgagaaagttttcttttgtatcgtcagcacaaaaataatagcgcattccaaaatgagaacctgaaaagggttctttttttaatcctttgacagggatgagtttcttatcgatcatggtgttccctcctgaaaagttattaactatagagtaacactgcatcagagaagatgcaagaataaaaggacaaaaggaaagagccacatttctgtgactcaaagggggaaaaagtttatgaaaaagtgttctgttcttttgaacaattatagtataaaaagaaattgtgtaaaaaatgtgatataaatttgaatctaatgttaataaaaccaaaagaaattgtgaagcactaattttgtccggcattttctgcaaaatcagttgtgaccagtttttcataaggagcgcgggccttcagctcgccggcgctttccaggatatcctggagcagttcaaagctgtcacgttcaaagatcagattttctttccaggaatcctgctcataatagcgggatacgatggttgtgatcgtggaaaggtctgtttccgggaattgcggttcaatgattttggcaatctcttccggagaatgtgtctgtacgtagtccattcccttttgcagggcatttacaaatccctgaatagtatctgaatgttcactgatatagcttttgcgggcactgaaagcggtataaggaatgtatccgctgttggttccgagagaagcgaccacatatcctttctggcctgtttccagggatgtggctccgggttcaaattctacggtatagtcggcctgaccttctgagaatgcggcggcagtggaaccaaaatcaatgttttgtacaatgttcagatcggttttcggatccataccgtgttgctttaagatatattcaaaaaccatttccggcattccgccctttcgtccgccaagtacagtgcttccttttaaatctgtccactcaaaatcgggcctctcttctctggcaacaagaaaattgcctgcgcgctgggtgagctgggcaaagtttacaacaaagtcagaagcgccttcgttatacgtgtaaatggaagcttccgaccccataaatccgatatctgcttcaccagaaagtacagcagtcatcgttttgtcggctccaaatcctgtgacgagttccagttcaatgccctcttgccggaaataatctttttcaatggcaacatacataggggcatagaaaatcgagtgtgcaacttcatttaaggtgagttttgtcaattcctctttggaagaatccggattgccgccggtcggggtactgttgtttgaagagtggcatcccgtaagcaggatcatggatgcggcaagaagaaatgtgagaattctttttttcataagcactccatagtttttaaagatgttactaaaagtatatgccggaaaaaaagaagcgtgaaaaaaaccggtctgaatgaaatcagaccggcataaaattataatttaaaattagtagttatcgtggtcctcttcgaatggatcatcataatcatcaaagtcttcgtcttcctcagtgtcacgtctggacaagatcgtcaggatcaggaagatcactgcaagtacaacacatgcgatcgcactgtataagagcatcttgtcatcaccatgtttcaggaaaccgatcacgctgcatccgatataaaagagcatcgggagcaggaatgcaaaaatcgtattgctcttctgaagaatgagaagaagcagtccggagatcagcatgcaaagtgccatgatgacatagaaagtaccaatgttggaattacttccggaggtaatgctgtccagtccgctgatcactcctttgtatgtaaagaaaccaaacgctacgatagaaagaagtccgaaaatcacacggagtacccggaatcttggagtgatgtaatcatcctcatattcttcctcgtcttcgatttcttccggttcttctactggcttcggcgccggcttgcgtttgtgtacagactttctgtccggatcagatgcaagcatatcctcgtaactttttttcactgcacgttcacgttttgcacgtactttttcagaaggaatattaccgtaacgctgcccttcttcggaaggttcctgtttgaattcttccggaacagaaatcactcttgtttttgaatctgcaggagccgggcgttttttcttaggtacagcatcagaagcttcggaatcaggacgttttttccgaggcgcttcttcagaatgatcagagaccggacgtttctttttcggtctttcggaatgctcagaaacaggtctttcggaagctggacgcttctttttctgtacaggctgttttggctcgtctgtgtgctcagcgattttcttttgttctgttgcttttgtttcttctgttttttctacaggtgcttttggcgcctcctgctttggagctgcttctgtatgttttgctacagaagcagccggtttaggagccgatttttttgcacgttgtttgtcaagattccattgttttttgcagtctttgcagattgcgtattcgtttaaaaccggattgccattttcatcaacccctacttgctttttctgtaaaatgacatcctttccacattttgggcatttcattatttatatctctcctttgtatcacttgttgtgactcgttttacctacgataaagacattatagcattttgtttgacgaagaacaacgttttttgtcaaattatcgtgattggagagtgggtgtgttactgaacagtaaccgggtgtgctccctctatgattttggtttgacgagtggagtctgatattgataaacatcattgtaggcatcaagctcgtcctcggattcgggcagcgccgggatcagtccggtgcagtctgtggaggaagcggcattttttaaataatcataatggtcaatcagttcttgattttttttcatttctttttgtgtttctttatccaaaattatcacctcggatttagtgtatccatgatgaaaaattgtattcagaacaaaatgtggtatactgaataaaaaatcaaaagaaatggagtggataaattatgagattgatcgcagatacacacgcacatacaattgcaagcggacatgcatacagttctttgaaagaaatggcatatgcagcatcaaaaaatggactggaagtattatctttgacagaacatgcacctcaaatgccgggatcttgtcaggagatttattttcggaattttaatgtgatcccgcgcgaaatgcatggtgtgaaactgcttcttggaacggagctcaacattatgaatccggacggagatctggatctttcagaatctctctgcagaaatctggacattgtgatcgcatcgattcattctccatgttatggacttgatcataccagagaagaaaatacgaaagcttatacggcagtcatgaaaaagccgtatgttgatattatcgggcatccggatgacggcagatttccggtagattatgaagtgctggttcaaactgcaaaggagacaaagacgcttttggagatcaataacagttccttaagaccggatggattcagaaaaaataccagggaaaatgtgctgcaaatgttagaattatgcaaacaatatgaagtttgtgtgacaacgggaagtgatgctcacattgacgtggatgctggaaatttcagctatataaaggaagttttggaattttgcaagttcccggaagagctggtggtgacaacagattttaataaattaaaggaatttttgaataattataaagaatcgtaatatttctttaaaaaattgaaaattgtctgaatctctaaaatctctataaaaaagtggactttaaaaatttagtgtgataaaatgtaaaagtagtgacctgactgacaaaggagaggtaagagatgagtaaaaaaatcagaacagaagcagtagattacctgtttgatgcaatcttgagtctgaaggacaaagaggagtgttatacattctttgaagatatttgtaccatcaatgaattgctctcactttcccagagatttgaagtggcaaagatgttaagagagcagaagacatatctggagattgcagagaagacaggcgcatccacagcaacgatcagtcgtgtgaaccggtcattgaattatggaaatgacggatacgatatggtgtttgagcggatggaaaaataaaagatgtgaagaaataaaaatgcccggccagtatagccgggtatttttatttcttatgggaagaatcttcgctggaaaacgtatcgattagtttttcaatcatcattttttttacgtatacgtcaaaactcaggctgcagataaatgccagaatctgaaaagtatctttgctggtatcaggaatctcggaaaatgtctctccggcagtctcccaggcagaagaaatattttctttgagcggttcaagctggcctttgcacatggtgcagatctgctggtacatatctgcaaggctggaagtatccttgtcagaatcctgaccaaagccggcatctgtcatcggctttaacagtgtctcgatatccttgatggaaagaatacttttaaaatagtaaataaaaatcagaaggagcagatgatccttggaatatttcttcttaacaggcggcggaagcagattgttcttcgcgtaattgttgatcatggtcttggtcagaatcttgtcatctgcgtagcgcttggttgaagaaagctgagtatccataaatgtggtcacctgatccatatataagtcgatattcggaatatcctcgggatgaatgtagtcgatccgggacagactttccagtatgctgtttaaaatatcatttgtatcaattgtcatataatcacctcgatgtacttattatatagtaatgaaaaccagatagtcaagcagtatttattattgatatatgatcataacgagagtaaactaaaagaaaaacgggaggatttcagatgttgaaagcagaactcagtcgatttaaggtaaaagaaggaaaatccgggaaagtagatgaatggatggcctttctgaatgaccatatggaagatacacttcttacattagagaatgaaaaaatgtttgtagaatcgattcaccgggaagtggtcaacggaacagaatttctgtattggtactctgtacagggagaaggcggtacagaggtgtacgattcagaaagctatatcgatatcaggcatctggaatattgggatgaatgtatcgatgatgattataaagataatgatattccggcagaagtagtgatgatcccaaataagatcagagatgttatgaagtgaatacagtcattaaaatcccgctgttttgtaaggaaatggcggagattttttatctgtttccataatatagttgacttgaacgaaactatgttcgataatagaatcatgacaattaaaggagatcaattatgagcatttatgatacactgaacgaacagcagagggaggcggtctactgcacggatggtccgcttctgatccttgcgggagcgggatcgggaaagacgagagtgctgacgcacaggattgcatatttaatagaagaaaagggggtgaatccatggaatatcctggcgatcacgtttacgaacaaggcggccggggagatgcgggagcgtgtggataatctggtaggatttggatcagagagtatctgggtgagcacgtttcattcgacttgtgtacggattttgagaagacatattgaccgccttgggtatgatacgaattttacaatctacgatacggatgatcagaagacattgatgaaagatgtctgtaaacaggtgcagatcgatacgaaggtatataaggagagaaatcttttagcggcgatttcggcagctaaaaatgagatgatttccgcgcaggagtatgcattgaatgcgcagggagattttggaaaagagaagatcgctaaggtatatcaggagtatgaaaagcagatgcatgccaataatgcactggattttgatgacctgctcgtgaagactgtgcagttgtttgagactcagccggatgtgttggagaattaccaggagcggtttctttatattatggtggatgagtatcaggatacaaataccgtacagtttcagctggtgagtctgctggcgggcaaatacagaaatctctgtgtggtcggtgatgatgatcagtccatttataaatttcggggagcgaatattaaaaatattttgaattttgaacaggaatttcccgatgcgacagtcatcaaactggagcagaattatcgttctacaggcaatatcctggatgctgcgaatgcagtgatcagcaacaatgtgggcagaaaggacaagcagctttggacagacaacggcgaaggagagaagattaagttctgccagtttgataccggatatgatgaagcagaatatattgcagatgacattgaaagggaagtaagaaacggggcatcttacaatgatcatgcgattttataccggactaacgcgcagtcccgcctgtttgaggaacggtttgtggcacagaatattccatataagattgtcggcggtgtgaatttctatgcgagaagagaaatcaaggatgtgcttgcatatctgaagaccatcgacaatggaaaagatgatctggcagtcagaaggatcatcaatgtaccgaagcgaggcattggcctgactacgatcaatcgaattcaggagtcagcggcgtccagaggaatcggattctatgatgctcttttagggctggatctgataccgggggtggcaagaggtgctgcaaagctggaaggatttgtggcattgatcgagtactttaagggagtggcagaaactttaagtctgtcggatcttttgcaggaagtgatcgataagactggatacatagagagtctggaagcagaaggaaaagaagaggcagagacgagaattgaaaatatcgacgagcttcgaagcaaggttgcggtttatgaagagtcccgtctggatcaggacgaaaaaccgacgcttagcggatttttggaggaagtcgcattggtggcagacattgatagtctggatgaggaacaggattatgtagttttaatgacactgcacagtgcaaaaggtctggaatttccacatgtgtatctggcaggaatggaagacggactgtttccaagttatatgacagttacatcagatgacagggaggatatggaagaagagcggcgtctctgttatgtgggaattacaagagccgagcagaaactgaccatgaccagcgctatgcggcgaatggtgcggggagagacacagtacaataaagtatcccggtttatgaaagaaattccattggaactgcttgacaatggcaaccgttcttcgaaaatgtttgaagaaagacaggagattccgaaacagactgcgtatacgcaggcaaaacagacttttaaggcaaaggcattttctgcggctgcgccaaaacagtttgcagtcagcaaagaaaaggggctggattatggtgtgggtgaccgtgtccggcacatgaaatttggagaaggaatcgtgacacagattacggaaggcggcagagattttgaggtgacggtagagtttgacaccgtcggagtgaaaaaaatgtttgccggatttgcccgtttgataaaattatagaaattatgtgaatttggcataaatcagtagtaatctgaaaatgatagtgttataataatgaaaagcaaacctgtacggcggcaaggagaaaggacgtgaatatatgagtaaagttgaggaattgatcgcagagtcaaaactgaatgaattactgaaaaagaaagatgatgaaaaagtgaaaaagacagtcatctgggtattggcgattgtaggtgctgttgcagcagtggcagcgatcgcatatgcggtatattgcttctttacaccggattatctggaagatttcgaagaagattttgatgatgatttcgatgattatttcagtgaggaagatcaggtttaatcagaacgaaaagagaacagaagacaggatgtggtcggaatacactgcaccctgtctcttttttcgtcaggaagtattgcaaaaacaaagaaaagataaggataaaagagaatgaaaaaaggacaagtattagaaggaacgatagaaaaagtggaatttcccaataaaggagttgtcacagttgcagaagaaggtaaatctgtgatcgtaaagaacgggattccgggacagaaggtaaaattttgtgtgaataagtttaagcgaggaaatgcagaggggcgcctgttggaagtgctggagaaatctccgctggaaacaagaaaaccggtgtgcagcattttcccggcatgcggagggtgtatgtaccagactatgtcttatgaagcacagatggaaatgaaggcagaacaggtgaaaaacattctggatgaagccgtggatggtgaatatctttttgaaggagtgaaggcaagtccgaaagaatttgcataccgcaataagatggagttctcgttcggcgacgagtataaggacgggcctctgacattgggactgcataaaaaaggcagcacgtatgatgtgctgacagcgtcagactgcaagctggtacatgatgacatgacaaaaatcttaaattgtgtgctggaatattttaagcagcgaaatgtcagctattataagaaaatgcagcatacaggctatctgcgtcatttgctgcttcgaagaggtgaccgcacaggagaaatcctggtcaatctggttacaacgacacaggaagaacacgatatgtctccattaaaagaggcactccttaatttggaactggaggggaaaattgtgggatttctgcatattttaaatgattctctttctgatgtggtgaaaagtgatgagaccaggattatttatggacaggactatttttatgagaagctgttgaatctggaattcaagatcacgccgttttctttcttccaaccaaattcaagaggggcggaagtgctttacagtacagtgcgtgattatatcggagatatcaacgatatgacagtgtttgatctgttcagcggaacagggacgatcgcgcaggtgttggcaccggtggcaaaacaggtgatcggtgtggagattatcgaggaagctgtggaggcagccaaagaaaatgctgcacacaacggactttccaactgtaaattcattgccggggacgtatttaaagtgttggatgagattgaggaaaaaccggatgtgatcgtcctggatccgccaagagacgggattcatccaaaggctctgccgaaaatcctggattacggagtggacaagattgtgtacatttcctgtaaagtgaccagtctggcacgggatctggagatgatacaggcgagaggatatgaggttgtgaagagtgtggcagtggatcagttctgtcagacggtgcatgtggagactgtggtaggactacaaagggaacatacctagaaatccttgaatttacgcactttgttgactttttcagtttcaacagattagaggaaaatcacaaggaaaaggtgcttgtaaagaaagtcaccgttgtggttgccttagacctcggtacggggaacacaaaaaatcctgaattatgaaagtgaatatagaactatcaattattgatagaagatagggatacttggagcagagtgtccctattttttatacaaaattttaaattcaggaggaaaaacaaatgtcaaaaaacacagcgttaggagcagaaaagagcaaggaaagaagaataatttttaagaacaaggaacatgaaaaattttataacacctatctttcaaaatgccggtatcaggacacataccataaagcattggtttactgcctgggattgtcagaggagcgccaaaagacggtacgtggttcggggaaattgagaaatacgaagagacggtattgacaaaaagagtgtaggagggaaaagccgtgagtgtattggatacaaaatttgtacagggatttatccgtatgtgtaacgatggatgggagcagggatggcacgagagaaacggcggcaacctgtcttaccgcatcaaagacgaggaagtggcggaggtaaaagagttccttcattatgacaatgaatggaaaccgattgccaccaaagtccccggacttgcgagcgaatatttcctcgtaacaggcagcgggaaatatttccgcaatgtcatcattgatccggaggatagtatctgcatcatcgaactggatgaaaaaggagagaattaccgcatcctttggggcctggtaaacggaggcagaccgaccagtgagctaccgagccacctgatgaaccatgaagtgaaaaaaggcgttaccaatggagcgcaccgggtgatttatcatgcacataccacgaatgtgatcgcactgacatttgtactgccgttggaggataaagtatttactagagaactctgggagatggcgaccgagtgcccggttgtatttccttccggaatcggtgtagtaggatggatggtgccgggcggccgtgagatcgcagtggcgacaagtgccctgatgaaagaatatgatgtggcaatctgggcgcatcacggcatgttctgctcaggggaagactttgatcttacattcggattaatgcacaccgtagagaaatccgcggaaatccttgtaaagatgctgtccatgagaccggataaaagacagacaatctcacctcagaatttcagagatttggcgaaagattttaaagtaactttaccggaaaagtttctatatgacaaataatgtacatatcacatatttggcgtatcagaagcatgaagcatgtttcgatattccataggcgtacatccgtatttcttgcggaacagctgaaagaaaaagctggtattctgatatccgacggcaaggctgatatcatttgtggaaagtgcggtgctccttaacagttttgccgcctgagaaagccgctgtgtctggaccagctctttgtaagtgattccggtatgctggcggatataggcagagagatagtttgggtgcatattaaaaaactcagctgtagaagaaagggtacagtccgcaaagtttgtttcgatatatcggagtatggtataaatctgatccactgaggagtgatccagaaccataccgtgctggaacagattgatcatctcacaggtgatcagtgtaaaaagactgtctaaaaaaggcccggatgttacggacggagaataaaattcacagagaaactggttggtaagatctgccagccggttttgtttttgttccggggaaaagacaatatacctgctttcctgcatcgtggtgttcagagcctcaatgaaaaagtgtgtaaggtaattatcctgagacaggcgttcaaaaaaagtaccgttcagatattcgcgcgtcagcagaaaattgatgataatatcattttctgaacatcttttgacagaatgaggtgcattctggctgatcagaaccatctgcccggattttagcctgaatgtagtcttatttatcgtcattgtgcaggcgccagaataaatataactcaattccagccactcatggatatgcagaggtacgttttcaaaacgatcttgttttacaacagcgaagttgtaataactcggaagaactttctttgaaagaaataaagaacgcagatcttcaaggttcgtatcaaaacggtaacagggtgtatcaaacttacctctggcaacaggaaattgtgaataatctttctttacaccgttcagacgctgggtttcttcgggagtgtgctgcttcagaaattgattcaatgcagataatgtcatcatatatattctctccttttcaagatatgaatgaactgtgattatagtcatcagcagtttatttaacctgtctaaaatataccatattgggggcaaaggtgtacagagtaatctcggatatttattaagtttggtcggtaaatcacttatgtttcgttgatgtaattttagtctgtataatgtaagatatcagtaagaaaaggaggcataggttaggatgaagatattttttgcagtagtggtgattgttttattatttgtaatcggtgcgacattatatgtctacaaaaaaagtgccatgtttttaccggcacttcttggcatctgcggatttccaaaaataaaggaaagcagctattacgatgaaaacggacatttccgtccgggaacgggggaggacaaagttggatttttcatgcagcatccggtattcggcggttttaaacatatgtttttcaatgtggaggacaacgtgctgaaagctattgcgcctgtaaagtataaggattttttaaaggcgcagggccgtgaggaacaattggatgcagccttggaatctttcaattatctaaccggacttgttgagaaaggtcaggcaaggctggtgtcggatctgtatcctgcggaagcagtgaagggtcatccgtacaggtcacatctgacgggaatgttttatcagggacaacagggaaaaccacttgccattgtagttccgggaggcggatttatcagtaatgtaactgattgcgaggggtatcctgtggcgatgaagctgcataaaatgggatattctgttttcgtcgtaagttatccggtcggcagacagctgggtgagacagaacaggtaaagcagggacaggctgccgcgagggaactgacacaagtgattcgatatctgacggagcatcaaaaacagttttctgtaaacatggatgattatgccatctttggtttttcagcaggaggacttatgaccacggcgtattcatttgccaattatgaggactgctgccacaagaatcatctgccaagaccgaaggtgatcttccctatgtatggtctggactggaatatcaaagctttgcaggaggacaagggactggcggtattttctatcgtagggcgggatgatgagttcggttttgcaaatgtggaagataaactgccggaattagagaaggtactgggcaaagaaaatgtgtcggtcagaatcgttgacggactgggacatggatttggaataggaaatgaaacaaaagtgaaaaactggcttcaggaagcagtcatcttctgggaagcccacagataggaacagataagaatttatttaaggaggatttcataatgagcagaaacttgaaagaattgatcagacagatgacactggaggaaaaagcaggactttgttcgggagcggatttctggaacacgatgggaatcgaaaggttagggattccttccgttatgatgacagacggcccgcacggcttgcgcaaacaggaaggcgcggcagatcatctcggcctgaataaaagtgtgaatgcagtctgctttccggcagcctgcgccacggcgtccagttttgatgtggaactgatggagcgtatgggacagactctgggagatgaatgtcaggctgagaacataagcatgctcctcgggccggcagtgaatatcaaacgcagtccgctttgcggaagaaattttgaatatatgtctgaagatccctatctgacaggaaagatggcgtcagcatatatccggggcgtacagtcgaaaggcatcggaaccagtatgaaacacttcgccgcgaataatcaggaaacagaccgtatgcagatatcgtcggaagtatcggaacgggctttccgggaaatttatctgccggcttttgaggaggcggtgaagaaagcgcagccaaagactgtgatgtgcagctacaataagatcaacggagtattttcttcagagaataagaagcttctgacagatatcctgcgagatgagtggggatttgaaggatatgtggtcagtgactggggagctgtaaatgaccgggtgaaagggctgaaagccggtcttgatctggagatgccgggatcagagggatataatacaagaaagattatccgggcagtggagaatggagagctggaggaggagattcttgacagaacggtagagcgcatactgaaagtagtcttctcctacgcagataaccggaaagcagagactgtatttgatagggaaaaggatcacaaggcagcggcagatatcgaaacagagtgtgccgtacttctggaaaataagggggcgctgccgctgagaaaagaacagaaaatagtctatatcggggaatttgcaaagaaaccgcgctaccagggcgggggatcgagccacatcaatacggacagcgtagtgtcagctctggaaactgcggtgagaaaaggcagggcagtggagtatgtgaagggcttctcgtcagagcgtgacgaaatgacagaagaagaactgaaacaggcgtgtgaagcggctgcgggagcagatgcagttgtaatctttgccggactgccggacagctttgaatcggaaggatatgacagaacatccatggaactgccaaagtgtcagaatcgtcttatagaggttgtggctgagatacagaagaatgtggtggtggtcctacataacggaagtcccgtagaaactccgtgggctgagtctgtaaatgccattctggagatgtatctgggaggagaaggcatcggggaggccagcgaccggctgttattcggggaggcgaacccggggggacgtctggcggagactttcccatatcgtttggaagacaatccgagttacctgaatttccccggagacggcaggactgttctctatggagaagatatctttgtcggataccgctactatgatgcgaagaaagtaccggtgcgctgggcattcggacatggtctgtcatatacggaattcagctacagcaatatgaaactctcttctgtagaaatgaaggatggagatgttctgagggtaagcattgatgtggagaatacaggaaagatggcaggaagtgaagtagttcagctctatgtcagcgacaaagacagcaccgtgccaagagcagtgaaggaactgaaagggtttgcgaaagtatttctgaatccgggtgagaagaagacggttacaatggagctttgtgcgagagattttgcttactacgagacaaagattcacgactggtatactccgtcaggtacatatgagatccagatcggacatgccagtgatgatataagagaaactgccaaactttcatttactacagatgtatcgctgccgtttactgtagatatgaccacgacaatgggagagttaatgagccacccgaagacagcaggaaaaatgatggagtatcttgaggggatatcacagggagaagaatcaaagaaagaagaaggagaagtagaacttgtgactccggaaattatagcccagatgccgctgaagtcatttctgagtgtgattccaggtgaagcgattgaacagatgattgtagagttgaattctctgtgtgcagaagagggaaagtgagaataaaatatgaatcaagataagataaaaatgagagaaaagctgtcatttgcaatggcaaactttggaaacattccgattatgacactgatcaacggatatttactaattttttataccaatatatgcggcttgagtcctgctgcatgtgcgacactgttcctgatcgcacgctttctagatgccattaacgatccgttagttggatttataatcgaccatcttccgaccagaaaaatgggacatttccgaccgacattgattctgggaacaattctgtgtagcgtcaatttccttctgctttggtttggacctatgttatcaacatcggggaaactggcaatcgcatatgtatcgtatattctgcttggtgtgttgttcccagtcatggatatttcgctgaacagtcttctgccggttatgacagaagatatgaaagaaaggaacagcttaagtacaatcaaagggcttgcatatgtgatcggggcgcttgtaatcggtgtggcagctccacttattcttggagatacttctaacaaacagggatatattaatcttgttctgatcatgacagcagtgatttttttcttctctattataggaaccatgggagtaaaagaacgtgtaaaaccacagatggagaacagctattctgtaaaagaattattcaagattctcagtcagaagccggtgtacattacattccttgctgtactgttatattcgattggaagcaatatcgtgaatgcagcaaatacatacttttatacatatatttttgaagacctgacgttggcgtctattattacgcttattacatgtgttgctgtttttccggctacaatggtcattggtaatctgattggaaggtttggaaagaagaaaatgtatgcgattggacttgcacttgcaggacttgcaccaatcatccgtctgttggatgtgaggagcattccccttcttattgtctctgtattgattgcaggaataggagccggctttgcagcacctcttaattatggaatacaggcagataatacagattatatcgaagtgtctatgggaattagggcagaaggtgctgtcgcatctctttccagctttgtctccaagtgtgcaatgggaatcggtggtgcgattccggggtatctgctgcagttagcaggatttgacagtaaggcggcagtacagaatgacgatgtgattaatgtgatcgtcctctgtgtgctaatattgccggcaatcgtaaatgtggtggccattgtgatcttctcaaaaggttatcctattaccaaggaaaaattgaatgagcagacatatctgttgagggagaaacggtcaaaagcgggaataagtgaataagaatgatagagaaggagtatcagcatgggaaagatttatgcggcaaaaacaaatcatatcacaaatccgatagggtttaatatggatactattgcattttcatggaaagtgaaaggatgcaggggacagaaccagaaacatgcaaggattgtaatcagcaagaataaaacctttacagatatctgttacgatacaggtgaaacagagttggacagcctctctacaagagtagaatttgaaatacagccgtatacaagatattactggaaggtcattgttgcaacagatgtagaggaagtaatcgaatcagatgtacagttttttgagactgccaaaatggatgaaccatggactggaagatggattacttgtgacagcagtcaggaacgtcatccgattttttcaaaaaggattgaaccgaaaaaaaaagtgaaaagagcaaggttgtacatttgcggtctgggattgtatgaggcatattttctgggggaaagcaaagaaaatcctgagaaaatcggtgatgagtatctgactccgtactgcaataattatgaccagtggatccagtatcagacgtatgacatcacgaaacaggcagaacaaggcggtgtgctgtctgttcttctcggaaacggctggtataaaggcaggttcggtttcaatgatccggagcgggaagcatattacggtgacgagtggaagctgattgcggagattcacatagagtacaaagacggaacgaaagatgtgatcagttctgatgaaacctggtcagttacaagaagcaatttgtggttttccaatatctatgacggtgagagaagagatgatacgctgccgccggtagaggagtctcctgcgcggatcgcaaaggttccgaaaggccggcttatggaacggttatctcttccggttaaggtacaggaggagatgaagccggcagaactgatccatacgcctgctggagaagatgtatttgatctggggcaggagatcgcagggatcttccgactgcgtgtacatgagccggcggggacaactatcaggattcagacgggagaggtgcttcaggacggatgtttctataacgagaatttaagaactgcactttcggagtacatttatgtttctgatggtacagaaaaggtgattacgcctcattttacatactatggctatcgatatgtgaaagtgaccgggattagggatctttcatgtgaggatttcacggcgcttgttctttacagcgattatgagagcatcggggcaatcgagacagggaatgatcttgtgaacaaattgatctccaatatcgaatgggggatgaaaggaaacttcctggatgtgcctacagactgcccgcaaagagatgagagaatgggctggacaggggatgcacaggtattttctgcgactgcaagctatctggctgatacctacgcgttttaccggaaatatttatatgacatgtatcaggaacagcttctggcggacggaatggttccggagattgtccccacattcggaccgacaaaatgttcctgcgcatggggagacgctgcgtgtatcattccgtggaacgtatatctgttcagcggggacaaaacaatcctggaaagccagattgagagcatgaaggcatgggttgattatattcgcaggattgacggagatcatcacggatggagacagatcttccattatggagactggctggctctcgaccgtacaggcgctgccgcgaacagtgtgtacggggcgaccgatgaagcatatatcgcggatatctactatgcggcaagcgcccagacagtcgcaaaggcggcggacgtgcttggactggaagaaacgagacaggaatatcaggaaatcgcagaccgtcagtggcgggcagtgaaagaagaatattttacttccacaggaagatgtgcggtgaagacgcagacagggcttatccttgcgctgaagtatcatctgtctgaaaatgaagaactgacaaagcagatgatgaaaaaactcctccgggacaacaaaaataaactgaataccgggtttgtgggtacgccgcttctgtgcaacgtgctgacagaccacgggatgacggatgcggcgtaccggctgcttttgaacgaagaatatccgggttggctttatgaagtgaagctgggggcaacgaccgtgtgggagcgttggaattcactggatgagaacggccatgtctccagcacgggaatgaacagcctgaatcattattcatatggcgccgtactggaatggatcttccgccatgcggccgggattgatgtgacggaacagagtccgggaggccgggtgatgcggatcagcccgaaagtgaatcgcggactgggatatgtaaaagcggtttatgattcagcatgcggatgctatcagtgcggttgggagatatcaggggataataaaatcactgtcactgttacagttccgtttggcggaagggcagaagtggttcttccacttgcgccggaatctgtatatgaagataaagaaaacccactgtttgaagatgtagaaaacggaatttgccgtgtgaaagccggagaatatgaagtcacttatgaggcgtcacagcctttaaagaggaaatacagcatagattcgacaatggaagaactgctgaaccatccggatattcgcgcgtttctttctcaaatgatggaagtggatatgattccggatattgcatatggactttcgcttagagatgtcgcgaaaacattcgcaggagagataaaaaaagatgaggcgcagatgctggatacggcgcttgcgaaattctgatcaggaaggctgctatggagcttacaagacttaaggtaaacagtcaatacagaccatgcgtggacgaagcaccttatttttcatgggtgattaccagtgacaaaaagaatgtgatgcagacatcctatcatattacagtgacaggtctgggagaagtggtgtgggattccggggtggtagaaagtgataaaagtacttttgtagagtacaacggaaaaccattgaaaagtctcagtgactatagctggacagtggaagtgacggttaataacggagaaaaggcagcggcatcctcatcctttgagacaggatttatgaagaaagaatggacggccgagtgggtgaaatctccgttcccgatgaaaaaggtaaaacctggaaccggcgggcagaatccggcagaatatttccgcaaagaatttgacgcacgagacggtataaaacgggcacgcgtctatgccacatgccacggagcatatcagctcagcgtgaacggaatacgtccggacgacagagagtttgctccggaatttaccgtctattctaaatatctgtgttaccagacttatgatgtgactccattcttgagagagggaagaaatgtcataggaatgttagtgggggacggctggtatgacagtgcgaactttaaaccgagaagcaggaagtttaaagccgaacattctgtgttatttcagataaagattgattatgaagacggaacgagtgaaattgttctgtccgatgatgctgtgaaggtttcggaaagtccggtccggtcttccgatttgtttgcaggcgaactctatgacgcacggatggaacaggaaaactggaactgctgcggattcgatgacagcagctggaaagcaggtatcccatgcggaaaatcttacgcgaacctggtagctcagtacggggaaccggtgcgcccggtaaaggaagtaccggcagtcggaatgacagtcagcccgaaagacgagacgatcattgacttcgggcagaatctggcgggggttctgcgcgtaaaagcgaaactgcctgccggaacaaaaatggtattagatcattttgaaactctggatcaatatggaaactatttcaataatattttcatgtcagagaaaacaggacacaaacaaagcgatatttatatttcaaacgggaaatttacagaatatataccgcattttacatatcacggtttccgctatgtgagagtgacatgcaatcagccggtgagtccggaggatttcacagcgattgtcctgtcttctgacaatgaggatctgggaacttttgagacgtccaacgaagatataaaccggctttacgaaaatacaagatggtctcagcggtcgaatctgttctcaatccccacggactgtccgcagagagaaaaaggcggatggaccggagatatccagatttatgcaagaacagccatgctcaacgaaaatgtaaccccgtttctgacaagatggctgcgtaatatgacctgcagccagcagaaaaacggagcgattcccaatgtgatcccccttaccggaatctatgaattactggagaaactgaatcggatcgtataccgcaattttgaaccggtgggagaagcgggatggggagatgccgcttgtatcgtaccgtggagcatgtatcagcttacaggaaatatcaggatactgagagagcagtatgacacaatgaaaaagtggtgcgactatatcatcaacactgcaaagaagcgtagaggcaagatgaaacatccaaaagaaattgaccagtatctgtggaatacaggacatcagtacggggagtggctcataccgagccagacagtagacggagcagaccaaagcgctgcaaaacctatcaatacttctgtatactgcgcgccaatctttggatggaattcctgtcggatcatggcagatacagcagcactcctcgggcatacatcagacgaattatactatgatgacattgcgtccagaatgaaatctgccattcaaaaaggactgatcgatgatgatgggaagatgcctcttgattttatgggcagttatgtgctggcaatcgcatttgatcttgctcctgaaaggaagaaaaaaagtatcgccggacatttgatccgcaagatagaagaaaacggggattgtctggatacaggattcctgacgacaccgtatctgctggatgcactctgtaagatcggcaggatggacaaggcatataaaatcctgctccagacaaagtgcccgtcatggctttatgaggtgaagcagggagcgacaacaatctgggaaaattacatttcttacaaggaggacgggtctccggttatgacaagcctgaaccattatgcctttggatgcgtggacgactggatgttccggaagataagcggcattgatatggctgcttccggatttaagaagattgtgattgcgccggagccgaataatgcgtttacaagtgcaaaacgtacctatatgagtgagtacggtaaagtaggggcagagtggagtatggaagaggggaaatttaaattgaaagtggagattccctgtaacacaactgccactgtaaaactgccggatggcagattgtatgaggtggggagcggaatatatcagtttgaataaaagtatcaaaggaaataaaatgacagtatttgtgagaactgaccggcaaaagcagacggtcagtttttcttaatacgaaagttgaaaataatacgaggagtttaggattatgaaaaagaaaatattgaagattaccttaagtgtcgttttaattttgattctggctgtgggtataggtctggcatatttagtaggggcggcaggcggtggtggaccgtttgattttgtttggaagaacaaactgaaaaaaatgccaggaaacgcagaaaaatatagtctggaaaatgtagaacccttagaaaacagtccgcttgaaggaaagcgtatttgctatcttggatcgtctgtaactttagggctgtactcaatggatgtttcctttgtagattatatctcttatagaaatggctgtgagtatgtaaaagaggccgtaagtggtactactttagtggataacggaaagacgtcttatatccagaggatgaaaaataatatcggtacagatgagaaattcgatgcatttgtctgccagctttccacgaatgacgcgtcgaaggaaatgccgatgggagaactcagcagttcagaaaatctggaggattttgatacacagacaataacaggagcaatggaatatatcattgtatatgcaaagcaggcatggaattgtcccgtgatcttttataccggaacaaaatatgacagtaaacagtatcagcagatggtagatgtattgtttgagcttcaggataaatatggaataggcgtgatcgacctttggaatgacgaggagatgaatgacgtttctgaaaaagaatatgaagtttatatggcagatccggttcatccgacgcaggcaggatatctggaatggtggacgcctaagatggaagaatacttatatcagtttttagaaagatgattattatattaagtttcgtcggtaaaatgcttatatatcgttgatgatttgccctttgggattatttataattaaatcaaacaatgaaaggacggataacgaaatggaaaatgcagttacaaaaagagaaaaaatcagttatggtttgtattttatgggacagaatgtattctatggactgataggatatatgactacatattttacagatatcggcataacggcagcattggttgcgatcgtggcgctgatcacgaaagtgtgggatgccatcaacgatccgatcttcggtatgatcatggataaggtaaattttaagaaagggaaattcctgccgtggcttcgaatatctgtcatagcgattccggtggcgaccattcttctttttacaatacctaccgggattccgatgatggctaaaatcatatgggcaacacttgcttatatgttatgggatacagcctataccctttgcgatgtgccgatttttggtattgttaccacgatgacaatagaccagaaggaacgtatttcactaaacagtataggaagaatgtttgttatttttgcaggtattgttacaggaattgtcctgccgttggtacggcagcggttaggcggctgggcgacaacagtaattgtgttatctcttttgtcagctgttatgatgattccgatctgtctgttcgcaaaggagagagtaattgaaaaagaaagagtactggacgaaggggcagaagaaagttatacgctgcgcgatatggcagaatgtctgcggaagaacaaatatttattgattttctttgcggctccgctcatcagcagcctgcttaatgttggggcaaattggggcttatacgttgcccggtactgccttggcggtgaagaagctgcctcatatgtttcgatgacggtgattattccgaccttgattggtgcggttatggcagtagaattatgcaagaaatatgacaaatttaaagtcttctatatttcatatgttttcgctttacttttgggaattgtaagattcatggccgggtatgagaatatgacggtgtatgtgattttaaatgccttaggaggaatcccgctgggaatagcagttatactgcagtatcagtttacgccggactgctacgagtatggacagtacaagacaggattaaaaatgcgaggtgtaacgtttgcagcgcagacattttttacaaaattaaatggagcgatcgcaacagcagtcagtgtgtttgcattaactttaatcggcttccgggaaggggaaggcgttgttcaggcggcaggatttgccgataaattatggacattcagctgtcttggcagcattatcgggggtatttgtactctgcttatacttcgcttttacaagcttaatgaccatgatgtccagctaatggcgaaatgcaacaatggcgagatcagccgtgaagaggcagaggcacagatgatcaatcagtattaagaaaagaatggaggacttttgcgatggacagaataaaggaactgatttcaaaaatgacgctggaagagaaggcaagtctctgctcgggcgctgataactggcatacgaaagaaatcaaacgactgaacattccgtcagttatgatggtggacggccctcacggactgagaaagcaggaaggggaaacggatcatctgggattgaatgaaagtgtgaaggccgtttgtttcccggcagcctgtgcaacagcctccagcttcgatgttgacctgatggaacagatgggagagacgctgggagcggagtgtcaggccgagaatgtaagcatgctgcttggtccggcggtaaatattaaaaggagcccgttatgcggacggaactttgagtatctgtcggaggatccatatctggcaggcaggatggcatcggcatatatccgcggagtacagagtcagggcgtggggacaagcattaagcacttcgcgctgaataaccaggaaacactccgtatgacgatatcttccgaggtgtcagaacgtgcgctcagggaaatctacctgcctgcgtttgaggaagcagtaaaagaatcagttccaagaaccgtcatgtgcagctacaacaaaataaatggagaatatgcttcagaaaacagatatcttctgacagatatcctgagaaaagaatggggatacaaaggctgcgtcgtcagtgactggggcgctgtaaataaccgagtgaagggactgcaggccggactggatctggagatgccttattccggaggatacaatgacagacagattgtaacggcagtacaggagggaagactggacgaagctgtgctggatgaagcggtggaacgggtattgaatgttgtatttgccggtgaagggcagcatcgtccggaagttatatctgataaggaaacagatcataaaaaagcagcggatattgagacggaatgtgcggtcctactggaaaataacggtatacttccgctgaacacagacagaaaggttgcctatataggggaatttgctgaaaagccgcggtatcagggcggtggctccagccatatcaatccgttcagggttgtctcggcattggatgctgccggagaaaaagggcgcagcgtaacttatgcaaaaggattttctatggaaaatgacgcgatgacggaacaggagctggaaaaagcgcttcgaactgctgcagaagcagatgttgcggtaatctttgccgggctgcctgagatatttgagtcagaagggtatgacagaacatccatgaagctgccccaatgccaggaccgcctgattgaagaagtgctgaaagtacagcctaatgttgtagttgtactccacaatggaagcccggtagagctgccatgggctgataaagtaagcgcgatcctcgaaatgtatctcggaggtcagggcgttggcgaagcctgtgaccggctgttatacggagaagcgaatccgtccggcaggctggcggagacattcccgtaccggctggaagataatccgagcttccttcattttccgggaaatggaaagcgggtgttatatggcgaggatatctttgtcggataccgttattatgatacaaagaaggtcccggtgcggtatgcattcggacatgggctgtcttacacggaatttacttatggggacctgactttgtcatcggctcaaatgacggatgaggatatcctgacggtctccttcaaggtgaaaaatacaggaaagacagaaggaaaagaagtcgtacagctgtacgtagctgacctgtgcggcacaccggaaagaccggtcaaggaattgaaaggatttgccaaagttcatctcctgccgggagaggagaaaacggtgtcgatggaaatttcggcgagggatctttcatattatgaagaacgtctcggggactggtatgcgccatccggaacataccggatcctgatcggccatgcttctgatgacatccgattacatgcggatattgtgtttgaaacacagaaagaactgccccttcgcgcagatttcacaacaacgttcggagaattattggatcatacgaaaaccgctcccgttattacggaactgctggcgccattggcagcagcggctgcatcagcagaagggatgagtgacgaatacaagaagctgggagagcaagttatccgggaaatgccgctgaaatctctgctggggcagatgccgggagaacaggtggaacagctgatcgggcagctgaattgtttacttgcacaataggataattgaggaaggatgttcaaaaaatgaaaaaagaacacgaaattttatttgaaccatttaaaattggaacggtaatgattaaaaaccgttttgttctggaaccaatggaaggtacaaacatgatagactgcttacctatttttaaaattggtgaggatatccatgattattatgtggagcgtgcaaagaatcatgtaggtttaattattcccggaatggttactctgcgtagtatggtggggaaacagtggctttatgagcagaaagaaattttcgaaggactaaagccgcttttagcagaaattcatagttacggtgcaaaagtgtttttgcagattggtgcaggatggggacgaacatttacgatgccgctggcattaaaggaacttcatgaaaaagagaaggaaaccggacaaaagtccatgtttgactgggatagtcttcttgtagcccctagtgagctgcctaaccgttggcttccagaaattatacatagaccactgacggaaggagaaattcttgagtatgtggaagcctatggtaagacagccagactttgtatggagacagggtttgacggtgtggaagtgcatgctgtgcatgaaggctatctgctggatcagtttacaacgaagtatacgaatcggagaacagatcagtatggggggacttttaataaccgctacaggtttgcgaaagaagttgtagaggagattaagcgacagtgcggtgacacattccctgtatcccttcggtattccgtaaccagtaagacaatcggctttggtatcggggcagtttatggtgagaaatttacagaagtcggcagagatcttgaggaagggctgaaagccgcaaaatatcttcaggatgcaggatatgatatgcttaatgcggacaatgggacttacgattcatggtactgggcgcatccgcctgtatatatgcctttaaactgtaacatggcggaggtgacacgattaaaagaagtggtagaaattcctgtggtatgtgcaggaagaatgcagcctgatgaagcttcagcatctatatcagaaggaaaactggatgctatgggaatcggacgtcagttcctggtcgatccggaatatattgtaaaactggaacaggagaaatttagtgacattcttccttgcattgcatgtcataatgcatgtcttccgatttatcattatgaaggcgttggctgtgaaatcgatgaagaggatggaaaaacacaggggcattgtgcgttgaatcctaggacattctgtgagcagaaatatgattttgggaaaaaagcagctgtaacaaaaagtattgcggtcatcggcgggggtatcgctgggatgactgtagcacgaattgcggcaatccgaggtcatgaggtaactatttatgaaaagagtgaccggctctgtggtgtgtttaatgctgcagcagcacctgaattcaaagaaaaagataaagaatttataagatggattcaacaagaaatagaaagcctgccgattaaagtggaatacaactgtgaaattacaactctggctgagctgacagcagatgaaattatcattgctacgggcgcgaaacctaaaaagctagatgttccgggacaggaaaaagctattgaagcaacggaatatctgctggggggaaaagtaggaaaggacgtcgctgtaatcggcggaggtttgacggggtgcgagattgcctatgaccttgtgctgaaaggaaaacgaccggttattgtggaaatggcagacgatattttaaagaccaagggactctgcatggcaaactccagttgtctgagagacttattgcggtattatgaagttcctatttataaaaacgcaaagctcttagaaatcattgaaaatggaattgtcattgagacagcggaaaagacaatacagctggaatgcgacgacgtgataatgagctgtggttatatgccagacacgaggcttgttgacggcggaacacaacaggggaaaacgaatattcatatagtcggcgatgttaaaaaggttggaaatttgaaaacagcaatctgggaggcttatgatttagcattttctttgtaagattaaactcttaagcggacaaagaggcttttaatatattatagaaacactgctataagaattattgataccattaggctgtcgatttttgagggatgtcatatacagaattatactgactaatattaagttttaatcggtatttcaatttgtgtgatgtaatcatcaaaggagtcaatgccctgctataattccattgacggagaaccggcctcggtttcccacagattaccgacagaacttcttcgggagagaatgggatttgacggactgtgtatcagtgattacggcggcatcagcaatgcccacgaagtccagcggatcggagagactattggagaaacaggatttcttgccatggaagcagggatggacatggagatgccgaaagcgatcggttatggcgaaaaactcaaagaaatgttccgaagcggacaggcggatacagaattgctggaccggacagttctgagggtgttggaagcgaaattccgcatgggcctgtttgaacaacctttcgcaatggacggtgagtcctgcaaaaagatttttgaagagaaagagggggcggagctgtcccttcggtcggcaagggaatccatggtgcttttgaaaaacaacggggtacttcctttgtcaggcaagatcaagaagctggccctgatcgggcctcatgcagactgtgcccgtaagttcttcggcggatatactcatctgtgcatgatggagtcggtctacgcggccgcaagttctatcgcaggggtagagggcagcccggagtccggacagatcggcggggcaatgctgccagacggcgaaccggtgaattatgtcccgggtacaaagatccagtcagatgaagcagaactctttaacgacatcctgcgcttacagaagccgggatgcagaagcctgttagaagaactaaaggagcgtatgacagatacggagattctgtatgtgtatggatacccggttgccggaaaggatcagagcagatttgaggaggcactgcaggcagtcagggaagctgatgttgtgatcctcactctgggaggaaagcacggtacatgctctatggcgaccatgggagaaggtgtggacgctgccgacatcaatttgccggaatgtcaggacgcatttattaaagcagcatcggtgtatggaaagcccttaatcggcatccattttgatggcaggccgatctccagtgacacggcagaccaatatctggatgccgtcatagaagcctggagcccggcggaaacgggagcgcaggctgtggcagatgtcctgctgggagcatataatccgggcggcaaactgccagtatccgtggcatatcacgccggacagattccaatctactataatcacccaaacggttccgcatggcatcagcaggagagtatcggattcgtcaattatgtggatgttccccatacaccgagatattgctttggacatggattgtcttatacacagtttgagtattcagacattcatatatcgacggcagagattggagcagaagaatcggtacagatcagctgtgtggtaaagaatgcgggaaactgtgccggggatgaagtggtacaactttatctcagggatagatttgcaagtatgacacgcccggtgaaagagcttgccggatttaagcgaatccatatggaaccgggagagaaagtacgggtaacatttacagtacaggcggatcagtcagcatttcttgacaggcagatgcgctggaaggtggaaaaatgagagatagatgtagaaattggaagttcttctgaggatatacggttaaaaggaacataccggatcacagaggatagatggatagacggcgcaaaaagagcattttatgcgaaagtacagaaagacaaagtatagcttaggcatacacttacagcgggtcgggtaagatatccggcaggacaggaggaaaacagatggataggaagttacttgccagaaggattgcagaagaatccattgtattgttgaaaaacgaagatcatatgcttcctttaaaagagaagaaagagatcgcgtttttcgggaggacgcagattggcactttatattccggaaacggatccggcggtgcaaatgtggccggatgcggcacgattctggaagaatgtgaaaattgcggaatcagacctgagccacttttaaagggcttttatgaatataagataaatgaggaacgggtcacggaagaggatgagtttgactggactaaagtcagtgagatggtaaacagtggaattatgtatgaaatattcggcaaataccgcgctccgcttgatgagtacgaagtgcccggcacacttattgaccaggcggcagaaaaaactgacacagcacttattgtaattggcagaaattctggcggtgaggagtgtgaccgtcacctttcagaggattattacctgactaattcagaagaaagtctgctgaaggaagtctgcagtcattttacaaatgtagtggtagtcttgaatgttaacgggctgatcgatctgtcctgggtgagaaagtatgcaaatataaaaagccttctgtttattggaatcccaggggaagaaggggcttctgcgctagctggcattttaacgggggagaccaatccctccgggaaactggcggtgaccatagcggaacattatgaagattacccgtcggcagaccatttctcatgggataaggagcatctggagaatgttcttgactatgagagctacggcctttcctcagaagaaaacggaagtacaggtttttctaaaagcccggtgagtgtgtactgggaagatatctataccggttaccgatattttgatacattcgggaaaccggtgctttacccctttggttatgggctttcttacactgaatttgcaatcagcgatgcctcggccgagaagcaaaacggcggtattatggtgacagccaatgtgaaaaatattggggaaatatcagggaaagaggtaatccaggtttatctgtccaaggtaaacccggcagagggtgtggaacgtccttatcaggaattgaagggatttgagaaaaccgcggaccttgctccgggagaaaaagagaaggttaagatctggattccatggagagaactggcggtttatgacgaaggaagagctgcgtgggtcatagagtcgggcgattatctcctgaagatgggaaattcatcaagagacacctccctggtgggaatggtacgcctgggggatacagtccttacagaacagtgcgcgaaccgtatgataatcttagaatgcaacagagataagctttcgttcctgacacagaaagactacgcagggtgccatctggaagacagatgtgagaagaaacctgatggaggcgtgaccgggatggcggtaatttctgtaacggaagaggatattcttgcaggaggggagagcagacaggctgaaaaagaaacgcagcaaaatctgccggagctctccatcgaagaactcgcttctctctgtgtgggctatgggccgggcactccctttgcggctgtgggggaccgcagtgacccgtctgcgattttcgatggtgaaggaaaaccgattacaacaaacaaccacccgacaggatatccgggatatgtttctccggcaattgaggaaaaagggatcaagtccattttctataaagacggcccggccgggatcggcggtattgcctggccgacggaaatgctcatagcctgctcgttcgacaggaaactgtggcagatgtttggagatgcagtagggaaagaatgtgaagatcagcaggtgaatgtctggcttgctcctgctgtgaatctccacagaaatccgctgtgcggcagaaattttgaatatttttctgaagatccgtacctgacaggagtctgtgcctgcgagatcacaaaaggcgtacagaatggccggccggttatcgtgtgcccgaaacacttcgcggcaaatgagcaggagacattccggcgcggaaatgcagggaaaaaggtagacgctgttgactctatactgacagagcgctcggccagggaactatacctgaagccttttgaaatgctggtgagagaagcacatattgcctgcattatgacgtcttttaacaagataaacggcgttttcgccgggggcagtaaggatctgtgcacccgtatccttcgggaagaatggggatttgacggcgctgtggtgacagactggggcgata

SEQ ID NO: 6966 - DNA, 76939 bp, Unknown
  gut microbiota DNA sequence
cggaagtcataacaatggaagtacatccggttcacactctcagagtgtgcagacaggagacaatgccaatgtgatcatgtgggcagtacttctggtggcagcagtagcagctgtcggcgcagtagtgattatcagaagaaagaaaaaataggttgaagcagatgaaaacctgtcgtatgcttagagcagacggcaggttttgtgatagaaatagcagacggcagaggtcgtattatgtactgcatgctgattgtagacgatgaagatcaggaacgtttagaatccaatcttttctgaagaaggcagggattgactctatatgaccaaggtgaataattattctctgcagaaatatttgatcactggtattgtcgtgggaagtgtaaaagaataaacaaaaagaagggaagttgttatgcagaagatatacagaatcaagacatcaccctgtgcgagacaggaaaatatgatcataggaaatcaatacagaatcacagtacttacggaagggctggtgagacttgagtacaatgcagatggagagtttgaggacagagccacgcaaatggtcttataccgggatttccccgaggtggattaccgcgtcattcatacagaaaacgggatagagatcaatacctcccgcctacatcttgtatatgatgaaaaagagttttcatctggcggtcttagtatacatgtgaaaggaagtgtgaacagtacctggcactatggagaacaaatctgtgatcttggtggtacagcgcggactctggatggagttgatggagagatcagattggatcatggtgttgtgtcgagaaatggattttctcttctggatgacagcaactcccatgtattactggaagatggatggatcaagtcgagaaaaaaagggggaaaggatctttatttctggggatatggtcacgattataaggaggctgttgctgacctgatccgtctttgcggaaaaacacctatgttgccgagatttgcacttggcaactggtggagcagattttaccgatataatgaagagagttatctttcgcttatggatcgatttgagcaggagaatcttccatttacagttgcagtgattgatatggactggcatctggtggatatcgatcccaaatatggaagcggatggaccggatatacgtggaaccgggaattattcccaaatccaacacgatttctggacaatctacatacaagagggatgaaagtgactctgaatgtacatcctgcagatggagtgcgcgcccatgaggagatgtatgtagagatggcaaaagctctgggagtagattatgcgaatgaggatccgattttatgtgatccggcagatccccgatttttggaagcatattttcagtatctgcatcatccgagagaggaagagggggttgacttctggtggatcgactggcaacagggggaagtttgcagggatgaaggactggatccactctggatttttaatcattttcatttcctggactctgcaagagaggggaaaagacctctgacattttcaagatatgcagggcctggaagtcacagatatccaatcggattttcaggagatacaatcgtaacctgggaatctctagattttcagccctattttacacttacggcttcgaatataggatatggttggtggagccatgatatcggtggtcatatgctgggatataaggatgatgaaatgacggtaagatgggtacagcttggcatctattcgccgatcatgaggcttcatagttccagcagtgaatttaatggaaaagaaccatggcgttataagaaagaagcagaaatggtgatggatcatatgctgcgggaacggcacaggatgatcccgtatctttatacaatgaattacaggagctattgcgaaaataaacctttgatatcacccatgtactacaactggcaggaatgtaatgaggcttatgaaaagaagaaccagtatctcttcggaacttctctgatggttgctccgataacagcaccgcggatagaaaaaataaatatggcgaaagtacaggtatggctgccaaaaggacgttggtatgatatttatacaggaatgatatacgatggggacagaattctggatctgtacagagggattgagagtattcccgtttttgcttccgcaggaagtattcttgcgtttacagacgaaatcagtgcagtgcaggcacagaaaaatccaaattccttacatctcatggtctatgcagggcaaaatggtgagtttgagctgtatgaagacgacaatgtgtcctgtgcatatgaggagagaatctgttgtacaacgaagatggtgtattgtgaagatgaaaaaccaatctttacaatatatccgtctgcaggaaatcgggacctgattcctcagaaacggagttatacagttgaaatgactggttttgaaaattccggtgaaacggtcgtggtcagaaaaaatggtgtaggaacagatgctcagatatcttatgacagatggaaaaaagcaattgtagtagagataccagagacagaaacagatgcgatgatcgaagtgagtttggaacatacggcttccggagccagaaatgatgttgtggagagatgttttgattttctgaatcaggcagagatagaatttgtgcagaaagacaggttatacgaactaatacggtcagaacgtccggctgcggggattttgtcagaactgtttgcaatggatatcagcagagatttaagaggtgttctggttgaaattcttacggcacagattgtgtaaatactgacagaaaaaatcgtttcacctcattgacaactcctgatacgagtgctactatgatgatatcaaaatgatatcaaataaattcatatgaggaggacaagaatatggatggagagaaaagtgtagtacaagatgaaaaagtattgaaagcaaagagtggatatgccatgcttttacttggtatcatcgggatgctgcttggtgtggctgtgatcattgcgggatgcatggtgtttggtcagacaggtgagacgaatacggcgctgttggcaggttctattattcttggagtgttactgattgtgggatttatactcgaactttgcggattgagagtattgaatccaaatgaagcctatgtatttgccctgtttggaaaatattacggaacgatcaagacagccggatttttctgggtaaacccattttgtgaagcgatcaacccatctgtacgtccggcagcaccggttgttacatcctcaggccttgccaatccggcagctctctcaggaaaagcaaagaaagtgtcattgaagacactgacgctgaacaacgaaaagcagaaagtcaacgatgaacttggaaacccggtagagatcggcgcagtagtgatctggaaagtgacaaatccgaccaaagcggtgatcaatgtggagaactataagaattatctgtccattcagtgcgatgcgattatccgtaacacggcaagaatgtacccatatgataccagtgaaaaaggagatgaaaagtccttaagaggaagctcccaggagattgctgagatcatgtgcaaagaattgcaggagaaagttgagaatgcgggaatcaagattctggaagtccgcatcacacatcttgcttatgcaccggaaattgcatctgcaatgctgcagagacagcaggcggcagcgatcattgatgcaagacagaagatcgtggaaggtgctgtcggcatggtagagatggcacttgacaaattgaacgagaatgatattgtagagttggatgaagaaagaaaggcagcgatggtgagcaacttactggtcgtactttgtggaaacaaggatgcacagccgatcgtaaacagcggaagtctgtattaggacgattgtgtacagtatatataaaatagttagaaggtgggacacattttggaaaatgaaaagaaagaaaaaagtaaagtgaaaaaacaggttccactgagactttccaaggagctttacgatgagatcgcacagtgggcagaggatgagtttcgttcgatgaacggacagatcgagtatcttctgacagagtgtgtgaagtggcggaagcggtctggaaagaaggatgagtaatatcatttatatacagaaaagctagggatgtcgtttgacatccctgtttttaactgtattttgccgcatattcttttggagaacacccgcaggcttttttgaatttcttactgaagtagtacacatccgaatatccggatgtctctgcaacttcggaaattttcatcgtgccttctttcagaagtttctgagcagcgctgatccggatatcggaaatgtactggagtacagaggtatgttgtacttttttaaatacgcttcccaggtaggaaggatgcagctgaaaattcgcagccacctgagaaacggaaagggaagcatctgtataatgatttccgatatattccatgacccggcggcagagtgcgatatctgacggaacggcttccattttctgaatgcactgcagtccgtaaaacaggacttcatttttcagattctccagagaatgttcggtatccagtatggaagcggagaactcggtcacgggctgagccagattttccggaatatgaaaatacacatggtacacaacaaagatctcgtggatcacaagagaaagatactcgctgtttttcttctggctgatggaaaggaagagtgtttccagatattccagcagatctttgcggttctgggcgtgcaaaactgtgataaagtgtttccgcatttttaagagttcctcggaaaatccgggtctttccggatgggaatagctgatacagagattggattcccgggaaaaatagcgttctgtcagaaggtgcaggcagcgggtgtaatatggcttccagtcggttgtaacaggaaagatattttcaatatacaaaaatgtatattcgttttgctgtgcaataaaatccgtaaaacaacttccgatatggagtagtttttctttgtcggagaggaaaatctgcagcatgtagatgtattcgctttcctgcatatattcgcagagaaaatcctgtccgcgcagacgatccaccagctgtaatactgcatcgtgagtgtgttccgaaacatagacactgcaatagatgctgtatgccagattttcaaattccggatgctgtacacacagatcggaataggaaagcacgccgtcccggatattggcaagcatactgcacagatgaaagtgctcataatgctttaatgtatggcgggtctgttcttcaaaatggatggcctggatacattcagacagcgcccgctccagctcttcggcggcaaccggcttcagcagatattcttttaccccgtaccggatcgcggtgcgcgcatattcgaagtcattatagcccgataaaatgagcatatgcacagaaggaaaatgctctttgatatatctggcagtttcgattccgttcatctgcggcattttgatatccagaagcagcagatctacgggttctttttccagatggtcgatgacctgctgtccgttttcggcttctccggcaaaagtaagatttagtttttcccagggtatgatcttttttatgcgctgacgaataaaatattcatcatctgcaatcaatagtttcaatgacatggcaatccctcctgtttgggtaatgtgatcacggtgatgcagccgccggtttggggactttccatagatagtccataacccggtccgtagtagagcaaaattcgctgctggatacttttgattccgaagtggtcggcatcctgctgccagattttttcgtagtcttcttttgaaaatccacgtccgttgtctgaaatcgtaaaccggatacaatccccagcatcttccgcctcaatatgaagaattccgtgccggtcaagtcccttgatcccatggtaaatactgttttccagaatcggctgaagcagcagtttgatgcagctgtagttttttaacgcttccggacaggtgatggtgaaatcgaatttatggaaatagcgaatctgcaggatttccagatatgctctggaaatttccagttcctgtccgatggaaatatgcatctttccattgcttaagctggagcggtaaaaagaagaaagattcataacaagctgaatcagagtttctttttcatcaagctccgccagagcgcagatgttatccagagtattgtaaagaaaatgaggatttacctgctgctgaaggaggttgagggaaagctgctgtttgagtttttcggcttcgatcaggtcgtctctcattttcgtctggatcgcgatcatactgttgaaagagctgagaagcgaagcaacctcgtcattacacggaatctcacggattggaacccagtttccctccttgactgtctgaatatgcgagatcagatagcttaacggataagtgactttctgtgcaatatggtgagaagcaaatacgcagagcaccataaccagtgcggcgatcagcagagacaggcaaaatatcgcgaacagaggcgccaaaaagctgacgatcggaatctggtttaaaacataccagtcaagggtagaaaaaggtgtgaaaaacaacagatttccgcctgcaaaaaaatactgggaatccagatttttaagaatgagatccatatattcatactggctgtccagttcgggactgccgttactgctctggacctgtccgtttttatcgatcagaaacagttcattggttgtattgtattgtttataaataccggaaatctgtgtttccggtatggaaagctctacatatccgagcattcgtccggaattgatattatagaacgggcgaatgtaggagaggacttttacctctttatgtctgtcgtttaggtgtcgtttcataccaacctgccagacaggagaaagagccggatcactgaggttcatctgacttgagtccggctcggtagataccagaagaagtccctgatcggaatacagacttacagaatggatgaacggtgtagactgtatgatctgtcggatatgctgtttgacattggttgttgcattggaagaatactttgcggcaagatagtctttcatatattcctgtacagtgtcatcagacagaatagttttggaataattttccgtggcatccagataatattgaaactgtccggaaatatagctgagctgctgcagagcatttcttccctccagtcgaaaagaatgcttcagaaataaaccggagatccctaaaaaaagcaaaaccatgaacaggatagaagtcatggatatgcttcggaaaaagctaaagctgatggaatttttgttgtgtttgatctttttcattgcaggaattctccatagtatagtcgatgtaacagaattaaaatcattatagagaatgtaggaagaaatgtcaaaataagtttatttgagattccatattgaaaaagaacaaaaaatatagaaaatgaacattgtgaaaaacccgcttattttctatactaggtgcatcacataaatgtttcaaaggaaaacggaggaaaaaggaatgaaattgaaaagaatcacagcggcgctgctggcaggagtgatgtgcgtgggacttctggcaggatgcggaagcaaaggggacggagacgaaaaaggttcaggcgataagattacgattcgtctgttgacaagaatggcaggaacgacagcgcaggtggatatctacaatgatattctggatgaatttaaagagaaacatccggaagtgacgatcgttgatgattcacagggggatgaatctgcattcaacaatattttatcgacagatattgcatctggaacaatggcaaatattttccgtatccagggtgttgccaatctgtcagaatatatcgataacgggctgatcctggatgtacagccatatttagacgaagatccggaatggggcggcggatttacagagggagcgctctcttattatcaggtgcctggaaaagaaggaacttatgcgattccgatggaatccggactgatcggagtttattacaacaaagatttgtttgaaaaagcaggcgtgaaggaattccctgaaacatggacagaatttctggatgcgatcaagaagttaaaagccagcggtgtgatcccgatcgcaatgggaacacagacaacttatatggcaggacatcttcatgatcagatattctacaaatggctcggaacagatgctgcgaagaagttaggttccagagacatgaaatggacagatccggaagtggtagagacactccagtttgtacaggatctgatcgatgcaggcgcatttgacaaaaatgcagcaggtatgacagacaatattgcaatgacacagttccagcagggagaagctgcgatggtaatcacaggtccatggaatatcggaacttttgaagatccggcagagacaccggtatgtgacagcattgaagttgcaaaattcccatactttgaagaaaaaccggagtttaagaatgaagatatgcagacattgtctccgtatatgatcagcggaaaactggaaggaaaagaactggagcttacactggaactcgtaaaaatgctgacagacaaagatgcagcgaagagatttgcagaggaagcagccttcttgattccgagaacagacattgatctggatgaaagtgcgatctctccactgtttgccaaaaatgtagagcttggcggaacatctgagggaatcggagtcgatgtatttgattttgatccgctggcttctatgcaggatcgaacaagaaactctatctcaagcatgttcaccggagaaaaaccagacagcgttgcaaaagagattcagagtgagattgataaataggtatcaataaaataggacgtacaaaaatgccctgtcagctttgtgcagggcatttttttaaagaacaggaggtttccggatgataaagttaaaaagtaaaaagacaagaatgggcattatgctgtttcttgttccggcacttgtgatctatctggtatttcagattattccgattatcggttccatctatttttctctggttgactggaacggaattgcaggatctgcgccgaaatttgtaggactgaaaaattatatcgatgcatttcacaatgcagattttattctttctttaaagaacatggcaagaatggtcatcatcagtgtgatctgtcataccccgatcgcacttctgatggcagttgcgatcaatacaaagtgtaaaggctacaggatctttaaggcgttgttcttcgtaccgactgtattcccgctgactgcagttggtctgatgtggtatttcatcttcatgccgaccggatctttcaactctctgctggaagtgatcggactcagcgatctggtgatgccatggctggtagatcctgcaacagcgatgaatacgatcgtatttgtcaatgtctgggcaggtgttggttattacatggttattattttagccggtctgacgaccatcccggatgatgtatatgaagcggcagcgatcgatggagcaacatcgatccagaaattctttaagatcacagttccaatgctgaaaccgatcctggcaatgtgtattctgatggatatcatcggatctgtcaaagtattcgatcttgtatttgccatgacaggaggcggaccgaacggtctgaccaaccttccgacaacattgatgtacaatgaggcgtttaagtacaaccattacggagtaggaagcgcgatcggaatcattatcatggtgatctgtattgtgggtacggttggaagcaatctgatcacaaacagaaagaaagcggagtagggggaagaacacatgaaaaagaaagtaaaaactcgtaagaaaattacgctgcagagtgtgatcatgtatattctgctgattttgacagcgctgatgtttgcaaccccgatgttgtttacccttttgtcttccattaagacaaaagtagaaatttttgcgaaaccattctcctggccggaagtcccgcaatggtccaactatgtggaagcctggacaagtgccaacatgagtcactactttttaaacagtttgattcaggcaggagcgacagtgatcgtacttgcgatcgtgtctacaatggcagcctacgtactgtccagatttgattttaaatgcaacaaatttttactgttattctttatgctgggaatgatggttccggtacatactgtacttgttccggtttcttacattatcggagcgctgaatctgaaaaataatatcccggcgctggttatgatctatgtggcattcagccttccgttcagtattctggtcgtgaccaactttatgaagggtgtgaaccgttctctggaagaagcagctctgatcgacggagcaacctatttccagatttataaaaatgtgatgctgccgatgacagtaccggcaatttccacgatttctatttttaacttcctgggtgcatggaacaacattctgttcccgcttctgttcatcaatgacaagaacttaaagccgatcgcactgggactgttgaacttcaacggagagcgtggaagtgattatggcccgctgatggcggcaatcgtgatcacagttgctgttccgcttgtgatctacctgttattccaggaaaaagtagaaggcggtctggcagcgggagctgtgaaagaataggcatgaggaggaaaataaaatgagcaagatcagatacagacaggtgcatctggattttcatacaagtgagtacataccggatatcgcagcagattttgacaaagaagaatttgcaaaaacattggaagaagcacatgtagattccattacatgttttgcaagatgtcatcatggatggctgtactatccgtcaaaaaaatttccggagctcatccacccgggattgaagaacaaaaactttttactggagcagatcgaggcgtgtcataagagagggatcaaagtgccggtttatacaactgcacagtgggatggaagaatcatgcgcgagcatccggagtggcttgcagtagatgaaaatggagaatttattgatacccagggagttccggcgccgcatttttatcacacgatctgtctgaacagcggttacagacaatttttcaaggatcagcttcaggatatgatcgaggtgatcggcgtggaaaatctggatggaatttttatggatattctgttccaggtagactgcaagtgtgagcattgtgtgaggaagatgcaggagcttggaatggataccgaatccaaagtggaacggatgcggtacgcagagcatatgctggatgaatttaagacggagatcagcgaatttatccacagcatggcgccggaggcaacgatcttttacaatggatctcatgtgggaccaagaagcaagaacagttttaaagaatacagccatctggagctggaatctctgccaagcggcggctggggatatgatcacttcccggcaaccagcagatatgcccgtaatctcggaaaagagatgattggaatgaccggaaaattccatacatactggggagatttccattctctgaaaaatcaggcagcgttggaatatgaatgtttccatatgctggcagtgggagcaggatgctccatcggagatcagcttcatccaagaggtgtgctctccaaaggcgcttacgacctgatcgggaatgtttacaaaagcgtagaggaaaaagagccgtattgccgggatgtcaaagcacggacggagatcgcagtgatcacaccggaggaattctatccggaggatgcaaaggattctgttctgtcaccatctttgatcggaacggtgcgtatcctgcaggagctgggctatcagtttgatattattgacagtcagatgccgctggatgattatcaggtagtgattcttccggactgcatttatcataatgaagatctgaaacagaagatggaagcatatctggcacagggtggtcatgtgatcggttcttttgattcctgtctgccaaaagacggaagtgagagcatttacggtgtggcatttgagaaggaatcggaatattacagagaatttgtgatgccgaatgacgtgatcggaaaagatctgccaaaagaagagtttgtcatgtacttgagaggatatgatgtaaaaccggtacatgcagaagtgcttatggataagatagagccgtattttgacagaaaaggaaacaccttctgttcacaccagcatgcaccgtcttccgggaaagtgggaagcccggaggtgacgatctggaacaatgcgctgtatttctcccacccggtttttgcactgtaccgtaaaaatgcggcaagatggtgcaagctgatggtgaaagatgcgctggaatatttcatcggagaaaagctggtcagatatgaaggcccgtctacactgaatattcagttgaatgcgcaggaagagaaaaacagagatgttctgcatatcctgcattatattacggagaagagatcggaagacatctataccgtagaagacaagatttctttgtatgatctggaaattcaggtaaatacagatggaaaacaggtaaaagaagtcagaagtgttccggatgaaacgccgctttcttttgttcaggaaggcaaatacgttaaattttcggtaaaaaaagtagacggacatcagatgatttgtattcaatattaaaagaaggggatgttctggaaatttgtatagggatacaggttttcagacatcccttttctacaggaggttcaaggtggaagcaaaaaactggaagacagaaaaagagaccatcatccgttgtgtgctgttaaatctggcaggcgtttttatttatgcggttggaatcaacagctttgcggcgccgcacaagattgcacccggaggggcaagcggcattgcgatcctgatcaattatctgacaggatgtccgatcggtctgtttgtctttgtatttaatattccgctgcttctgatcattgtggtcaaaaaatattttccgcgttctttcgtgtttcgcaccctggcgtctaccgccctgctctccattgtgacagatctggtgatcgtcaggattccggtatacaaaggaaatcctcttctggcggctatgttttgcggagccatgatggggatcggtctggcgctggtgcatatgggacagtccaacaccgggggcatttctcttctgggactgatcatgcagaaatgcaatccgcagtttcaggtaggcgcctggatttcgggattgaatattgcggttgtacttgcctctgcaatggtatatcgtaatattgaaagcttattatatgcggttgtgacggtgtatatttcgggaatgttcatggatcatatgctggagaatgcagatgcaaaaaatctgatgatcgtgattgccgaatctaccgataaggtacgtcaggtatttctggacaggaagatcggcgtgaccgtattaaaaggagaaggcggttattccagtgaggtacagcgtgtggtgatgtgcgtgtcagaaaagaaggaatgcgagcttttgcagaagcggatccacaaagtggatgacaaagcactggtgattattacagaagcggaaaaagtagcaggaaaaggattcaaacatttgacatagaaggaggatgacgaacgtgattgtattagcagaacaaaaaaaggcatccgtacgggtggcatttatcggaaaaaaagaggcagaaaatctgacatacgtgtcagcagattatcaggcagtatccagagtgggcggtctggatgagaatctgacggtttatatcggacaggggaaggaaccgcttacgatccgtaacattcaggaactgtccgcaggagcagccggcgcggtgaaaggaatggggatcaaggcgtatgagatggacatccgtccgtttcttgaagcagcaggtgtgcgggcagtcagcgccgtgatcgaaggaatttataccggagcttatgaaatctgtcttccgggagaggaaccgaaagaaattccggatgtgacactgactggaatcgatgaaaatctgtatccggcagcacagggggaattaaaacaggggatttctctggcagaggcacagagctgggcaagaaatatggtgaatgcaccgggaaatctgtttcatccgatggactttgcaagagagatcatggagcatatgaaagaaacatctgtagaatgtgaattgatcgtatacagtaaattaaatgcaatgggcatggaagcgctgaccagtgtgggaaagagcagtgagaatccaccgtgtatgctggtaatgcgctatcgtggggacgaagaggcaccggtaaccggactggttggaaagggagtgacctgtgataccggcgggtactgtctgaaaccggcaggatccatgatggggatcaaaggcgatatggcaggcggtgcggcagttgcggcggcaatttatgcacttgcagcaaatcaggtcaaggtcaatgtaaccggcgtaatcccaatgtgtgaaaacaggatcagcccgtctgcgctggttccgggagacgtgatcggttcctatggcggaaagaagattgaaatctgtaatacggatgcggaaggtcgtctgatccttgccgatgctatggcatatatggtgaaggatgagcatgcagaccgggtgatcgatattgcgacactgactggtgcagttgtgggaatgcttggattttccacagcaggattgttatcagatgacgatgcgttctgcggagcatttttaaaggcagcacagacaagcggagaacgctactggagacttccgatttttgaagaacagaaacagatgatcgaaagtaagattgcggatatcaaaaatatgggacgggattactgcggaacgatcacggcaggtctgttcattcaggcgtttgcccagggacgtccgtggatccatctggatatcgcgggaaccgcatggacagacaatccgttgtaccagggacagccgcagggagcgactgctgcgggaacatccagcttgtattatctgttggcaggaggagaagagacatgtttttaaaagagacagaagaaaatatccggaggcagtttgctgttttcacggaaaaatttgagagggcaggaaaagagattgaggccaggattcatgcagagccggcagatattgcactgcttttaaaatatttatacgccaatatgccgtttagtgatgtggcagattattcctacgagatgtttcgagagtttgcagcacatggtgcacagttaagaaaagaacagatctggaaaggagaaacccggattccggacgaaatttttttggacaatgtggtattccaccgtgtcaataccgaaggaattacttcctgcagacctttattttacgcacagttacaggagagagttgcaggaaaacagatggaagcagcgattttgggaacgaactactggtgtgccgaagaagcgacctatcaggcaacggatgaccgtaccatctctgcagaggccgtgtatcgaaacgggatcggacgctgcggagaagagtcggtatttacggtaaatgcgctgcgcagtatcggaatcccggcaaggcaggtatatgcgcaccgctgggcacattgcgatgacaatcatgcctgggtcgaagtatggtgtgaaggaacgtggcattttctgggagcctgtgagccggaagagattctggatctgggatggttcgtcaatgcatcttcccgctccatgatgatcaattccagaattttcggttcacaacaggcagacggagatgtgattgaacatccggatgtgacctcaggggtgaaccagctttccagatatgcaaaaacagttgatctggagctgtttgtgacagaagaagacggaactcctgtggcagatgcggaagttagctttgaactgttgaattatgcagagctggttgcaatctcccgaaagaaaacagatgcaaacgggaaggtcgtgctcaggactggaaaaggaagcctgtttgtttccgtgtggaaggaagatagacatgtgactgccattttggatacacgtgaaatttctgcgcagacactggttcttgcagggaaaaaagcagaaaaatcagcagaggagtgggtggcgttcgatatgatcgcaccttcggatgctcctgttaacacgaaaagaccgacagaagagcagaagcagacaggtgcgcaaaaattccgtcaggcgacagaaaagcggcttgcgaaagtaaacagtttctttggagaagaagcagggaatgcactggaaaacagtaagggaaatcatcaggaaattcaaaaatttctcgatgcagaaacaccaaatgcactttggaaaaaggcgcttctggatcagttgagcctgaaagatttcagagactgtaaggcgcaggaacttttggagcatcttgaggaggcatgtgtatggggacatacgtttccttcggagatttttgcaaaatatgttttaaatccaaggatttcaagggaacagcagagtgcgtacagaagaaaaattcaggcattttttacagaagagcagaaaacacagtttcagaagaatccaagagagatctggaattggatcagcaaaaacattcaggaagaaccggcatatgaatatgaagagcttttaacaaccccggcgggaacgcttcgctatcagagggcaagtctggaatcgaagaaggtgttgtttgtggcgatctgccgtacactgggtgttccggcaagattaaatccactggatggagaaatgcagtattatggggaaaacgcatttttgaatgtggaaaactcggaaaaaacagaagaagtatgtgaaaaaacagcacagatccatttggaatccggggacgatacgagatgggtctatatgcagaactggacgattgcgaaaaaatcagagacaggttatctctggcagaccctgcagcttggggaaggatatcagggagaggcaaaactggaagtggaagcggggacataccgtgtgatcacaacaaaccgtctgccgaacgggaaccagtttgctgcctgcacagaatttgacatcgaaaatggtcagacaaaagaaatccagctgactcttcgaaaagcggagctgaaggatatgctggaagagattccgctggaagaatttgcggtagaagatgagcagggaataaaaattttgggaagtcaaaaagtcaaagagggaacctcgttgtttatctggcatgaggttggaaaggaaccaacggaacatattttaaacgaactccgtgagagaagtcaggaatttgcagcgcttggaagccgggtaaatctgattttgaaacataaagaagatcaggcagatccgacatttgcaaaaacaaaggcagagctgccgaaagcagcggtgtactatgatgaaggaacggaaaatatcaatgtactggcgcgcagaatgtatggggacccggataagctgccgctgattcttgttgtaaaagaaggaatgcagggtgtgtattcggcaagcggatataatgtaggaaccggggatatgctgcttcgggttctgaatagcgggatataggcagctaatatattaatgatcgaacagttagttgaaaaaatctcaaacgatacatgaaaaacttatttctgaaaaacagtcctatcgcaaggtagggctgttttttcagtatcatacactttccaggattctttcattaaccgttgtcttaagttgttgaatttgacaatccatgataaactaaattcttagtaagaacaatccgcaggaggaaaaaagcagttctatgaaaatacattacagagtatctggagaggggatagagatcgtccggtgtttcgggacagacagtcaggttgtcattccggagcagattgaggggaaaccagtaataaaggcagcgccctatgcgttttctgcaagaaaagacaaggaagagattgatgtacagacatatgatacggatcagatcggacaaaggtcggcagaggaaaaactgcttgcaggcgatgcggtggaggaagtcgtttttcccgataccatgcgggagatcgggcgttatattttctatggatgcagaaacttaaaaaagctggagttctcggacaatctgatgcagatcggaagcggagcgtttacagtgtgcggaaatttacagaaactgattgttcacttgcaatttggaagtaaaagctgtgtaaaagagattctgggagagctgtggcagagaatggatgtgactttcgtttacgaaaacggagcatttggcggtcagaaagcggagttggtattcccggggcattatgaagaagcagtggagaatacgccagcccggattttgtatacccagcatcatggttcgggaaacaattaccggcagtgttttctggcaaaggagttggattacgagaaatatgatgaattgttttctatggcagtggtgatggaaaagctgcctgtactcattgatctgtgtttcgggaggcttttgtttcccatccggctttcgacaaggggagaaacagcttatctgggatatatcaggtcccatctggaagaaatcgttccatatctgatcaagaatgaacagacagaaaggatacgcttgatttccagagaaaaactgtggacatcagaggggctggacatggcgatcgagtgcgcttccgacaagcagaagtcggagattttaagtctgcttatgaatgaacggcagcagatgcagccggtcagaaagaaaaaatttgtgttgtaaatgtacaatataatagaagggatatatgcgtatggaagaagaaaacagtagagaagcagccgaaaagcttcaacagatcggcagcagtattttaggtgctgcaagggatgagctgtatctgggaatgcgttttctggatgtggcgctgagcagttttgtatatcagatggattcgtctgtcagtccctttggaacggatggagcagtgatatattttcacccgcagcagcttgggggcttgtaccggcagaatcggattcttgtgaaccggggatatctgcacatggtgtttcactgtattttccggcattttatcaaacagggcatggacgggcgctattggaatttgagctgtgatattgcagcagagcatatgatagatgggatttatcacagaagtgtccgattttccaggagtcttctcagacgggagacctaccggaagctggaagcagagaaaaaagttctgaatgccgagcgtatctatcggattctgactgcctgggagttagaagagaaagaattgttgaagctggagcaggagttttatcaggatgaccacagatactgggagaatcaaaaaccggatcagaagccaagcccgcagatgaaccagaaatggcaggagatcaatgaagagatggagaccgatctggagacattttcaaaagaggcatccaggcagaccggagattttctggatcaggtaaaaatcgaaaacaggaaacgacaggattaccgggaatttttacggaaatttgcggtgtttcgggaggaaatcggtgtggatccggatacgttcgattatacgttttacagttatggacttcaaatgtacggaaatatgccgctgatcgaaccgcaggaaacaaaagaagtcaaaaaagttgcagaatttgtgattgtgatcgacacatccatgtcctgttcccaaaatctggtacgaaaatttctggaagagacatatggcattttgtgtgaagaggacagcttttttaaaaagaccaacattcatatcctgcagtgtgatgagactgtgcagtccgaccaaaagatcacaagcaaagaagaattgaaagaatatatggagcatctaaagttgtacggagagggcgggacggattttcgtccggcatttgcatatgtggatcagatgttggaaaatcatgaatttgaagaattgaagggactgctctattttacagacggttacggaatctatccggggaaaatgccggcatacaagacggcatttgtatttatgcaggaggattaccgggatgtggacgtgccggcctgggcattgaaacttattatagaagaatcagaaatgggaggagatacatggatataaagcgagcaaaacaggaaattaaagattctattgaggcatatttggccaaagatgaatttggagattatcggattccggcgatccgccagagaccgatctttctggtgggacctccgggaatcggaaaaacacagattatggaacagattgcgaaagaatgccgtatcgggctggtagcatacacgatcacacatcatacaagacagagtgcggtagggctgccgtttattcaggaaaaagagtacggtgggaaaacggtatctgtaacagagtacacgatgagtgagattatcgcatctgtgtatgacaagattgagaagaccggaattcgggaaggaatcttgtttctggatgagatcaactgcgtgtcagagacgctggcgccgacgatgctgcagtttctccagggcaaaacatttggaaatcagaaggtgccggaaggctggattatcgtaacagcgggaaatccaccggagtacaacaaatccgtgcgtgaatttgacgtggtgacactggatcgtatcaaacggatcgatgtggaggaaaatttcgaagtatggaaagaatatgcatatcgtcagggaatccacccggcagtgatctcttatcttgaaatccgcagaaagaatttttatcggattgagaatacagtagatggaaaagtatttgcgacagcaagaggctgggaagatttatcccaactgatacaggtgtatgagatgttggaaaagacagtggacagggatgtggtctatcagtatatccagcacaagatgatcgcaaaagattttgcaaactatctggcgctttattataagtacaaacaggattatgcagtggaagatctgttaaaaggagaatggaatccgtccataattcagaagatcaagaatgcgccgctggatgagcatctgagcatcgcaggacttttgagcggccgtcttggcgaggcgtttgcagcctgttatcgggcagatgcaatggtcacgaaaatttatgaatacatgcttttatatcgggagcatcagaaagagtggtctttggaaacggtgatcggacagattacgcaggatctggaagcaggaaaaaaagcggagcagctgacccgcacagaagagaaaaccatgcagaaggcagaagcgttttttgaaactgccagaatccgtgtgaatgagtcatccggttccaaagaagcggtttatgaggaagtcaaagcacagtttgaagcggaggcagagaggctggaggaacagacagaagaggcagccggtatgctgcagcatgtgtttgcgtttctggaagctgcatttggagagagccaggagatggtggcatttattacagaattaaatgcgaattactacagtgtgtggtttatcaaagaaaacggatccgatgcgtactatcggtataataaagggcttttatttgaagaacggcagcagaagatcctcgggcagatggaggaagtggaaacattgttaaatgccgggattaaatcgtaaattgtcataaaaatcagatgaaaaatcgttgactttctgttcgacagtcattatgctaattcttatggacatatgaaacaacagaaaattactggtgggaacaataacatcagaagaatggaaagcaggagaacaccatgataaaagtaatagcaagcgatatggatggaactcttcttggtaatgaccataaagtagcgcctgagacattaaaagcaatccatgaggcatgcgatgcgggaatccgttttatgatcgccacaggacgaaactttaaaggcgcaatggaagaattaaaagaaacagatattgtctgtgattatattgtcggaagcggagcggaagtgcgggatcaaaagcagcagatcgtcagtacagcaccgctttcgatggagttgtgtgaggagatttacgaaaatctgaaagaatttccggtttcgatcattttcagttccggagattatgactaccggatcggaacgaaaaaagaaatcgaagaaagttttttgaaacagatccagctgtttcatatggataccggtcaggatacggatgagagtgctgttttatcttcccctctctatcggagaatcgtagaaaatacgaagatcatctccgaatttcaagaactggaagagtcgcaggtatcagtctacaaagtatttttgtattccaacgacctggaaatgctggcaaggatcagcaaaaaactggagaaaaataaaaaactggcagtggcttcctcttttaagacaaacttagagattacggcagtggaggcacagaaaggaccggtcttaaaacagtacatcgaatcactggggtatacgatggatgaggtgatggttcttggagacagcctgaatgattattccatgctgtctatggattttggagcaacagtggcgatggagaatgcaatgccggaagtgaagacggtttcaaaatatatcacaaagtccaatgaagagtttggagttgcatatgcaatctacggagtgcttgcacagatcagaaaggggaatgcaggatggatgtcagaagtatgagaaacgctgtccttggggcaagggttgtgaatgccttaaagagcagaaatatggatgcatattatgtagagacaaaggaagaggcagtcgcaaaagctctggagctgatgccgaagggaagtacgatcagctggggcggaacgatgagcgtggcagaagccggactgatggatgtcattcgaaacggagattacacgttatatgacagagatcagacagagacgtcaaaagagagagaagaaatgatgcataaagcattttttgccgatttctttctgggcagcaccaatgcagtaagtgaagacggcgttcttgtgaatatcgacggtgtggcgaaccgggtggcagcctatgcgtatggtccgaagaatgttcttctgatcgtggggatgaacaaggttgtcaagacacaggaggatgcactgcaccgggcaagaaatgaggcagcgccgatcaatgcgcagcggtttcagaaagagacgccgtgtgtttcgggcggaacctgttttgactgcaagaaacagggatgtatctgttctcagatcttaattacaagatacagtcagattccgggaagaatcaaagtgatcctggtgaatgagtctctgggattttaaaaaataacaacaatgaaacaggtagaagaggttgaaatgaaagaaaaaaagcagcagaaaagtaaaaagaaaaaaggctgggatccattatcactgacagtgcttctgatcgcactttgtgtgtttgtgttttccgcgtatcagctggcaatgatgatggttccgtactacactggcggtgaggagtatgacgagatcaaaaatcttgccatcgtcagcgacaagattggggagggagtggaagaagctccgaagtttcaggtggatttcgacaaattgatgcaggaaaatccggataccgtggcatggctgcgctttgaccagccgtcgatcatcagctatcctgttgtgaagagtgcagataataacgaatatctgacaaagacgttttccgcaaatgacaacaaactgggagcaattttcatggatatgcgcaatcagaatgatttcagcgaccggaatacgtttatttacggacacaatatgaaagtcggaggagagatgttctcccagctgaatgaatatgcaagtgaagatttttataaggcgcatccgtatttctatatttacacaccggacagaaagacacggacttacgaggtcttttctgcaagagtagtgaaggattcggcagaagtctataacctgaatattacgacagatgaagagtttgaagcatatctggcagagtgtaagagtacgtccaattatgtgacgtctccgggagtggacagaaattccaagatcgtcagtctttctacttgtacaaatgtcaatgaagatgaaagatttcttctgcagggagttttgatcaaagaggagtaggacatggcagacagatttgatgtgggagatgtaatccggatgaagaagcctcatccgtgcggcagctgtgaatgggaggtgctgcgtgtgggagctgatttccgactgaaatgtcagggatgcggacatcagatcatggtggcgcgcaggctggtagaaaagaatacaaaagaaattaagaaaaagtcttgaaacgagcagattcttatggtagaataggaaactgtgacgtactgctgaattatcagcggacacaattttccttgttcccggaggagccgggagccagagaccataaggaggtgcagaacatgaacaagtatgagttagctgttgttgtcagcgcaaaaatcgaagacgatgccagagctgctgtgatcgagaaagtaaaagagatgatcacacgtttcggtggtaacgtaacagacgttgatgaatggggtaagagaagattcgcttacgaaattcagaaaatgaaagaaggattttactacttcgtacacttcgagtctgacgcgagtgttccaggtgagatcgaacagcgtatccgcatcatggacaacgtactcagatatttatgcgtaagacaggaagcataagagaagagaggtatatatgaataaagtggttttggtgggtcgcttgacaagagacccggaagttagatattcacagggtgacagtgcaactgcagttgcaagatatacagtagcagtagaccgcagattcaaaagagatggagaaccgactgcagattttattccgtgtgttgtgttcggacgttctgctgagtttgcagagaaatatttccgtcagggtatgagaatttccgtttccggaagaatccagacaggaagctacacaaacaaagacggtgtgagagtctacacaacagaagtgattgtagaggatcaggaatttgctgagagcagagccgaaagcgaagcaaacagaagttcattccagtcttcaccggcacctggcccggcaccaagtattgatgcaggggacggtttcatgaacattccggatggaatcgacgaagaattaccgtttaactaacttcaaaagccatagttatcaaaacaggaggtaatgaagatggcttacgaaaaaggtagcagaccagaaggcggcttcaaaaagagaggccctgcacgcagaagaaaaaaagtttgcgtattctgtggaaaagagaataacgaaatcgattataaagatgtagcaaaactgaaaaagtacgtttctgaaagaggaaaaattcttcctagaagaattacaggaaactgtgcaaaacatcagagagcccttacagtagcaatcaagagagcaagacacattgctctgatgccatacgtacaggactaatcgcttttataaacgaacaaaagactccggcttgtcagtgacaggttcggagtttttttatataaaaagagcaataaaaagtggaacaaatgcagcttctgtgttagaatgatggaatcatggagagaatctgaacaatgacagaaagagcaggtaaagtatgaatctaaacaaagaaaatttaaaaaagatacggggactgatcgtgtttacagtgattcttctgatcgcattgtggaattattcattaattctggatgtgcttggacagggagtgggaattgtatatccgtttcttttaggcggtgcaattgcatttgtgatcaatgttccgatgagtttttttgaagaaaagctgtttcaaaatcaaatgatgaaaaataaaaaagtggcgcagaggctggcgcgtccggtcagtctgatcattacgctgatcgtagtagtcagtgtgatcgggctggtggtattcggagtgcttccgaagctgggggacacttttatatcaatcgggaaagggatacagtcatttatgccgaaagcgcagagctgggcagaagagattttccataacaataaggaaatcaaggaatggctggacagtctgacgctggattgggacaaaataataaatgaagtcgtgaagttttttacgagtggagcgagcagcgttcttggctctacgtttgtagtggcaagaaggattgccagtggaattacaacctttgtgattgcgtttgtttttgcgtgctacattttgttgcagaaagaaaaattaaatattcagatccggaaagtgatgtatgcatacatgaaagaagatctggtgaaaaaggttctggatgtttgttctctgagttaccgtacattttcgaatttcctgacaggacagtgtctggaggccgtgattctgggaacgatgtttgtgatctgtatgggaatcctgcagatgccatatgcgatgctcattggtgttctgatcgcgtttactgcgctgattccgattttcggggcatttattggctgcgtagtgggagcatttctgatcctgacggtggcgccgatgaaggctttggtttttgtgatcatgttcctgattcttcaacagatcgagggaaatctgatctatccgagagtggtgggcagttctgtgggacttccgtctatctgggtgctggcagcggtcagtatcggagccagtctgatgggaatcgtgggaatgctggttttcattccaatcgtttccgtgctgtatgcacttctccgtagggatgtctatgagcatctggaaaaaaagggaattgctgttgaccgggaatccggtgagatatatcggccgaaggaaccggatgtggatgaaagctgacacggagacaaaaaagtggtatactaagactgagtttgtgaaatcacagcgtatggggaggctgtgcaaacgaaagtatggatagaggataggaaatcatgaagaacaaaaacatgcgtttaaaagggcagctgaggatgtacatgcagtggccgctgatcatgacgatcttactgttggcaatgaatatctggatgtatatgacggatcaaaaagccggacttacgatgacggtattcgtcattatttatgcaataatcgttggattgttatatttttacaaccgctctcttattctggcagatttgatccagttctcaacacagtacaagggaattcagaacacgctgttaaaggaactgaccgttccctatgcgatcattctggaggatggacatattttatggaagaacgaccgtttttcggaaatcgtggatggaagagaaaagtttatccagaagataatcccggaattgaacaagggaatttttccgaaggatgatgagaccagaaatgagctggagatcacatataaggagcgggattatcaggtggagctgcgcaggatttccctggagggcttcagcgagagcgagcggatgctgcagattccgaaagaaaaagagtattttatcgcactttatatgagagatgtgacagaactgaattcttacatccgtgaaaatgaagatcagaggcttattgccgggctgatctacattgacaactatgatgaagtgatggagagtgtggaagaagtccgtcagtctcttttggtcgctctgatcgacagaaagatcaataagtatatcaatgatgtggacggaattgtaaaaaaactggagaatgataaatatttctttgttgtgaaaaaagaaagctaccgtaagtttgaagcagataagttttctctcctggaagaagtcaagcaggtcaacatcggaaatgcccgatccgctactttgagcatcgggttaggactgaatacagcaacttatgcgctgagttacaattatgcccgtatggcgatcgatcttgcactggcaagaggaggagaccaggcggtgatcaaggattgtaaaggaatcacgtattttggtggcaagaaagagcagacagctaaaaatacgagagtaaaagcccgtgttaaagcagaggcactcagagagttcattgtggcaaaggatcaggttattgtcatgggacataagatttcagatccggactcctttggagcgtgtatgggaatttacagagctgctgttgctctggaaaagaaggcacatatcgtgatcaacgacgtgagtacctcgatcaaacctctgtatgatgagatcgcgcagagcagtgtgtatggaaaagatattttcctgacttccggggaagcgctggattatatttcagacagcgctatggtcgtggtggtagatacgaacaaaccacagatgacagagtgtccggaacttttaaagagatctaagaccattgcggtgctggatcatcatcggcagagcagtacggtgatcgacaatgcggtcctgtcctatattgagccgtattcgtcctccacctgtgagatggtggcagaagtactgcagtatattgtggatgatatcaaggtgccgtccattgaggcagactgcctgtatgcaggaatcatgatcgatacgaggaatttcatgaaccgtaccggtgtccgtacatttgaggcggcggcatatttaagacgctgcggagcggacattacccgggtcagaaagatgttccgggacgatatggagtcttaccgtgccaaggcagaggcgatgcgtatggcagaggtctacagagaacagtatgccattgcagagtgtccgagtgacattgcaagtccgacggtactggcggcacagacagcaaatgagctgctggatatcaatggtatcaaggcatcttttgtgctgacagtgtataatggaaggattttcctgagcgcacgttctatagacgaagtaaacgtgcagatcatagcggaaaaactgggcggaggcggtcatatcaattcagccggcgcacagtttgaacatacaaacgtaaaagaggcgatcgaggcgctaaaggtaacgatcgaccagatgatagaggaaggagatatataaaatgaaagtgattttattacaggatgtaaaagctcttggaaaaaaaggagaggttgtcaatgtaaatgacggatatgcgagaaactttattctgccgaaaaagcttggggtagaagcaaacgggaaaaatctcaatgacctgaagctgcagaagaacaatgaagccaaggttgcacaggagcacctggatgcagcgaaaaaactggcagaggaactcaaagcaggaaaagtcgtacttaccatgaaagtcggtgaaggcggaagaacattcggttctgtttccagcaaggagattgcagaggcagtcaaagagcagatgcatctggatattgataaaaagaagattcagctgaaagagcagatcaaaacactgggaacacatatcgtatctgtaaaactgcatccggaagtgacagcagagttgaatgtttccgtgaaagaagcataaggggaaatagagtttatggaagcagcgattaaacgaatattgccccacagcacagaagcggagcaggcggttgtgggcgccatgctgatggataaagatgcaattatggtcgcagctgagatgcttacaggggaggatttctatcagagtgcatacggaatgctgtttgatgcgatggtagaattgtttcaggcagggaagccggtggatctgatcacactgcaggagcatttgaaagagaaaaatgctccgccggagatcagcggactggagtttgcaagagaacttctggtcaacgcccagacctcggcaaatattaagtattacgcagagattgtccgcgaaaaagcaactcttcggaagatgatcaagatcaatgaagagattgcaaacaactgttatctggagaatcaaccgctggatgtgatcatggatgctgcggaaaagcggatttttgaactggcgcagcatggcaacagccaggaatacacgccaattaagcaggttgttttaaatgcgctggaagtgatagaaaaagcgtctaagacaaaaggaacggtaaccggaattccgacaggcttcattgatctggattacaaactctccggtctgcagcgttcggatctgatcctggtggcggcgcgtccgtctatgggaaagacagcgtttgtactgaacattgcccagcatgtggcgttccgtcaggagaaggccgttgccatcttcagtcttgagatgtccaaagaacagcttgtaaatcgtctgttctctttggaggctcatgtggatgcgcagatactgagaaccggaaacctgaaagattcggattgggaaaaactgatcgaaggtgccggtacgatcggaaaatcaaaactgatcattgacgatacttcgggtatttctattacagagatgcgttccaagtgccgtaagtacaagttagagcacggtctggatctgatcatcatcgactacctgcagttgatgagcggaagtggtggaagaagcaatgaaagccgtcagcaggagatttccgagatctcccgttctctaaaaggactggcaagagaattgaatgttccggtgatcgcattgtctcagttgagccgtgcggtagaacagagaacggacaaacgcccgatgctttccgaccttcgtgagtccggagccatcgagcaggatgccgatgtctgtatgtttatctatcgtgaggattattatattcctgatacagaagacaaaaatattgcggaaatcatcattgcaaaacagagaaacggtccggttggaaccgtcagactggcatggatgccgcagtacacccgttttggaaatgaacttcgtcaggatcagcagtgattgaacatattttttaatctgccgagcggatgttcgcgggccgcctctttgcggttcgcctgctgctggcggatcagcgtgtccagtttgcggaaatgttcttcttcctgccgttcttttgcctggaagaggaagtccatttctcgtatgacatcagtagtgacagacttactgatgtctttttttaattcttcattgttggacacgacgacctctgtcaatacatctccgatcagagaacggacctgttccagttgagtgaccggcacgacttctgcttcggagatggctgctggagttgacacagccgccggagcggaaaccgcagcaggagctgaaacagtcgaggcggccgtttcttttttcagagctgctttttttaatgcctctgtcttttgaagcttcagtttggttgattttaattccggaatgagaggctttaagtcctttaaaagcattccggcatcttttagttttttaatacagcaaaagagttgtatatcatcttcggtataatatcgatgtcccatttctgtgcgtccgatgacaagctcaagctcttcctcccagtaacgcagaacgtgagattctacatgaacctgttttgccgcttcagaaatcataaatctgacctcgcccattaaaatatacctcctatgatttgttttcggtattattatagcatgagggggtgtaaaacgccttagaaaccgttcgtcaaattgtgtcaggaagtgacttgagattactgggaacagcagcgattttaaggatatgaaaaagagcatcctgaatctgagattcaaaatgctcttttcatgcttgtgatcactcgcaaatattaaaaattactctgctgaaatagcacctgtaggacaggcagcttcacatgctccgcagtcaacgcaagcatcagcatcgatttcgtatttgccatcgccttcggagatagctcctactggacattcgccttcgcaagaaccacagcttacacattcatcactaattacgtgtgccataatatgtatcctccttctttggaattacgataaaggattaccgttaccgttaccaacattctaatacaaatgaggaaaatatacaagcattatcattgtgaatttatggttaaaatcaaatgcaatttaaagagtaaaaatataaaatttttcgaaaattaagaaaatatttctttttttttcacagaaatcgtgtatagtataccttatcggacgaagtccgcccgccgaaagcatgtattacgggatgcataagggggataagctattgtgaaaagacagtttatactggaggttttgatatgacaagaaaattaagagcagtgataccggcgatcttgtgtgttgccctggcagccagtgcctgcagcaaaaaggaggagactccgacttttacaggagataagactgaggagccttcgtatcaggctaatctggattttgtgacaccggcagcttacagcaatatacaggggcttaatctggagccgggtacttatatatcgatcatcggaaaggatgagaactcgtcttattggaaagaagtaaaaaaaggtgtggaacaggcggtaaaggatctgaataagactcttggatatagtggggaagataagatcaaggcaacctttaatgcaccggacggagaggatattgatgaacaggtcaatattctggatgaagaactggcgcggtatccggatgcgttaggaatcgcaagtattgatgaggatgcatgtaaggtacagtttgatgcggcagcagagaatgggattccggtcattgctctggactccggaaatacgtatcagggaatccagtgtactgtaaagacgaacaatacagaggctgcaaaaacagtcgcatatcagctgtgcaatggaattgaggatgcgggagaggttctgcttctggcgtctgacagtaattcggaagcggcaaaagagcgtttggcaggatttcaggaagaaatcaagagcggacatccgaatgtgcagattgtagatacgatttactgtgaccagatggatgatctgaaaaaagagattgcagagcaaaagaatgctgcaaagaaggcagaggaaccagagatcacagcagatgatctcagcgatgaagatgtgatcctgtattatatggaacagcatccaaatctcaaaggaatgttcggaacgaatgttacggcagtgcagcttggattgtcagccttgaaagaggcagaaaagacagatgaaattgttcttacaggatttgatgccggagaagctcagatcgaggcattgaaaaatggggagattgaagggcttgcagtgcagaatccatttggaattggttatgcttctgtagtggcagcagcaaggagtatccttcagacaggaaacgaagctcttgtggatacaggatatgtgtgggtgacaaacgagaatatggaagatgcgtccattaaaaatatgctctataaatagaagagattcttcctatgttgttggagaagaagatcacaaggttttctctgacggattacgatacgattgacggaatccaaaaagcaaggatgcttagcagagatcggatcacatttatttccgggattgaatttacatgccaggagaagactctggatgcggtttctctgccattttccattcatctgctcggctatggctttgatgagaatgatccggatctgatcaaagcactggaggcgcgaaaacagagggttctggaagtgtttgagtctttgttgaatgccgctaatatttcaatagagcaggcaatccgattgattcataaagccgggggacgtgctgtgtgggcacatcccctctttgtttatcgcaattttgaaaaacgaaaactggaaaaagaagaaattcaggtgattctgcaatatttaaaaacgtgcggtctggacggaatagaagcaaattattcagcatttgattcttctgaaaaagaatggatatatagggtggcgcaggatgcaaagttattttgtacatccggcagcgatttccatggatccaagggaagggacttcatgggaatgaaagtattgcatgaagattggatcgggtaaaaagacatattaaaaaaagttgatatgtatattgacaaaagatgcattcagaggtatgatacacatatcaaaaatatttgatgtaaggtgaagggtatggatgattattcaaaagatgtaaagattttcaaagcactttgtgatgaaaaacgactggcgattttaaaccatttgaaaagcggtgaaaagtgcgcctgtgttttaattgagtatatgaatatcggacagtccgctttatcctatcacatgaaaatactttgcgagtcagggctggtagtcagcaggcaagaaggaaaatggacacattacagtctcagtaaaagtggaagtgagtatgcttccagacgtctgttggaactgacaacaccagaaagtgaaaagcagtcaaaatgctgttgatagaggtcatcttcggatggcttttataaaacctcaatacatcaaaaaaagttgatatatcaaagaagaggagtgatcttttggaatttttaaatacaatctggatattttttcaggatcagatactggggatgaagtggctgaatctgttgatcggcgatgtattatctgtggcaggtgtggatatcggcggccgcctgggcggaagtattcaattttttctgtatgacgtggtcaaaattacaattttgttatgcttgttgatttttatgatttcatatatccagagttattttccaccggaaagaagtaagaagattttaggaaaatttgacggaataggagcaaatgtgatatccgctttactgggaacagttactcctttttgttcctgttcttccattccgttgtttatcggatttacaagtgccggattgccattgggagttaccttttcgttcttgatctcttctcctatggttgatctgggaagtcttgtattgctgatgagtatttttggagcgaaagttgcagcggcttatgttattctcgggctggtcattgcggttatcggcgggacattgattgaaaaactgcatatggaaaaatatgtagaggattttgtaaaaaatgcaagaagtgttgatatcagttcaccgacattaaccaaaaaagacagggtacaatatgccaaaaagcaggtgataggaacttttaaaaaagtatttccatacattctgattggggtaggaataggagcagtgatccataactggattccggaaagttggatcgagagtgttttgggaagtcggaatccttttggtgtgattttagcaacgctggttggaatcccgatgtatgcggatatattcggtacaatccctgttgcagaagctttgttatcaaaaggtgcagagctgggaacaattttatcatttatgatggcagtaacaacattaagtctgccgtctttgatcatgctgaaaaaagctgtaaaaccaaaattactggtattatttattgggatatgcacggcagggattattattgtcggttatacttttaatatcttcagcgcagtatttatttaaaggagaacgtgaattatggaattatttgaaaaaaaggaagaatgaattaaaaagaatattggaagagaaggaggcgtaacagatatggataaaatgaaagtggcttttatatgtgttcacaactcatgtcgcagtcagattgcggaagcgcttggtaaatatcttgcaagtgatgtctttgaaagttattctgccggaacagaaacgaaaccgcagatcaatcaggatgcagttcgcttaatgaaggaaatataccagattgatatggaagaaacacagtactcaaagctgttgtcagatatccctcctgtagatattgtgatcacaatgggatgtaatgtgaactgcccgactgtttcatgcaggcacagggaggattggggattagaggatcctacgggaaaaagcgatgaagaattccagaagacaataaaactcattgattcaaaaattatggatttagcgaatagaattaaggttgattttatcacgcaaagtgtcgtctgaatccattgtttcgtctgtctgctgtaatacagcagcatctgcgttactcggtgtaggaggcggatttgcattctgctatattttaagcttcattccgaaaataaaagaggcactcccgatccatttgctggatggggtacctctgcttgcgggaagtgttgatatcaaggactattttgcggcgattgcagtcacactgcttgttggtatcgtgaatcttgcagcagctgttttcatatttaacaaaagagacctgtaaggatttaaaccttcgtcagagagaagatgaactctgtgccaacgccctctgtgctgatgacattgatatgttcatcgtgagcctgaatggcctctttgacgatggcaagtccgagaccggttccttttttatcctttccgcgggacaggtcggacttgtaaaagcgttcccagattttattcagttctttttttggaattcccattccggtatccttgacagaaacaaaaaccttctcattcttttcggtgacctcaatcgtgatcgaagagtcgtttccgctgaatttgatcgcattatcaatgagattgtaaagaacctgctgaatcttccgtcggtctgcatacacgagaatattgcctgccagaagcagaagctcaatggaaatccgtttgcttgtgcaggtgccttcgaaagaggcggcagtgttcttgatcatctgctggatatcaaactctgtcttgtccaggatcatttcattccggtcaaactcgttgagagtcaaaagatcctgtgtcagatctgtcagacgttccgtctcaaagagaatgatatttaaatatttctgatgcagctggggcggaatcgtgccgtcagtcatcgcctgcacatagcctttgatcgaggtgagcggagaacggaagtcgtgagagacattcgctacaatctttttctggtattcctccatatccttcagctgtgaggacatgtaattcagagaagcagaaagatatcccatctcgtcgtgcgttgttacaggaatctcataggtcagatttccggatgcatactgagttgccgcttctgtaatctgtctcagtggacggaatacaaaaaattcaaacccaatcagaaagagaaaggacagcagatagatcacggccatcgtaatgtataccggcaggatcagagaatggcatgtctgcttcaggctttcgatcggacgatggatcaaaagatagccctgcacggaaaaatcctgggtgacaggtgccatgacagtgattacatcttcctcaaagtatccatgataatttccggagataaactgattgtttccaatctcggcagggtcgaattccaggatctgttccggggcttcgattccatccagaggggcagaagtaatcagtgtgccgtctgttttgacaaaccagacggacgcgttcagatacagctgcatggcctgcagctgagaatgaacagaccaggctgaaagatcatttgaaaagtatgagggcaggtaggaggtcgcagtctgatttgcaatccggtacatattttgtgaggaatcctgttccagtttattgagcagaagctgattcgacaagagggataccgtgaaaatactgagaaatccaaagataatatacagcatgataaattttaaacgcagtgtacttttcatagtatccatccttttttgtttattttacttcgaatttgtaaccgattccccatacggtgctcagtccccagcccggatgatctttgatcttttcgcggagacgtttgatatgaacatctactgtgcgggtgtcgccgatgtattcatagccccagatctgatccaaaagctgttctcttgtaaatacctgatttggagaagcagccagaaagtataaaagctccagttcttttggaggcatgtcaacgttctggccgtcgcacagtacggaatagtttgtaagattgatggtaagtccgtcgtactcgacacattttaccttttctgcggcaggtgcttccggcttgaccggctgataacggcgcaggacagcacgcactcgtgctaccatctctttggagtcaaacggcttcatgatatagtcatctgcccccagctccagtcccagtactttgtcaaatacttctccttttgcagagagcatgatgatcggtacctgtgatttggcgcgcagttcccggcagacttgatagccgtcgattcccggaagcatcagatccagaagaacaaggtttggctgatatgtctcaaaggcagacagcgcatcctccccgtttgacacaattttcgtatcaaagcactctttcatcagatagagcgagatcagttctgcgatattctcatcatcgtccacaattaaaattttctgttttgcaatcataaatactcctctcttataaccccgtttattttaactccacgatcgtgacgccggcgtctccttctccgaattccccgagacggtaggacttaacatgcttctgacggcgcaggaattcgtgaattccttttcggagtgctcccgttccttttccgtgtactacccgcactgtgcttaaatgggacagcagagcatcatccagatatttgtccagctcagaaactgcttcgtctacagtctttccaagcagattgatttcagggctcacggacagagatttgctcattttcagcttgccttttgacgtacgtttgaatgattttggtgcataaggattcgcctcttcgataatctccagatctgaaatgtgaacctgagatcttaaaattcccatctgcactgtcacatttccgcgggaatccggaagggaactgatggttccggtcagattcatgctcagtacttttacagattctccgagtttgaaatcagttggtttgtattcctttttcggtttctgtactttcaaagatgaagatgcggtattttccttcatcttcttgcgcagacgttctctttctttttccatttcggcggctgaaatattttcttttccgaatttgcggaaatttttaatcgtctcatcagccacatctttggcatcgcgcaggattgtatttgccttttcgcgggcttcggcaagaatccgctctctttgttcctcaatgcgttcttgtttttgctgcgcctgacttttcagtgcttcgatttcttttttatatgctgcaatctcttcctgttctttttcaatcgtgcgcttgcttgtctccagatctgagatcagatcctcaaatgagacatcctgttcggaaagtctggttttggcatcttcgatgatataatccggaaggccgagcttaccggaaatcgcaaatgcattactctttcccgggattccgatcagaaggcggtaggtcgggcgcagactttctacgtcaaactcacagcaggcattctcaactccgggagtggaaagtgcgtaaacctttaattcactgtaatgagtggtagccatggtgcggattccacgtccgtgcagataggagagaatggcgatggccagtgcggctccttcggtaggatccgttccggctccaagctcatcaaacagaaccagagaattctcatctacatcatgcaggaaagagacaatatttgtcatatgagaagagaaggtactcaagctctgctcaatgctctgctcatctccgatatctgcatagacctgtttaaacactgccagttcagaacggtctctggcaggaatgtgaaggccggactgtcccatcagggtaaaaagtcctacggtttttaaagataccgtctttccgccggtatttggtcctgtaatgatcagaagagaaaaatcgtctcccagagaaaccgtgatcggaactacttttttcggatccagaagaggatgtcttccctcacggatgtgaatgcgtccatctgtgttgaggatcggacggctggcattcatagaaagtgccagtgcaccgcgggcaaagataaaatcaagatccgtcagaatacggtaatccgtgcggatctcttcaatatactgcgcggtctcttcgctgagacgggcgaggatgacctgaatttcttcctgttctttcgcatacagttctttgaggtcgttgttcagttttacgactgccatcggctcgataaacagtgtagaaccggtggaggactgatcgtggatcatcccgttgacctgactgcgatactcggctttgaccggaacacagtagcggtctccgcgcatggtgatgatcggatcctgcagataggtgcgcagagaaccgttcaccagatttgtcagagttgcatgaactttatcgttgatgtgtccgatgctgcggcggatattctttaatgtgctgctggcatcatcgctgatctcgtcttccccctgaatacagcgctcaatctcggcagtcagaggaaacagaggttccagctgttcaaaatagacatccaggcagtcacaaagctcttcctgtgtgtcgtgacgtccgtaagcctttacttttccggcattctgtaaaactttgcagatgcgaagaagctctccgcatccaagtgcaccgccgatctccagacgttttaaagactctccgatggggaatgcattgccaaaagagatgcgtccctttttgacgatccgtgtaaatgccgcttcggtctgctcctgtgcagtgttgatcttttccggatcggtcatcggtttcagcttgcggcaaagctgttttccgcgcatggaagaagcctgttcctccaaaagcgcagtaattttataatattctaattttgtcaatgttttttgattcatattctttcaccttttataattcgaactcacagctatattttaccttatttgtgggggaatgaaaaggataaatattgaacaatccgggggaatcggttatactatacagcagaggagattagcaattatgccgtggaatgaagacccaaaagaaaagtcccccaaagacttgaatgaagagcaaaaagaggatagtttttcttttctgcaggagacgatcaagccggaaccgatcaccggaaaacaggtgagaaaacagcttctgaaactggctgtttacggaatcgtggtaggtgcgtttgcctgtctgggtttctatgccctgaatccgtgggtacagaacttatttccgggatctccgaaaactgtgaccattccggaagacagtgaagagacgcatcaggaagaagacgaggcgcaggagcaggattcgcaggagaaaaatctgagagcagaagattatgaagccatgatgcagagtgtttaccagattgcagcagaggccgcaaaaagtgtggtcacggttcggggtgagcaggatgcggcgaatcttacaaaggatgtaaataatgaagatatgggatgtacagggctgatcgcagcagacaatggacaggagcttttgatcctcagcaacaattctgtctgtggggaatccagtgtctggaatgtgcagttttcagatggcagcacctgtgaagcatcgctgaaaaagcaggataaaaacagtcatctggcggtgtttggtgtcagaagaaatctgatttctgaaagcacgtgggatgagattaaaacagcggctcttggaaattcaaatatagtggcagagggagatccggtgatcgcgcttggagatacatttggatattcagatggaacaggatatggtatgatcagttctaatgcacacgaaaaagcaattccggatcatacattcagcgttctggcgacagatattccgtcagcggattttagttccggtgttctgtgtaatctggacggggagatcatcgggctcattgattccgagatctggacagagaatcagggtcatactgccaatgcatatgggatttctgatttaaaaccgatcatggaactgcttttaaacagtcagtcggttccctatgcagggatttacggagtgacggtcagcagtgatatttcggaatcaaagcaggtgccgtccggaatgtatgtgacccagatacaggcgaactctccggcaatggcagcgggaatccagagcggtgatgtaatccagtctgtggacggcgaggagattgcctctatggctcagtatgaaaaggtacttcagaagtgtaaagcgggagatacgatccggattcagggaaaacgtctcggtgcaggaggatacgtggagatttcgtttcagctggtacttgacagccgtgagtaaagaatagcaaaaatagagaggaaacaaaattattatgagatatatcaaggatttacatgaaggcgagacaatcaggaatgtatacctgtgtaaaggaaaacgttccgcggagacaagaaacggaaagccttatgacaatctgattttacaggataagacgggaacactggatggaaaagtatgggatccgaattctcaggggatcgcagagtatgatgagaaggatttcatcgaagtatttggtgatgtgacaagttataacggaagtctgcagatgaacatccgtcagatcagaaaagcagaagagggtgaatacaatccggcggattatatgccgacttctgagaagagtgtggacagtatgtatgaagagctgctcggatttatccgtggaatttccaacacgtggctgcgtcagctgctggaatattattttgtgaaagatgaggagtttatccgcgtgtttaaaggacattctgcggcaaaaacagttcatcacggatttgcaggaggacttctggagcatacgttaagtgttgtgaagatgtgtcggtattttgcggacacctatgaaatcttgaacagagatcttctttatacggcggcaatgtgccacgatattggaaagacaaaagagctttctgcatttccggataatgattatacggatgacggacagcttctggggcacatcatcattggtgttgagatgatgaatgatgcgataagagagattccgggatttccggaaaagctgggaagtgaattgaagcattgtattatttcccatcacggggagctggagtatggttctccgaaaaaaccggccctcgcagaggcgatggcattgaatctggcagataatgcagatgccaagatgcagactctgacggagatctttaaaaataaaccgggaaatgactggctgggttacaaccggatgtttgagacaaacctgagaagaagttccatttagagacagagaaacaaaagagggtgaccaaaagaaattttgtgcgccctcttttttcagataaaggagaaaaacagatgcagaagaatgatgtagtaaaggtgacgattgaagatatcggagtgaacggggaaggaatcggaaaaattgacggctatacgctgtttatcaaggatgcggtcatcggtgatgtggtggaagcaaaaatcatgaaagccaagaaaaattatggatatgcgagaatgatgcagattatcgaaccgtccaaagacagagtggagccgaagtgtaaattcgcaagacagtgcggaggatgtcagattcagcagatttcctatgagaagcagctggagtttaaaaacagaaaagtgttgggaaatctggagaggatcggcggcttttcgccagaactgctggaaaaaattgcagatccgatcgtgggaatggaaatcccatttcactacagaaataaggcgcagttcccgtttggaaaagataaaaatggagtgacagtgacagggttttatgcaggccgtactcacgatattattgcaaatacagactgtgcactgggagtagagcagaatcaggagattctggaaaccatcctgtcatttatggagcaatatcagatggagccatatgatgaaaaaacagggaaaggcttacttcgtcatgtcctgatccggtatggctttacaaccaaagagattatggtctgtcttgtcatcaacgcaaaaaaaatccctcattgtgaaaaactggttgaattactgcagaaaatcgaaggaatgaccagtatcacgatcagtgtgaatcagaaaaacaccaatgtgatcatgggagattcttatgaagtgctgtggggacaggcatttattacagattatatcggtgaaatcaaatatcagatctctccgctgtcctttttccaggtcaatccggtgcagacagagaaattgtacggacttgcactggagtatgcagacttaaaaggagatgagacggtctgggatctctactgtggaatcggaacgatatccctgtttctggcgcagaatgcgaaacaagtctacggtgtggagatcattcctcaggccatcgaggacgccagaaaaaatgcgcagatcaacggaatcgagaatgcaaagttttatgttggaaaagcagaagaggttctgccgggatattatgcagattatgctaaggcacatccgggagaacaggctcacgctgacgtgatcgtggtggatccgccgcggaaaggctgcgaggaatctctgcttgagactatggtgcagatgcagccggagcggatcgtgtacgtgagctgtgattctgccacactggcacgggatctgaagtatctgtgtgggaatgggtatgagctggtgaaagtgagggcggttgatcagttttcgcagaccgtgcatgtggagacggtagtactgctttcccacaaaaagccagacggacatatcaacgtaaaagttgagtttggcgagggtgagggaaaagttccgcttgataatatcgctaaaagagccgaagaatataagcccaaagaacgagtgacctacaaaatgataaaggagtacatagaagctaaatacggcttcaaggtacataccgcatatatcgcagaggtaaagagagatttaggcttgccaatgtacgatgctcctaatgcggtagaggaattgaaacagccgaggaagcatccgacagcagagaaagtggaagcgataaaggatgcattgaagcattttgaagtgatttaatgaggataggcgtatcattagaaatagtggtacgcttatttttttacatagttgtcttttcgttgaccaatattttatttggttataaaagcggaggacagattttatactaaactgcctaattgatagaattaaaagcgttcactttgctattattgacttaaagagaaaaatcaaatataatatagtaaagtgcccaatcgttggcttgattaggggcgattgaatagaggtgaagatatgcttcagaataaagatattgagacactgagaatgttgtttagcagtcataattatgttatgactactgctgaacttacagcttcaaagttatactatgcagatataaaacaacttttagatgaaggattgattgaaagagtcaggcgaggttactatcactggactcaagattatggagaaagtgaagttgtcattatcaatcgattgtttcccgatgcagtgttctgtatggagactgccctattctattatagatacagtgacagaaatcctgctgaatggaactttgcaatagataaaaatgtctctaagcggcgaacaaaaatcgattatccgtttataaaggcatatcgtgttgagtcagagttggttacgctgggcgaaaccgaaggtgaaattgatttccacaaagtccgcatttatgaccgtgaccgtactatttgcgatgtgctgcgaaatatgaacaagatagataaggaggtttttaataaagcagtacaaggctatgttaaggacccgaaaaagaatataccgaatcttatagaatatgcgaaagttttgcgtgttcaaacgcgtgtaaaagaattgattggagtgtggttgtaatggcagatatagcagcttccgttctggcaaagctgagaaataaagcaaaagcttctggtatcagttaccagcaatgtttgcagctttttgtgcaggaagaatttttgagaaagttatcaaaatctgggtgtgaggatacgcttatactcaaaggtggattgttcatttatactttaactaattttgaaagtagagcaacaattgatgtcgatttcttgctccgtggatactctaatacaatagatgatgtaaaagagttgatttgtaaaatcatcgacacgccgactggtaacgattatatagaaatgcgagcaaaaggctttgaagagatttctccgcaaagaaaatatcacggtatcagtacacaaattattgctcaaataaaaaatgtgcgtgtgccgtttaatgttgatataggcgtgggcgatattatagtcccccgtgccgaagaacgcacaatcaacactcagcttccagattttgaagcacctgtaatcaaaacttattcccttgaaagcaccattgctgagaagtttgatgctatactgcaacgttttgagctgacaggcagaatgaaagatttttatgacatctattatctttcaaggacattcaattttgagggtgcaaaattgcaggcagctatatttgaaaccttacagcggcgtggtactccctatgatagagatagttttaagcgagttgttgcacttggcgatgatgaagatatgcagaagcgttggaaattctttttgaaaaccataaaagataatacgcttgagttttcattcatcattacggaaatccagacttttcttgagcctgtgtttgatgcgattgtgaatgagaaagaatggcaagagcagtggaactttattatgaaatggaataaaaatgaaaggagtcccaaattatgagtagcgtacttactgttgaacagcgtgagcaagcaggttctgacttgtgatgcataaggggaggggaataggcatatgggtacgggtcgtataaaaaagaatacattgagagcgaagatgcttggcatactgatgctgtgtgcgatgactagccttctggctgcaggaatcgtctcttatatggcgctgagaatgatacagaatgacagtatagaggataatatgaagatgtatctggatcagatcacgcggaatactgacggcgcctattatgatatgctcagtattatgaactacatgggtccgggagggctggtcggaaatgtgacggacagttatctcggtgcaacggataattttgacaggtttattgaacagcggacacttagggaagagatggcaggacttggttatgtcaacacaaaactggtaggtgtcatgtattatgaccgggaggagaagaaggaacttatcagcggcatgaatgtcagggcgctggacggaagccatgcttcactgcccgaggttgtggagtgcgcgggaaatgtcatacaggcggcccattcgtctattcttgggagtggcgaagaaccggtcttttccgtcatgagagaggtggtcttcggaaacgggaaaaggctggatgtttatgcggagatcgaggcggacatgaaaactcctgaagaaataaataaggcaggacggccctacacttatatccagacggatgagagaagaatcacgcggtacagtacaaatcctgtcattatacagggacagaaactcttctccacaacactctcaaagggagattaccaggttgagacaagagagggatataagatcatggcataccggagccagatgggatacattaatgcagtggcgctgccggacaacatgtatcagaatgagatcaaccattggagaatgaggatgacgctcatcatagttgcatcgtttctgatcttcgccctgtctgttttttatctttatcggataatctgccggccgttgaatcaatttcgaaggcaaatggtacagattggaaacggcgctcttcaggcggtgcatgaagagtcggatatcgcggagtttgacagcctgatgagggaagtagaacagatgaagtgtcagatcgagaatctcatcagcaatatggtagaaaaggaaaagagtatacagaagacggagtatgagaaacttatctatcagatcaatccacatttccttctcaatacgttgaactcggtccagtggatggcacagatgagctgccagagagatatcagcgagtttgtgcagagattaaagaagcttctttcgtataatctgggcaaagaaggcagtcagacgacgctgcggatggagttggagatcgtaaaggaatatattgcccttcagcagatgaggtatgactttgttatcgagatgcatatcgaagatggtgactatctcgaccagccgacggtccgcatgctttttcagccgcttgtagaaaacgcgatccgttatggacttggggacgatgagaagatcagtatccaggtgtttgaagatgtggcgagacatcttgctgtcgtgactatctctgacagtggaaagggactgactcaggaggaaatcgatgagatcaaccagccatttgattatgactgggaataccggaagaatgagaacagaggcatcgggcttcgctacgtcaaggctatgctggaatcattttatgatggacagacaagtctgtttgtaaacagcagaaaaggaatcgggacaaggattacaatcctcctcccgatccgggatctgacagaacaaaaggggaaggacacagaggttacattggaagaagataaggtgggacaagcagatgaacgtattgatcgttgatgatgataaacttgccagaaaaggcctggtcgctattatggactgggaaaagtatggattcaaggtggcgggagatgtacagaacggaagaaaggctctggaatttctccgtactcatccggtggacatcgtgtttacggatattgatatgccggagatcgatggactggaactgatgcagatgtgtaaagaagaattcccggatattaagtttgtaattttttctgtgtatgaaaatttcagttatgcacagactgcgattcgtatgggggcgttggactatatctcgaagatcagtttttccccggaagagtgtgaacagatactggagcgggtcagcgcaaagtacaggcagacaagcagagacgggcaggcagacggggaagaccgggaaaaactcagggaactgagcagaagatggatgtacaccggatggatcttcaatgagaaagaatttgaagatctctgccgggagactaaggaaatcagtctgaggagtgctgagaggatttttgtaaagagctttcacgatattcagatcctgtcaggcggggaaggagagttcccgtcgctggatacggttgaggagatgctggactgggttcgccgctggcgggaaaacatctatgaagtatgccgcagtacgccgcagaaaaatgatatctgtgcgtttgctgctgtcatcctgtatgtggatgagcacatcggggaggagctgcgctctgaagacgcggctgaacagatcgggatgagcaggagttatttcagcacaagatttaaagaaatgacaggagaaacattccatcagtatgtgatacacaggaaaatgaaagccgcggctgagcggatagaggagggcgggaagagcattacccagatcgccaccgaacttggatatgacaatttccactattttgcaagagtatttgcaagggagcatgggtgtaacccttccgaatatcgaaaagagagaaaaaatgtctgattttcatcggacattttttttgtgataaaaaaacatttggtaaatcagaaacaatatcatctggcaggatatgggtgtagaagataaactgtttacaaaaaggaagggaggtcttagtgtgtatatcaaacgatttgtgaagcattactacattatgctgatcccggcgctcttatggctgtttttcttcagtatcgttccgatgttcggtatcgtcatggcattccaggactataatccgggcaagggaatcctgcattctgagtttgtcgggcttgaaaattttgtgtatatgtttcagatgaacgacgtcaaacaggtgctgtgcaataccgttgtgatcgcggtcggaaagattatcggaaatattatcattccgctgctcttcgcacttctgcttaatgaactctgcattaagcggatcaaacggccgatccagactatcgtgtatctgccttatttcctgtcctgggttatcctggcaaagattgttctgaacatcttcggatatacaggaccaattaatcagctgatcgaggcgttcggaggaaatccgatcaatttcttcggggagccgtcactgttccagtctctggtaatcggcacagatatctggaaaggattcgggtacaatacggtagtttacctggcagcaatactcggggtagatcagagtctttatgaggctgcggcggtagacggagcaggaaggttcaaacgtatctggcatgtgacgcttccgggaataaggacaacggtcgcactcctggcgatcctgtcacttggaaacgtgctcaacgcaggttttgatcagatctacaatctgtataatccgcttgtttattctacaggtgatatcatcgacacctgggtataccgtgcaggtcttgagaatctgcagtactcgctggcgacggcagtcggcttgtttaagtcggtgatcagcgttatcttgatcgttataggatataagctggcagataagtttaccggttacaaactattctgaggaggtgcagtaaatgatagaaaataaaggtataggatcgaaaatattcgatgtgataaatgtcgtgatccttgttctgatcacgctgatctgcatcctgcctgtatggtatgtcctctgcgtctctctgagcagcagggaggctgtcaatgcaggacaggttgctctctggccggtgggattcaatctcctgtcatatcagaagatcctgggggagagtgatttctttggttcctttctcgtatctgtcaagcgagttgtgttaggaaccggggtcagtatggtgtgcatacttctggcagcatatccgctgtcaagaacaaaaaaacagtttccgaagagagacatcttcatgtggatctttgtattctgcatgctgttcaacggaggtactgttccgtggtatgtcacaatgaaaaattacggtctcatggacagcatatggggacttgttcttggtatgggtcttcaggttttcaatgttatcctggcagtaaactttttcaagaatctgcctgttgaactggaggaagcgtgctttgtagacggcggcggaccatggaggaatctgttttccatctacattcctctggcaaagccgatggttgcgacgatctccctcttcacgatcgttcagtactggaatgagttcttccagggaatggtgctgagtacgagacagagcagctatccgctccagacatacatacagcagatggtagtaacacttgattattcaaatatgaatgtcgatcagatcgcacaggcgatgaaattgaacaatctgtcgctggacgcggcgaagatatttatcgccatgatcccggtactgatcatatatccattcttgcagaaatattttgtatccggcattactctgggatcggtaaaaggatagtagcgatacgggaaagtgttcggtgaaaatagagaacagtaaaaaaagaaaaggagaaaatggattatgaaattaaaaagagtaatcgctatagcgtgcactgcagctatgacggcgtctttgatctcaggctgcggcggttcgtctgacgaagggcagaaagaagcggtcaaggaagcagaaggaacagcaaaggaagatctgcctctggcaaaatatccggagacagttacagtacatctgggcgggaaaatgaatccgaatgcgaagatcccggaaggaatgtcgtttgaagacaactcctatacaagactgttgaaagatgacctgaacattgaggtagtatacgactgggttgcatctatgtcagactatgatgaaaaaatgagtctctgcatcggaagtaatacagttccggaaatcatgaatgtaaatgcagctcagtacagagctcttctaaaatacgatatgatacagccgttggatgactattttgatgattatgcatctgacgccctgaagagttatgtagaatccggcggtgatgagctgatggactgtatcacaaacgatgacggtgagattatggcaatccctgcaccgaacctgactgcaggcggcgtgaacgagatgtggatccgtcaggactggctggatgctcttggactggaagcaccccgtacatgggacgagctggcacaagtggcaaacgcatttgttacagaggatccggatggaaacggagaggacgacacgattggtattcttggaccaggaaatgcggatcatatgaatgcagtcggcggcaaccagttcggacttgacccgctgttcagctgctatcagtcttatccgcagtactggctggaaggcgaggacggaaaagtagagtatggttcaattcagccggagacaaagactgcactggaaaatatctcaaaactttatgctgatggagatatcgatcctgagatgctcgtcagaagcgacagcaaggaacctcttcttgccggaaaagttggaatctttttcggaccgtggtggtgtgcatatacatttgcagatacaactctgtcaggttcagcagactggagggcatatttcacacctctttccgaagacggaaaatattatactcatatggcagagccgacgacgcagtatgttgtggcaagcaaggactgcaaaaatccggaagctgcatttaaaatcatcaactacctgattgcaaacgaacagacatgggtagaagaaggagtaacatctacagagatgggaacggcagatttctatccgctgtacaatgcatatgacaatgcggatgagatcgagacatcttatgaagtgctgacgcaatatcttgcaggagaggtcggcattgacgatgtagatttttcaacacataaactgctgaagaacgatatggaagcaattacggaactcaagaaagagccttatgatgactttagtcttgaatactggaatcttgacagtgacctggcacaggggaacctgcctcgtctggtagcgatcatggtaggtgacgctccgcttgtcaatgaggagtatgttccgatttacaatgtttacaacggacagacagaaaccatggaagcgaaatgggcaaatctgaagaagatggaagaagaaactttcgcaaagattatcatgggtaaagctgatatcagtgagtttgataccttcgtagagaactggaagagccagggcggcgatcaaatcctgaaggaaatcaacgaggaactgggcaaataaggaattaaaatagggggcggtcaggccgccctaaatattgaggtgcttcgatgaaagagaataaaatcgtatatggcctgatcggcttcggcggcatggggaaatggcacaccgagattttggaaaatgtgccggagatcgagctcgccgggatttatgacattaaagaagaaaaaagaaaacttgcagaagaagcaggatttcatacatatgagacagaagaagccatgcttgcagatgagagtatagatgtgattcttgtggcaacaccgaatgacacacacagaccgatcgcactgcgcgccatggaggcggggaaaaatgtcattgtagagaaacccgctactctctctctgaaggaacttacagaactggaggacatggccggaaagacaggccagttcctgacggtacaccagaacagacgatgggatgaagatctcctgacagtccgggagatactgaaggatcagacgatgggagagattttccgcatagagagccgggtacatggatcccgtggaataccgggagactggagaaaagaaaaagcacacggcggcggaatggtgctggactggggcgtccacctctttgatcagatctttcgtctgaccggggaacgcaggctgaagacggtatatgccactttgaccaatgtgacaaatcaggaggtagatgacgggtttaccgctgttctccggtttgaaggcggcctggaagttcttgtggaagtaggtacgaataactttatttctctgccccgctggtacgttctgggagaaaacggaagtgccgttgttgaggactgggacctgtccggaaagattgtaaaggctttctcagaagaggagaaagaaatagttccggtgcggacagcagcaggacttacgaagacgatggctccaagaagagaggatacgatccgtgtagaagagcttccgagagtgcccggagatatcgccgatttccatcgaaatgtcgctgctgtacttttaagaggagaagaaccggcagtgaagcttccggaggtaaaaagagtaatgcgcctgatggagacagtgttcgagtctgccgaaaagaatcatgttatggactttgaatgaggaagggagagagtgaacaatgaaacagatcaagatcggaacatgcatccagggaccaagggcagaagagtggctaccgggatttctgggaaaaggatttgaaacattttctctgaattttcatatgtctctggaagggacagatctggaacagcttgccggaaagacagaaaagctgctggaaggaagaccggagcgcatcagcacgattggattttactgcaatccgatccagtatccggaacacaggaagacgctggagcaggttatcaggacagcgggaagattcggagctgatcatgtaagcacttttgcaggggcatttgaggaccgccctgtagaggaatctttcgccgagtttggtaaagtattcagggaacttgcagacctggcgaaagagaacggagtcaaactgggaatagagaactgccttatggacggaacatgggaaaaagctacatgtaatattggttttcatccacgtgcgtgggaggcaatgtttgaagaggtaaaacaggacaatttcggtctggaatgggagccgacccaccagatggtacagcttatagatccggtttctcagctcagaaaatggtgtcataaaatcgtgcacgtacacggcaaagatgcaactatcgactggaatgctgtacgtcatggaggcatttcaggggcggagacttttgtatggcacagaatgccgggctttggcaacacaaactggagcgatattatttctatcctgagggcaaacggatatgaagatgatatctgtatcgaaggatatcatgatccggtttactcaggagagtgggagatgacaggacagctccatgctctccggtatctgaaatggtgccggggcggcgattatgaaccggttccatgggaagtataacaggagagtaatgccggagttaaggtgaaaatgttgacgaaaggatactcctgcgcagaggccgggaggaagaaggagacagaaatgaaacttggatttattacatcaattctcgaagattttacttatgaagagatgatcgacttcgcctcagagcatggatttgagtgcgtagaggtggcgagctggaagaaggaaaaagcagaacgcagatatgccggagtaagtcatattgatgcggagagggttcttggcgatgacagttatgccgcacatatttcaggatacgcgaaagaaaaaaatgtagaaatttcggctcttgcctattatcctaacgtgatggatgcggatcggaacaagggtgaggctgcggtggagcatttaaaaaatgtcattctcgccagcgcaaaactgaatgtgaacatggtgaccacatttatcgggagagatcagacaaagactgtggaagagaatcttcttttagtaaagaaagtatgggaaccggtcatccggctggcagaagaaaacggcgtaaagatagcaatagaaaactgtccgatgctgttcggaccagatcagtggccgggcggtcagaatcttatgacgactccggcagtgtggagaaaagtttttgagatcctggacagcgactgtctgggtattaattacgacccgtcgcattttgtatggcagatgatagacccgatccgtccgatctatgaattcaaagacaagatattccacgtgcactataaggatatcaagctgtatccggaacgtctcaatgactgcggcattatggcttatcctcttgatttcatgtctccgaagatccccggacttggagatgtggactggggcagatatgtatctgctcttacagacatcggttacaatggttattcatgcattgagatcgaggacaaggcgtttgaaagttcaagggaaatgattgaaaaagcgcttgttctgagccagagatatttgagacagtatgtgatttagaaaacaatatcaagagacataaatggaggagataacgatgaaaaaattacgtgcaggtatcgtaggatgcgggggaattgccaatgcaaagcatcttccggcaatggaaaagtgcggactctatgaagtggtcgcattctgtgacataatcccggagcaggcacaggagacaaaagaaaagttcggcagcagtgacgcaaaggtattcactgactacagggaactggtaaaggaagatcttgatgtggtatatgtgacgacaccgaacagatcgcattccgaaatttccatcgctgccatggaggcgggcaaggatgtcatgtgcgaaaagccgatggcaagaacttatgcggaaacagagaaaatgctggagacggcaaagcggacagggcgagtgctgaatatcgcataccagaacaggtatcgtccggacagcgcctacctgaaagaaatgtgcaaaaacggagagatgggagacatctattttgcaaaggcgcatgcgctcagaaggagagcggtgcctacctggggggtatttcttaatgaagaagagcagggcggcggtccgctgatcgatatcggtactcatgcgctggatctgacgctctggatgatggacaactatgaagtggcttctgtgaccggagcggtgttccacaaactgtctcagcagacagatcagggaaatgcattcgggaactgggatccggagcagtttaaagtagaagactcggcgttcggattcatccggatgaagaacggggctctgatcgaactggaatcagcctgggctttaaatactctggatgtggacgaggcaaaaacaagcatatgtggaacaaaggccggagcggatatgaaagatggacttcgcatcaaccggatccatcataacacccagactgtagagataccggatctgtcaggcggcggagtggctttctttgcaggcgaagaaaaatctgcggcagatgtagaacaggaacttttctaccatattgttgttgacggacaggaacagatcgtaaaaccggaacaggcggcggtagtaacccgcgttcttgaagcaatataccgttcagcagagagcggagagacaatttactttgattgagggaaaaggagattatggaggaaagaaaattaaaacagctgctgtctgagatgtcgcttcgagaaaagatcggacagatgatacagctgaccggaatttactttgatgaggatgcagttcttaccggggcggtgggggaaggccagccgcctcagtgggtgatccggtacgccggttcagtgcttggtatgatcggggcagaaaagctcagggcgatccagaaaaaatatatgaaagaacatccgcatcacattccgctgctgtttatggcggatgttatacacgggtgcaggaccatagctccgatccctcttggtcaggcatgttcctttcatccggaactggttgagaagatggcggggcatgccgcggcagagtctgctgctgaggggatcaaggccacgttttctccgatgatggatgtgtccagagacccgagatggggaaggataatggaatctttcggggaagatcctttccttagcggggtcatgggcacagtaatgctcaggggatatcagaagggaaacggtaatgatcagaagggaagcagagaaataccggagtccggcattgccggatgtctgaaacattttgccggttatggagcggtgaatgcgggcagagaatacaatgacgtggaaatatctcagaggacgttccgcgagcagtacctcaaaccgttccgcatggcgatgcatgcagatcccgcgatggtgatgactgcttttaatgcagttgaccgcagaccggtcagcggcaacaaagagctgctcgaagatattctcaggaaagaaatggggttcagcggcacggtgatctccgactggggggctgtgggccagctggaggaacagaatgtagtgtcaggccaggcagaggctgcagatgcggcagtacatgcaggagttgatattgatatgatgagtccggcatacatgtttcatctggaagaactggtcgaagaaggtcatgtccccgtttcgctgatagatagaagcgcgtggaatgtgctggtgatgaagaacagactcggactgtttgaggatccgttcgcaggaatggagggagaagaacagctgtctgcggaggcaaagaagatcgcacttgccctggcatgtgagagctcggttctgttgaaaaatgcggatctgcttccgctgaaaccggaacagaaggtgttctgggccggcccttatgtggagtcgacggaactgctgagcagatgggcgatcttcggccgtcacgacgatgtggagacgatcagcgaagttctgagagaccggaagctgccggtcaggtttgttccgggctgtgagatactcacagaagaagaaagacggctttggcaggctgataactgccggattcagggtgaagaagaacagaataaagaaatgtcgggatcgtgcggtgaccaatacgcagaccttgaagaaatcggaccggaggatacagtggtacttgtgcttggagaacatgaagcacagtccggtgaggcggcgagcagggcatttcttgatcttccggaaggtcagcagaagttttttgacgcagtagctgagcgcacctcccatattgtagcggtcatcatgtcaggacgtccgctggatatacggaaaatagcagaaaagtcccaggctgtcctccttgcctggagaccgggaacgatgggagccgaggctgtcgtccgtctggtgtacggagaagagacgccttccggtaaactgtcagtgagcataccgtggggtgtgggacaggtgcctgtcagctactgggatgtaaagaccggacaccggatgacggagacgaatccggaaaaccgctttacgagccggtatatggatattccgaatgagccgctttatccgtttggatttggtctctcttacacaggatttaccattacacctcctgtacttgagaaacaggagagagaagataagatcggaatattatgtaaggtgaaaaatgtgggagaggtgccgggggcggaagttgtacagtgttatgtcgagacactctgcgctccggtcgtacggccggccaaagaacttatcaggttccggaaagttttcctgcagcctggtgaagaacagaaagtcaaatttacgattgaccggaaagaactggctttttacggagcggatatggaactcatagatggaggcattccgcttcggattaccgtcgggaacagcagcagggcagaagcaggggacgtcagtctccagctagacagaagatcgtaacacagaaggtcaacagacagatcgtaaaactgaacaaggggcgacgtaagccccattgtttccatatatcagctgccgtcaggagctgaaagaatatatgctgcgttgaggatttctcataaacgagggtgtcccaaaagtcatgaaatgacttgagggataccctcgttcttttgtaaaaaaatagagaacggttaccacgccaatgtcatttagttaagacatccgctgtggaaacaatacaggtgcttctgtctacgatgacagaggaattttgttcatataaaaatggagcccttgttttttatacaaaaagctccattactgtttatttatttgaatttatgattccttcaatatcacggccaccgtagaatattcgagctactgtaactgcccttttctcgtcatcaacaagataatacacaataaagttatctaccggaaggtgatgcattttcatcgaatgccaaggctcccagtcaactaacgcataacgagccggcatgaaatccaatgaacgaacctcttttcgtatgtggcccagctgagcagtagcagtctctggagccaggagttcattcgcaatgtacgaatagatttcacgtaaatcgtcaagtgcatctacagaatagccgaccttatagctatccgtcatatgccaaattcctttgcaagtgccgcatcgatttcatctgcagaatatacctttcctgctttgatggaatcaacacccttttggagttctgcatcaagctgttctctggtcattgcaccaacagctaatggcttagaagaaggaagtttcaattcaaatggcatacccttcttcagtacaatctggctataaagcatctgaattgcactggatggagaaatgccaagctgagaaagaatgctctcagcattatccttgagattggtatctattcttgcataaacagcggatgtatttgccatagtatcgcctcctttttctttattatattcgcttttgcttgcgattgcaagcatttgcatagattgttttatgacgaaactttgaattttatacgccctttgaggcagaaaggaatatttatgggatttttatcaggactgtttcattccagagacaagcccaccaacagcaccaacggcagcgcctattgctttctctttggtggaagcaactctggcaaagccgttaatgaacgaagcgctatgcagtgaataactagaaaaattatagtgaaagaagataatggatatagttgaaaaggaaagttaggcaaaagcttaccattatcgtagaatatttctctaacaagcgtaaaaaatatcattgacacattatttcgtttgtgctaaaatccaaagcaatttaacatagtaaaccgttgaagcggagataacggcaatgatgcctttacagagagcctgagatgctgagaatcaggcaagaaacaagttgtcaaatggaccgctgagggtgcagtcaaatgggatcttttcccagagtattctgcaacgtgtgggcatacgtcagttgccggggatatgttggtatcctgctaagcgcacgggttataccgtgaatcaaggtggcaccgcgggtagagtcatactgtagatgcatctattcgtccttgacagaggctatatttctgtcagggacgttttttatttttataaagcttctttgacgagagatatcagtcaaaggagcttttttaaaaggaggttgcaatatgctgttgacgagatattggcggtgcttttgtgcgccggatatagaatttaaataagaatcttgatcgtaaccgaaattaatgtaatgttatcaatttggaggtgcaggtaatgaaaattcttccaacgttagctgaagtcagagagattgcttcagatgtaaactacaatgtgctgccggtcagctgtgaaatactttccgatttcacaacccccatcgaaatcataaagatactgaaaaacgtatcgactcactgttatatgctggaatccgctcaggcgaatgaaacctggggacgttatacattcctcggctttgatccaaagatggaaattacttgcgtagatggtgaaatgaaaatcggaaatctgaaattaaaaactgaacatccgtccgactatctgcggcagattcttgcagattataaaagtccgcgttttgattatcttccaacatttacgggaggtcttgtcggatatttttcatacgactatcttggttacagtgaaccaacagtgaaatgcggcgccaaagacacagaggattttaaggatgttgatctgatgctttttgataaggttattgcttttgatcatctcagacaaaaaatcgttcttattgtcaatatgctgcttgatgatgttgaggtcagatataataaagcagttatggaactgaagcgactgattgaacttcttagaaatggagaaaagagggaggaaccaggcgggaagcttctgggagaggttacatcactgtttggcaaagaacagttctgtgccatggtggaaaaggcaaaacaccatattcatgagggaaacatctttcaaattgtgctgtcaaaccgactgtctgctccctttgaaggaagcctgctcaatacctaccgtgttcttagaacaatcaatccgtctccttatatgttctatttttcaggaacggatgtcgaggttgcaggcgcttcgcctgagactctggtaaagctggaaaatggtgtgcttcacacctttccgcttgccggtaccagaccgagaggaaaaaacgatgaggaagataaagcactggaaacagagctgcttgcagatgaaaaggagctggccgaacataatatgctggttgaccttggcagaaacgatcttggtaaaatcagtaagtttggcaccgttcaggtggaaaaactgcattctgttgaacgattctcccatgttatgcacattggctctactgtacggggtgaaataacagagaaacacgatgcacttgatgccattgaagcggtattgcctgccggaacactttccggtgcaccgaagatccgggcttgtcagcttatcggagaacttgaaaacaacaagcggggaatctatggcggcgccattggatacatcgacttcacaggaaatatggacacctgtattgcgattcgtatcgcctacaagaaaaacgggaaggtttttgttagaagcggagccgggatcgtggcagattccgtacctgaaaaggagtatgaagaatgcatcaacaaagccagatcctcgctgaaagcgttgaaacttgcacaggaggcagaattatgatcttacttatcgataattatgacagcttttcttataacctctaccagctcattggcgaaatagatccgaatatcaaagtcatccgtaatgatgaaatgacagttgatgagataaaagaactaacacctgaccgcatgattctgtctcccggtccgggcagacctgaagatgcaggcataattgttgaagccgtaaaaatactcgggaaggaaattccgattctcggtgtttgtctcggacatcaggcaatatgtacggcatttggttcaaccattacttacgcaaaagaacggatgcatggaaaacaatcggatgtcaaatttgacataaattgtccgttgtttgcgggctgtcctgaaattgctcccgttgccaggtatcattctcttgcggcagatgccgacacaatttccgaatgtctgaaaatcaccgctttcactgcggacggagaggtaatggcagtgcagcataaagaatatccgatctacggggtacaatttcatcccgaatccataatgacaccggatggaaagcaaatgcttagaaattttataaaggagatatgagtcatgatcaaagaagccattgtaaaaatcgtcaataaagaagacctcacttacgatgaggcatattctgttatgaatgaaatcatgagcggtgaaacaactgcgacgcagaacgctgcatttcttgcagctttgtcaaccaaaagtgccagagcagaaacaaccgatgaaattgccggatgtgcggccgctatgagagcgcatgccatgaaggtcgaaacaggaatggatctttttgaaattgtaggaaccggtggtgataatgcgcacagcttcaatatttccactacatcagctctggttgccgctgcaggaggtatgaaagtggccaaacatggaaaccgtgcagcatcctcacaatgcggaacggcagattgtctggaagccctcggcgtaaacattcagcagagccctgagaggtgcctggaacttttggatgaagtgggaatgtgttttttcttcgcacagaaatatcatacttcaatgaaacatgtgggagcaatccgcaaggagttgggattccgtacggtgttcaacatcctcggccctcttaccaatccggggacaccttctatgcagcttctcggtgtgtatgacgagtatcttgtggaaccattggcacaggtattgattcagcttggtatcaggcgcgggatggttgtgtatgggcaggataagctggacgaaatctccatgagcgcaccaaccacgatatgtgagattcgagacggctggttcaaatcttcagtgatcacgccggaagatttcgggttcgaaagatgtacgaaagaagatttgaagggtggtgcgcctgaagaaaacgcaaaaattacccttgccattctaaatggagaaagaggttacaagagaaatgctgtgcttttaaatgccggcgcggcactttacattggtggaaaatcagacagtatgaaagagggtatcgcacttgctgcagaaatcattgactcaggcaaggcgctggaaacactgaataagctcattgaagtcagcaaccgttcggaggtgtgagtatgacgattttagatcagcttgccggatgcgcccgagagcgcaccgggcaggcaaagttaagaatatcacttgaagagttgaaacagcaggcgttatccctgccgaaaggaaattttacatttgaaaaagcaatcaaaaaaccaggactttcttttatctgcgagtgcaaaaaagcctctccatccaaagggatcattgctcaggagtttccatatctgcagattgcaaaggactatgaagtggcaggggcagactgtatttcggtactgaccgaaccaaaatggtttcttggaagtgacgagtatctgaaaaaaattgccggcgcggtttctgttccctgtctgcgcaaggattttacggtggatgagtacatgatctacgaggcaaaggtgttaggcgcatcagcggtgcttttgatctgctctatattgagtgaggaacaaataaaagaatatatcagtatttgcgatgagctgggactttctgctttggtggagacacacgatgaatgcgaagtgagaatggcattaaatgccggggcacgtatgataggagtcaacaatcgcaatctcaaagatttctcggtggacaccggcaatagccgcagattcagaaagctgattccgccggatgtactgtttgtttctgaaagtggtgtaagttgtgccgaagatgtaagaaaactctgtgagatcggtgcggatgctgttttaatcggagaaacacttatgagagcagagaataaagcagccaggcttgccgaactgagaggtgtgttatgaccaaaatgaaactctgtgggctgtttcgcccgtgtgatatagatgcagctaatgaattgaaaccagaatatattggttttgtgtttgcaccgaaaagcagacgatatgtaacgcctgaaaaagcggcagaattaaaaaagctgcttgatcctgacattcaagcggttggggtatttgtaaatgaagcggctgaacggattgcggctctcttaaataaaggaattattgatattgcccagcttcatggcgctgaagatgaaaatgatatcaatcaactgagaacgcttactgataaaccgatcatcaaggctttttgtataaaagagtcagaagatattacagatgctgaatcctgcttagcagattatattttgcttgattccggcgaagggacaggaactgtatttgactggaagaagatacaaaacatacaaagaccgtatttcctcgctggcggactttccattgataatgtagaaaatgcggtgagacaattaaacccgtatgcggtcgatgtcagttcaggcattgagacagatgggctcaaagataaaacgaaaatggcggcatttgttgccgctgtcagaaaggaagaacgattatgacgaatccaaacggacgcttcgggattcacggtggacagtatattcccgaaacattgatgaatgcagtgattgaactggaagaagcatataacaactataaaaacgatcccgaatttaaccgggagcttacagaacttttgaatgaatacgcaggcagaccatccagattgtactatgcagagaaaatgaccaaagaccttggcggcgccaaaatatatctcaaacgtgaggatctcaatcataccggtgcgcataaaatcaacaacgtactggggcaggctctgcttgcaaaaaagatgggaaaaacaaggctgatcgctgaaaccggagcaggtcagcatggtgttgcaactgcaactgctgcagcccttatggggatggagtgcgtggtgtttatgggcgaagaagataccgttcgccaggcgcttaatgtatatcgtatgagactgcttggagcagaggtgattccggttaaaacaggaacggcaactctgaaagatgcagtttctgaagcaatgcgtgagtggacttctcgcatttccgatacgcattattgtctcggctcagttatgggaccgcatccgtttccgacgattgtgcgtgattttcaggcagtgatctccaaagaaatcaaagatcagatgcttgttaaagaaggaagattgccggatgcggtgatagcctgtgtaggcggtggttccaatgcaatcggcagtttttatcactttattgaagatgagaatgtcagactgatcggctgtgaagcggcaggaaggggcgttgatacattggaaacagcagccacgattgcaaccggaagacttggtatttttcatggaatgaagtcttacttttgccaggatcagtacggtcagatcgctcctgtttattccatttccgccggcctggattatcccggggtaggtcctgaacactcttatctgcatgatatcggcagagccgaatatgtgccggttacggatgatgaagcagtaaatgcatttgaatatcttgcaaagatggaaggtattattccggcaatcgaatcggcgcatgcagttgctcacgcgatgaagattgcaccggcaatggatccgaataaaatcattgtgattacgatttcaggcagaggtgataaagactgcgccgcgattgcccgttacagaggggaggatatttatgagtaacattaaaaaagtatttgaaaagggaaaggcttttatcgcctttattacttgtggcgatccggatctggaaacaacagccagggctgtccgggctgccgcagagaatggtgcagatctcatcgaacttggcataccgttctctgatcctaccgcagaaggttccgtcattcagggtgcaaatttaagagcattaaatggagggatcactacggataaaatatttgcattcgtaaaagagctgcggaaagatgtaacagtgccaatggtttttatgacttatgcaaatgtagttttctcttacggtgcaaaaaagtttatttctgcgtgtcgagagattgagattgacggattgattcttcctgatctgccatttgaggaaaaagaagaatttcatccgatctgcagtcagtatggtgtggatctgatatctttaattgctccaacctctaaaaacaggattgcaatgattgcaaaagaagcggaaggttttatttatatcgtttccagtctcggagtgacaggtgtgagaagtgaaatcaagacggatttggattcgatcgtaaaagtgataagagaaaatacggatgtaccctgtgcaatcggattcggcatttccacgcctgagcaggcaaagaaaatggcagatatctcggatggagccattgtaggctccgcgattatcaagcttttggaaaagcatggaaaagaggcgccggattacatcggtgagtatgtaagatccatgaagaacgccataagataaatctgttgtcagagacatccaaacatgataaaatgccgataaataataattgtgttagaagagactgacattctaaaggagtgaaagcatgcattcaatattaattgtagaagatgatatgaacataaacgggctgttaaaagaggctcttgagaaagcggactatctctgcacacaggcattttcaggaacagaggcgcgtatgcttcttgcaatgaaccggtattcggtagtgcttctggatctgatgctgccgggaatttccggggaagaggtgctgcaggagatccgaaagcagggaaatactccggttattattctgacagcgaaggatacaattgatgataaggtggaagtgttgcaaagtggtgcggatgattatgtgacgaagccatttgacatcaaggaggtactggctcgtgttgcagtgcagatccggagaatggaagggagtttcagtgaaggcaatttggtttatcagggtttggaactggacagagaaaatttttgtgtgagggtggatcagacagagctcccgaaaattacaaggcaggagttttctattttggagcttcttttaaagcatccgaaaaaggtattcagtaaagaagagatttttgagtatgcctgggaagaggcctatatgggagagacaaagacgctggatgtacatatcagcaatattcgcaagaagataaaatctgtgaccagcaaggaatatattgagacgatatggggaatcggataccggctgcatccgtaaatttactctttttttactttttatttgcgatggattaggagttgcctcgtagaataagagcagatcaaaggaaaaggagaaataaggatgagcgagtatttactgagtacaagcggactgacaaagcagttcgggcatcataaggcagtcaacaatgtagatctgcacgtgaaaaaaggtgcgatttacggatttatcggaagaaacggcgccggaaagacaacatttttaaaaatgatcagcggattatcaaagccgaccgacggtgagatccaaatgtttggatatagaaatgaggaactcaaaaatgtcagatcccgtatcagctgtctgattgaagcacctgggatttacgggaatatgtcagcgtatcacaatcttgcgatcaagtgtagattattcggaatcaatgattcaaaatatattgagaatattttgaagattgtggggctttcggaagtcggaaagaagaaaacaaagcatttttcgcttggaatgaaacagcgtttagggattgggctggcgcttgtgggagaaccggatcttcttgttctggatgagccgatcaacggtctggatccacaggggattgcggaaatccgtgatatgctgctgcggctgaaagaggagcagaatatgacgatcatcatttccagtcatatcctggaggaattatcaaagatcgcgacacactacggaatcattcacaacggaaatctgatccaggagcttacaagagaagaattgatgactcgctgcagtgagcggatggagcttacgcttgatgatccgaaggcggcgcttccgatcctggatcagatgggatttaccaactatcaggttgtgaaccagagtacaatccatatttatgagaggctgaatgaaagtgcagctgtcaatatggagttggcaaaagcaggagttccggtaaaagggatcggaatcacaaacgaagaactggaaaactatttcttgaatctgacaggaggtgcccacaatgcttaatatgattcggatggaactatatcggatgttcaaaacaaaaagtttgtatgtgatatggctggttctggcggcgggaattttatttactacagggctgtcagcggatgaaatgaaaacatatacaatggaagaaaagcaggaaatgtatgaatatgcgacagggcagcagaaaagcgacactgtcaatcttggaatggacgtaactgtgccgacaaaaccgggagatacggtttcagtatttgacctgttttatggaaatatcaaaggaaagtttctcgcactttttatggtgatttttgcagtgttatattccacggcagatatgacgagtgggtttatcaaaaatattgcggggcaggtaagagaccgcaggggactcgtatttgcaaaaggagtgtctctgtttgtctacacagttttaacgatgctgatttttacagggattcagacgatcagcaatgcacttttctttgatgagcttgtatttggacctgtaaaagaatttctgcaatatgcgggaatacagacgctgttacattttgcactgcttatcatcgtgatgtgcattgcgatcgtactgcgcaacaatgtcatcagtatgatgctgagtgtttgtctctgtatgaatgtgcttgtaatcttttacagctttctggataatctgatcgcaaaggcacatatcaagaattttcatgttctggaatatacagtgacgggaaatatctcgttcctggaaacaaatgtcacggcaaagatggcagtaacggcattggcagtaagtattgcatttgtcattgtgatgatcgaagtatgcagtaccgtatttaagaagagggatatatagggatgtacatcgtgattggagtgttatccatagcaattcttattttcatatgtatattggtaaattataagcggcagataaaagacatctgccgccaattgcgtttcctgcaggaacatgaaagtaatatgctgattacgaaagaaatgcaatggggacatattggcgagctgacagagcttttgaatgagatgctgaaagaaaggaaaaaagagcggacagcctatcggaagaaggagcagatgatcgcggatatttatacgaatctttctcatgatatcagaacaccgcttacttctcttgacgggtattttcagcttttggaggaagcgaaagaagaatctgacagaaaacgttatatcggcattattcaggaacgaatcggaagccttaaggagatgcttgaggaattatttacctatacaaagctccagaacgggacatatgaattaaagctggaacgtcagaatatgagtcagattttaaaagagacagtattttcttattatgataattggatggaacagggaattcgtccgcagtttgagataacagaagaatcggtgtggatacagggcaaccggcaggcgctgagacgtaccatgcagaatatcatcaaaaatggactggatcacggaaataaagaaatcaatattcagctcacaaagaatggaaatgaggcggagcttgtctttcgaaataaagtgacagatccgggagagattgatatcaaaagggtgtttgaacgattctataaagcggacagagcaagaagcaaaaattctaccggacttgggctttccatatccagaggcttcgtctggaaaatgaacggggagattactgcggaaatagagggaaactggttttgtattaaaatccgatttgcttgtgagcagtttgaaggaatccattgaatatacggaaaatctattaaatctggaagcattgtctatgcagctttgagacatactatatagaggcagacaaagctcggtatgaaacgaaaaaacagagaaagagccattatacagtgacaagagggaaacgctgaagtggatggaatagtcaaaaaatgcagccgcaggttacaaaatgcagagaacctgcggctgtgttttttatgcctgaatatcttttctgctgtacttccaataagcggttaaaatcccgattacagcaaacagcatccccgtcaaaaccataccggtatccagactgccgttttcaacaatatctgctccgtttgcataaccaaacggggtgatatatttcagaaattttgcctgatcggagatattggcaataatgttcaggaaatacatcattgtggcaatgccaagtccgatgccgagtccgctgcggcgcaggaatgcggagattccaaaacagatgccggcaagctcaacctggatcagaaaataggcaagatgcagcaggcagatttctttccagagtattttttcaccgatcagtgaaatggatccaacggaaagcaggaacacgatcacattcaatatcagaagctggaacaagacagaggtcagtttttccgtgagaatcttttttctgctgatcgggtgtgcgaataaaaattctgcggtgtgttctttctcctctttggcaaggctgctgactgcaataagagatgcaaagaatgcaccgcccagccctaaaatattgccacattctgttgcgtagaaaccgatcagagtgccaaaattcagacgatccataccaaatgctgaactaaaggctcccatagaggagaacatttcgttcatgtcttccatttctcccttcatttccggatacaggaacacacagatgataataaaaaatccgatagaagcagtccagatggcaagtgatttccatccctgttttaattcatgtttgattaggatcatacctgttcacctccgttttcatagtagtgcagaaaaatttcatccagatcagggtccgaaatggaaagatcggtgatcgttccggctgagagtgtttcaaggagccgatggatatctccaccgtaaagaaagctgaaaataccgtcattttccttcaggtcacgaatttcttccagagaatcaagcgatacctgtccttgtacgctgatccgcttggcatttgttttagaaagcgcctccacacggtcacaggcaatgatccgcccttctcggatgatcgcggctctcgtacaattccgttgaatttctgagaggacatggctggaaagaaatacggtagcgccctgttcattgcgctcccggataatatggaaaaactccctctgcatcagaggatccagaccacttgtcggttcatctaagatcagaagctttggctgatgttggagtgcagatacgattgctactttttttcgattaccgaaagataattcatcgaccttccggttgacatccagctgcaggcgtctgcatagtatttctctttccgcagaacagtttttgtgatgaagatcagcagataattttaacaggtctttgacttttattccacggtagaacaccgcctcagacggcaggtagccgatgtgggaacgaatttggggattgcgccgccggattgtctcatcaaaaatctttgcctgaccggatgagggcgtgatcaggccgagcagtgtacgtatcgtggtggatttaccggcgccgtttggaccgataaagccaaagaattccccttcttttacatccaggtttaaatttaagattcccctggattttccgtaatatttggttagatttgacagttggatcgcattcataaagttacctctctttccgcaagtaaatggatttccagaaatcaatcagttttataaaatcagcttcgatctcatcaacattgatatgatcatgctgcagcttttcccagatatatccttcagatgcccatagcatatcgagatacatcatttccagatcaagttcttcaataaaatgttccggattcagatttaacaggacggtatttgtcttaaaatcagcgtattttgcaatgctttcctgaatcgcagggcgtacatccggatctttttcataatatgctttcattacaaatctacccatatgcggatatcggcgcatgatctccagctttgcctgaagacctaaattcatggaatcgaacagatcagcctgctcataacagccgcttttttccagagcctccatggtaatctgcgcacatttttcccatagaaaaagatacagttctcttttgttgtaaaaatagtgaaacaacagggatttactgatacctgcagcatcggcaatttcacttgtagggctcttcttataagagttctgtgagaatacacaaaatcccgcattgagaatcgcctcctgtttctggataggcagtgcaaaaaattttttgttcatgatcttcttcctccttaaccgctgcggttaattttaattatacgccgttgaccgtttttgagaagacctaaagaaaaaaggattgaaaaaatatcttcgtccgacaatgtataaattgagaaatgcatgtaagaactgactcctttcaggtaaaagtgtagcgtggcggtttagtatgtattataaagaaagaggcgaaagacatgatggtggaaaaatatgacagcaaaaaaacactattactgttcagccttttgaaaggaggaataagatgcaattgaatattgcaacagactatgccattcgtatagtcatctatatggcaaagcagcggagaatagtgtcatccagagagttgtcagagaatctgaaaatttcacagccttttatttataagattatgaggaaattgaatcatgcggggattttggccataaatacgggaattcatggcgggtatattttgcaaaaagagacagaacagattaatttattcgagattatggataccatggaaaaaaccatgaaatggaatcgatgccttgaggatgaccgatattgcagctgttttgcaacagaggcatgtcgtttgagagaaacgtacctcaaaatgcaggagcattttgaaaatgaactaaaggaaactacaatacagaaaattattaagtgatatgtgtttcatatcaaaataatacaccaacaaagacccgcatgattatttaaaaatgagatcttgtgggtcttgttgagaatgctgaagaaggtgacagtatttctgaattatgttggaagtttaaaaagcagcgtggtaaaacaactctgattatgtaataatgaaggaaagaaagtaccgtataaatagaaaatgaaagaggagagggatatatggatttgagtgaacaggatttaaagaaaatcaaatcgttacatgtgatgttgaaaatgcccatatggatattggaaagagagacaaatcgggttttgaaaagctacaaatcaatttataagcatccgatttcatatgaatttaaagaaaaaaatatttcagatgagtttgtacggttttacagcgggatgttaaatgaaatttttctgtgcttatggtatcaggatgtcagaattgtaattggagcgtttcgaataaataatgttaccagtacagagttttctcatgtatatgacaatctgactccggaaaataagaaaattttgtcagaaaaagaatgctgggaatattactcttcacttccggtatatccactgggagatattcgggattatctgattcttcttggatttttgtttgatatgaatttggaagagatttattctgaagagctacataaacaagtgactgaaaatcaactggagttggtgcggaaatcagcagaagatacagcatatgagacattccgggtagagcagtatacattttattatgaaaataagatcatgaatcttgtcagtcagggagacctggaattattaaaaagtggtcttgcagaaatgggaacgagagacactgcaatcatacattttacaaaagagcttcatggtgtttccaatcaggcaagaacatcactgatccgatgtatcctgcaacatattaacttgaaaatttatgacacgattaaagttacagagcttgcaaagcagttctatttgtcagaaagtgctcttcgtcgcagatttaaggaggaagtagagatatccattaatgaatatgtcaatcagagaaaaattgaagaatcgaagatgatgctccagtcgggcgtatcggtaggagaaatcgcacggagattgagtttttatgatttgtcacacggacgtttaaaaagtatacaggtatgacaccgcagtatttcagagatacgaatgttgtagcataggaaaaaagtgatatcatcccctgaagtattgaaaaaatatcagaatgtgatagattagaagataaaaaatatgtgagggggatgagggatgactggatcagaccatagtgacaaagaatttcgtgagacccgaaatctgtatgtgagtatgatgtctctgtatgaattggcagacaagctttttggtgctacgtatgttgcatttatgcgtgctcaggatttatcgattgctcagatttcaaatttgttcagtattcaacagattttgcaggctgtatttgattatcctacgggaacaatctcggataagatcggtaggaagaaaattacgggatatggatttattgtgtggggaacggggattttgctgtatgcgtttgcagtaaatttctggacgtttcttcctgctatggtttttatggcgctaggactggcgctgatttccggagctccgtcagcatggctggtagatcagatgatcagacatggtatatatgaagaaagaaatcaaatattgccaaaacttcaggcaggagtcagattttttgcggtagctgcctcgatcgcatcctattttctggttggagtcaatcagcggctgccgatcataacggcgggatgtatctcaattggagcaggaattgttgcattgctgttcggacaggataactatggacgggtaaaggggaataatatattccggatgttgcagcttcaggcaaagtcgttcattaaagaagaaaaattacttttgttatctttgcggacgatcgtgtgccatgttccttttgtagcatttgtcttattctggcagatttatgcaacagaggtgatccatatcgagaccaaatatctggcatttttcttgctggtatttatggtacttctgatgttggggaattatgcagtaagcatttttacacgaaagatcagcaatttaggaacatccattgcaggaattattattagcattttagggtttgtacttctttttgtattaccctcttttccgggttttgtgatgggagcgggattgattgaatttggatttggtgtggaacaatctgccacttcaacctggatgtgcgattgtatagaaagtgagacaagatctgcttacagttcgatcttcagtacgattcagagtgttgc

SEQ ID NO: 6967 - DNA, 11244 bp, Unknown
  gut microbiota DNA sequence
gatcgcacctaccaggataatagagcctgtgatcagcacaacactgataatatggatcactgcatctgtcagcattacgccgttaaacaaatcttcttttttccactttttctcttttcccagatatgtactgtaaattccggttgttactgctgcgtttgtagaaatgaatgccaatgctgtcgccagtccgcctgccggaatctgaaaactgacaaatgccttgccggtctctccccagtccgggcctccgactccgatcaacgttgcataaaacgctacgatcatacccaaaatgcacgccgtaataattttttctacttttgaatatacattttttgtgaaatagcagtaaattacaaccgctatcatcaatgcagaacctactttccagttaagtccggtaatcaaattcacaccggcgccggttcctgagatgttccccattgtaaaaaaaagacatgccataaacaacgcaattcctacaaatcctgctgccacaggtccataatatttacggattgcatgaatggtcggcattcccgtcacgatcgccagccggtttgtcaccatcataaatgtgattcccataaaaacaatcggtatgatcagccagatcagcgtatatccgaaattgctgcccagcatcgctgctgtggtgatcgccccggggccgatcacaattcccgttgcgatcaaccccggtccaattctttttatcagatcctttaatggaagccgttcaacatttgccccaaatacttctgttgtcttgttttccataaagccacttctttctctgatccctctttatttgtattgttccatatctacttttggaagctgactgcgttccagtcctaaagaaacccagtctttttcttcctgattcagaggaagtaccggttttctcatcaatgcatttgagaagattcctctctgatataatgcttcttttaatctggcatgtgcttcaccggatggctgtccgcctccataaattgcctgtgaaatatgataaatacggtctgaccagtcctgtgcttcttttaatgtatgtttgtcaggatttgcaaatacttctcttgccgggcagatgatttccggtacacagcctgcgaatccgatcagcgctccgtccattcctgggaaccagcttacacacaatgtttcatcatgacatgtgatcagggaaatatccggacattcctggcgaagcagacgtacatcatgttcatagatagaagtcactcgtgttcccattttgatacatttcacatgatcaatctctttgcacattttgatcaaagtctctaccggatagaatgctttgcttgttgccggatacagatgaatgatgatatcgatatctgcgccttctgccacatcttttacatattcaaacggtgcatccggatccattccaaatctcagccacatatgaggaggcatcagaaggattccatctgctcctgcttcttttgcttcttttgccatttcgatgctttctgctgtgttctcacagtttacaccggaaatgatcgtcatcacatctccacattcctctgcacagatctcaacaacgcgttttctttctgctcttgtcagtcctgtgatctctcctgtatgtccgttacatacaagaccgtccattccttttccgtaaaaactcttgatccatcttaaatatgctctgaattctggttcgttgatggaataatcctcattgagcggtactgaaactgccgggaaaattgttttaaaattttttacttttgccattgttaaaatctcctttactttacatttcatgattattttcagggttcaaagatcctgcgcctgaatcttttgtatgtgtcagcaaacgtttgcatatctgttagtctttatatatcatatctttgaaatcaccgtcaacgaaatggactccctctgcaagaagttgcatataccatgcaattttttgcatattttctatatatcccctccctttttctttgatttttcaactatttgacggaatttattttttgagataaaatggttgcattaaaatcatatgcaatcgtttgtatcgaacagactcataaaggaggcaatcatggcaacattaaaagatgtcgcaaaacttgcatgtgtagatgtcagtaccgtatcacgtgctctgaataatacttcttatgtccaccctgacacaaaagcccgtatcctggcggcagtcaaagaactgagttatcagccgaacgttcttgccaaaggactgcgtcaaggcaaacgccacaccatcgggatcgtcgtccccagattatccatgaccgtatttgcagaactgatccaggggattgatgaagaagcccgttaccacggatattctattttagtttgtacgactgaagatgatccggatgtagagagagaatgtctgaatcgattgagaaatggatttgtagacggcatcattatcgccggaaccggaaaatgcggacgcctgatccgggatatccacgccagcgggatttctgtcgtacagatcatccgaaagcaggaatcccatttaagcagtgtgattgctaattataagcaatccgcgtatcgtgccgtaaaataccttgccgggaaaggctgtaaagaaatcgggctgatcaatggtcctatgtccctttccacttattatgaacgatatcagggatataaaaaagccatctctgaactcggtctgaaagaaatctgccctgagtccacacaacaggcaaacacttttgagtacggctttcagtgcgcggaattcttattgaccaactactttcacctggatgcaatcatcacatccgtagatattcagggaatcggagctttgcgggcggtcaaagaacaggcgatgctggttccggaagatatccgtctgatcagcctgaccggacattcgatcggaggaatgttggaaacaaccatgacatctcttgaaattcctgcgcatgaaatggggaaaaaggctgcgcttatggccattgaagaaattgatgccccctccgatcaaaaaccaagtcctcagcaccttgtttttgaagctacacttgtagaacgggaaagttcctgattgtaaaaaatggttcaaaaaatggagactgccttttaagacaatctccatttttattatgccacactgccatttcggtatctgtccgtctggccgcatgctgcttcaaactcttttaacttttgttttgcttccggattcagatatttcggcacctcgatctgcactgttacgtattgatccccatgtgcggaagtgtttttcatagatacgattccttttccacgaagacggatcttcgttccggactgcgtccccggtcgaattttacacattacatttccatataatgtagtaaccagaacttccccgccaaaaactgctgttgtaaatggaatatttacttttgtatacaaatcctgcccgttcctctcgtatcccggcttatctcctacctttactttcagaagaaaatctcctgcctctcccccattgcttcccggcattccttttccacggagtcttacactttttcctgtttcaatgcccgccggtatatgaacctgcagagattgtgtgcttcctctgccgtccggactctggagatgaatcactttatcacatccaaatgcagcttcttcaaaagtaatcgaaacttctgctcttaagtcttggccttttctcacaaactgactgctgtcaaacccctgcctgtaaaatccatttttgccaaatcctccgctttcaaatccactgttttggaaaccgccggactgtctgccgtgaaaaatatgatcaaacatatctccaaaaatatcgtccatatttccgctctcaaaatggtactcctgatagcctcctcctgcattttcaaaaggattaccgtgcggattctgtcctgccccgctgccatcaaatgcggaatgtccaaactgatcgtatagccttttcttttccggatcacttaaaatcgtatatgcttctgtcacttctttaaatgatttctctgcctgtttatctcctggattggtatccggatgatattttttcgccaatttccggtatgcttttttaattgttcctgcatctgcatctctgctgactccgagcacttcataataatctctttttgctgccatcctttcttcacctcctgttcaaaaaaaatccccgggatcacaatcccggggaaaataccttttatccttctattgttacatatcgtttttcatccacaggtttcttttcctcttttttcgggatatcaagcatcagaataccattttcaaattttgcatgaatatcggtctctgtgatatcctctccaacatagaaacttcggctcatgtttcctgcataacgctctcttctaatgtaggtaccattcttatcctgctcatctttatcgagacctcttgctgcactgatggtcaaatatccgtctttcagttccgctttcacctcgtcttttttaaatcccggcagatcgatcgctacttcgtagccatgttctgtctctttgacatcggttttcatcatacgatctgcacgtttgccatacaatttcttgtcaatatccggaaatgaaaaatccatccaatcgttaaataagttttctccaaaaatactaggcatcatcataagtcatatctccttcctactatacaatcatctatgtaaagcacaaccggacgatccggagtgttgattactttttgatgaatccttgttacctttgttctatttgtaatatagcattcattattggcactgtcaagaggtgagtgctaattttttatttttttatttattgacaattcctccccacctctgttatgataataaaactgcaataagggagtagttagctctgtacagagtcgctgtgtcaacatattgatggttttccatctggtacagcgttcaataacgagacttattcacgtgatatttttgcgtggataggtctctttttttatgaaggaggagaaaaaatgagcttattttctgtatttctgatcgggatcggcctttccatggatgcatgtgccgtatcctttgcaaaaggaatctgccttagacggcaggtaaaaacctatgccctgaaacttggacttgccttcgggctttttcaggcactgatgccgctgattggctggtgggtgggaacctattttgagtcctttatcacagctgtagatcactggattgcatttttcttgcttggttttatcggagtcaatatgatccgggaatcaaaagaagcggaagccgaatgtgatacttatgtggattctattccggcaaaggatatcctgctgcttgcagttgcaaccagcattgatgctctcgcagtcggtatcagttttgcattcctgaaagtagacatcattcccgctgtctgtcttattggcatcaccacatttatcatcagctgcatcgcggttttccttggaaataaaatcggtggaaaactcggaaaatatgctgagatcaccggtggtgttattctgatcctcattggtctgaaaattctgatcgagcacttatttggactataaaatcgcaaaaaccggaaggggttccacgccatgcgcaaagccctttccggttcttttttcatatatctaatgagagaaacaaaactgctacaataatccgacgatgtgatagactgcaaatgatgcaatccatgcaatgaaacattgaccaaataccatggctgctgcccattttccgcccaattcctgtttcacagacgcgattgctgcgacacatggcgtataaagcaggcagaatacgagaagtgctactgcccctgcaatggtaagactgccctgaagtgctgcactgcttccaaacaaaatagtcaaagacgatacaacgctttcttttgccagaaatcccgaaatcagcgcggtcacgatacgccagtctccaaatcctacaggaaggaaaatcggcgcaagtccgcctgccaccaatgccagaatactgttttgagaatctgctgtcatattcagtccggtatcaaaattctgcaaaaaccagattacgatcgtagcaataaaaataacggtaaacgctctctgcagaaaatcctttgctttatcccacaaaagatgtcccacatttttggcacccggcagacgatagttcggcagctccatcacaaacggaaccgcttcccctttgaatgccgttttcttaaagatcagtgccattaaaattcccatcacaattccaaatacataaagtccaatcatcacaagcgctcccctcttcgggaaaaatgccgcagtgaaaaatgcgtaaatcggcagcttcgccgtacagctcatgaacggagtcagaagaattgtcatctttcggtctctctcagacggcagcgtccggcttgccatcacaccaggaactgtacatccgaatccgaccagcatcggaacaatgcttcgtccggagagtcccagttttcggagaagtttatccatgataaaagctactcttgccatatatccactgtcttccagaagcgacagaaagaaaaacagtgtcacaatgatcggcagaaaacttaaaacaccgccgactccactgaaaattccatcaatcaccagcgaatgtaccacactgtttacatgcgctgctgtcattgcatggtccacgacattcgtcagtgctgtgattccagactccagaagcccctgcaaaaatgccccgattacattgaaagtaagccagaatacaactgccataattccaacaaatgcaggaattccggtatattttccagtcaggaatcgatcgatcttccgacttctgagatgttctctgctctctttcggcttgatcaccgactcactgcagacgtcttctatgtaagcaaacctcatctgtgcaattgaggctgcacgatccagtccagtttcctcctccgtctgtcgggaaatatcctccagaaggtttttctcattttctgtcagattcagctgctctaatattttttcatcatcttccatgatcttgcttgccgcaaaccgaaccggtatctctgctttttcagcatgatcctcgatcagatgcattactgcatgaattcctctgtgaatcccttcctcttttcggcagaaatctgtttccagtggtttttcctgatattttgctacatggatggcatgctggatcaactcctcaattccttctgcctttgccgcagaaatcggaatgaccggcactcccagagcctcctccatttcattaaccagaacggaacctccgttttcacgcagttcatccatcatattcaatgcaacaaccatcggaaaaccaagctctaacagctgcatggtaagatacagatttcgctcaatatttgttgcatccacaatattaatgatccccttcggcttctcacgaatgacaaactctctcgtcacgatttcctcactgctgtaaggagacatcgaataaattcccggcagatctgtgatcagtgtattattatgacctttgatcacaccatcctttctgtctactgtaactcccggaaagttacccacatgctgtttggaacctgtcagctgattaaacaatgtcgtctttccacaattctgattccccacaagagcaaacgtcagtgtctccccttcaggcagtggagtctcctctttccggttatgaaactttccgccttccccgtatcccggatgcagtttctcctgtttttctactttttttctgatattctttggtttgtgttctttactgatttcaatgttttttgcatctttcaggcgaatcgtcagctcgtagccatgaagccgcagctcaattggatctcccatcggtgcatattgtacaaccgtcacttctgtgccttgtatcaatcccatatccagaaaatgttggcgcagagcgccctctcccccaaccgaaagaatggtggcagtacttcctatttgtaattcatttaatttcatgtcttttcctctttctcattcgtttgagctttcttactactctaccatacactgatgtttttataaaagcaactgtttgggcacaaaaataccgacggattactccgccggccttctattattttaaaattgcttctacatctgctgcaatctgctctgcattcagatgatttttctccaatacttcctgcacgtcatatcggtcaaggaactctttcttcaatccaacgtttaacactttcatatcagaagcgccgtaataacgggcaattttttcaccaaaacctccgtctaaaattccatcctccagggtcactacgatttcatgatctttcttcaaatcatcaagaagtgcttcatccagacctgtgatgtagtatggattcaccagtgtcggctgcacacctgttttctctgcgatcagttctgctgctttctctcccagtgaatagaatgcaccgagtccgatcactgcaaccttgcttcctttctgtattacttcataagtattcagtttgccgaaatccttagtcactgtttttccatccgaaatcagctcaccgcccggtacttttattgcaaccggataagaattctgctccacactccaatcaagcatggcaagatattcttcttttgtcgtcggtgccagataaacaaggttcggaatatttgccatcatcggaatatcctgaaatcccagatgtgtgacatcattcattccataaacagaaccccagaatgtcacaattgttgccggactgttgttgatacacagatcctgtgcgatctggtcaaatgtccgctgtacaaaagtactgtacacgccgtaaacaggctttcctccgtttgccgcaataccggatgccagagcaaccgctgtctcttctgcaattcccacatcaataaactggcgtccggcttcttttcgcttatcttctgtaaatcccataactgcaggcgttccggatgtaatggcaaccacacgggaatcttctttcatctttttcaaaagataatctctcgtaataccggcgtagtcctccgtatttgaagtataaagaggttttcccgtctcaagatcaaacgggccgctgaaatgccactgttctttattttgctctgccggctcatacccttttcctttcagcgtattgatatgaaccacaaccggctgactactgttttttactttctgaaatgcctccaccagcgcttttgtatcgtttccctggtttacataaatataatcaagccccatcgctttgaacaggttacacggagctgttccgtttgtttccctcagcagcttcagattctgatacaatcctccatgattctctgcgatggacatatcattgtcattcactacaataattagatttccacccaattctgcggcgtagtcaattccctccagtgcttctccgccgcttaaagaaccgtctccgatcactgcgatcacatttccgtcttcccctttcagatctcttgcttttgcaagtccacaggcaagactgacagaagtagatgtatgaccgattgtaaagaaatcatgctcactctcatgtggatttgtataaccggatacatcatcgtaatgctcttcataaagatatgcatcttttcttcctgtcagcattttgtgcggataactctgatgggaaacgtcatatacaattttatcttttggagattcaaatacataatgcatggcaatggtcgcttccaccattccgaaatttggtccgaaatgtccgccatgccggcttgcccgggtcaaaagtgcatggcgcatctcttctgtcagtgccggaagctcctcgatcgtcagtttttttacatcttcagggctgttgattgtttcaatatacattaatattcactcctctttttctcatcaattcttactgtttttctcctttttgaggattgatgatactatatcacctggagttaactccaagtcaagagcgagtttaaatattttttattttcttttcaccagacacgaatggcacttttttcataaatgtaatcaaacatactggtaataaaaacgaagatgtttcacgtgaaacatcttcatctccattttattcctttattttttcaaacctgtactgttgcttaatatccggatatttttcatgatccacttcactcataaacattccatatggtcttgcacagattttaaacggagaatacaacccctgataaatcaccagtttttctcctgtctctgtatgctgcgcaaatgcaagcactttatataaatattctgaagtttcccctgacacccattctctcttaaaatgctgtacaatatctcccactcggatgtctctcggaatcacctcttcttgctttaactcaggctctgtatccaattctacatattcctctttatccagagaaacaggcgcacctgattttcccataatatggacgcctccataccaggtgcctgtaatctcaaacagatcccccacctgatattctgaagtatattcatcgttcttttttacaattcttattctgctcattctgattatcccttattctattttcttctttcaatcacatcactgattgcatcaatccctaaaagtatctgacttaccagaatcagcacaaataaaaatttcaccacttttttccctgtctcgtcttctctttctgcacagtcttttgcaattcttccgacaatccccagtaatccgatcagagaaattctctgcgctgttctgtttaacgatttgttctgataataaatttcctgcaataattcatgattgttcatactcatgttctcctctccttataatccgtctctgtaaatctgattgattgttgcctgagcatgttccagctcctttttctgcatgacggcatctcgatcactgaaaattgccagcatctcatccaccacatcttccgctctcggatttgatgttctgtaaagataccccagcatacgagttgccgtgtaatctgtcctgatttgattatacgcaatttctctgcaaaagtcatcaggataatccttttccttcaaagctctgtacaattcatcatttcttgctttttccatatttattgccgcccgttctttctaaaatactgtttttcaaattcttcttccgataatggcttattcaaaaagtatccttgaatgacatcacaacacatctcttttaatacgccaagctgcttttgggt

SEQ ID NO: 6968 - DNA, 62100 bp, Unknown
  gut microbiota DNA sequence
attatataccatttttatatctcccaaattcaaagttgtctattcatttttcgtaacagcatcaacgatttcttgatattcttcatctgttaatactttcgcccataatccatagtgaacttcatcaaattcttcataaaatataggatcattcgactgggtaataggaaataatgcatgtctatcttcgcccatcacacgatagggggcaagattgcataaaaagcctttgtaatatattttcacttcatattcctccacatacaatttggatttgttttataatattatactttatccacataaagaatggaagaatttttcttgctccgcagcctaatagaacgctatttttttatacttatagtccccttcattcatttctctgatgtattatttacccagtcaatacatatactaccctagaaccttataatcctttgtaaatctcctgtggaagattccttcggaaacagttgacatttttacattggtttgttatattaggttcagtgatcgtgttgcggaaacttgcgaagcccgtaaccgggggagagcctgcgggtctctccctcttttgctatatagaggtgaatactatgacgaaaaaaacatttgccagctttgagcagcaaatacaacatttagaggacaaagtaatcatcatatctgatcgagcttatgcagaagccatgctcaagcaaatcggatatttccctttgattggtgggtacaagcacttattccgagttccttttaccaaaacatataaaataggaacaacattcgaggaaattgttgccttatatgaatttgactctgatttacgagatttattttttaaatatttactccagatcgaacgtaacctccgttcgcttatgtcctattattttacagaaaagtatggggaatcacaggacgcctatctggatagttcaaactataatacgaaccgacgcaatcaaaaagtagtagctcgattgatttccaccctaaacacacgcttgaagtcggacacgctggactttgccttttcctttgcagaatacaccgcataagcggtctgagtcggcatatccttgatattttctttgacagcgtttgccttgtctttcactttatttttcgtatctaagacagcacccacctttgagcctgcacgctgtcccatgctggaagtggtattgccccgattttctttagaagccgtattttttctttcggctctcttgccagcaacggcacttccagccaccgcaccagccacaccgcccgaaataccgcccttgcaatacgatgttccatacgtctagccctatgtcgcataaacagatacggtctgcggaaaattcttcgtagctcattgcacagataatggtccgatgaaaggcttttggggaatcctaaaacgagaaatgtactacaaacaaaagtttcatactagagaagaattagttcaggcaattacggaatatatgaattattatacaaatgatcgtccgcagcgtggacttggaatcttaacaccgatggaattttacgaaaaacaattattagtagcataaaaatgttgcccggcatatactgggcaacacaaaaactttatatttttttatttgtctacttgacgggtagcacaccaaaccatataatgggagatatttatttagaaaattatagttcatttcttcatatcactgaaagtatccttaaatccgttctggcacataaaatgcttcaaccctaatttcattttcttcatgttccatatttatccaataatctcttaccatacatcctgcatgataatcttgcaaagagtatatttctaaagtctgaaaatcgactatacaaagtggtattactttcttttcttcgtattcccattttgaatatctcaagctctctgtaatcttatctaaacatttctgacacaaatgctccgccaaaaaattcatatccaacttataagtatctggaagcattatttccgcatttgccattccccggcttggtgatccaccagtcgaatagaatgtacctcctgtattggtatatgtaatctgtgaacctttagaatccttatagctatctaatctcaattccactatataccaatccaacaaagatataattccaatatcatccgacccctgaaatacccccattagactttcattgtttaaaccgcataaataacatgtactaatatctttcagttcggacttttctccctcaaaagatatctctactctcttttggctgtgcagccatttctctctaatcttttctttctgccctgccatagtaattaaggtaataaacaataaaaccattacccaaaatacccactttttaattcgatagcatccctgtccattcaatttcatattccaacacctttcaataatatctttttactattccactaagtggactcattctagtcccattgtatcattttcacccgttatgataaagataaaaaaggactaatatgagtccagatataagagggtaattatggaacaaaaaatcaaacaaacagatatctttattggaaagaacatacgaaaaatcagattatccaaaggtatccatcaaaccgaacttgtccgtatgcttcagttacagaatataaatatcacaagagaatctcttgttaaaatcgaacgtggaattcaacacatcacagcttcgcaacttcgtggtattcgggattgtctgaatactacttacgatgaattgttagaacctgatgaaacagaaaaagcaagtatgtagcactcttctcatacttgcttttttctgttaccaaacccgctctaccattacagtaaaaacatcatatagtaatcttaaaatatatcctatcacaacaaaaccacccatgatgcacccaataattatattcatagtccatacaccaacagtaccaccaatatctaaatttttaggtatcaaccataaatgaattttatatatgccaaacggaaaaccaattagtaaccacattttgaatatatcaatctgtccttcttctatgtaaaaatagtgcattagccatccccacaagaatataaacacagctcgtactattgattttcttaatctttccttcatcatatacaccccactcctcccaataccagcaaatcacttttaataataccaaactccatgtacttaaagcataaaacctttaatcataatatctctttcttccgggcggaaagaaaatcagtattataaaatcaaccagcaaatttatactctaaccaccttgagttatattattgcaaacctccttttcaccactatattttgactctgataccggtactcatcatcaaaattatcatagtgtttctcattttttcgtaggacaaaagtcagcgaaacccttgtatttactgggttctttctaacttagcattataataactcattccccggtatctaaaaccgcgacgcagattccctgccccaaagcactttctctttggatctcttcacaccagtatccaatgatctgctttgcctgtttcatttatgaacattccttttttatcagaatattcacttcttctgccggatgtgtttataccatgatgtgtgcctttcctcccgcagtcttcccatccatacgcaggtcttatcgtacactttctcgcaaaagaactgtactgctccatattgtagcttgccggcagaaaacctgcatgtactgtggaatcaactgttcacactcacggatgcgtccgctttgtacatattctctgatctgtctgcaaaactgctccagttctctattctgttctttctctatttttttatccatttttatgatcttcataacccatcttctccttcccttttctaaaaaatagcacaggccaagtaaaataagtattaagaccaattcaactcctgtaaaaaatttattaaaacaattttctcacacatttcccctatccacatattatagaactgtaaacaacattattggaggatttaaaatgagtgaattaagtgcaacaaactgcggatgtggatgcgaatcaaactttggcgggaactcctgtatctggatcattctcctgcttctgtgctgtggcggatgtggcaatggatggagcaacggtaacggatgcggcaatgacagctgtctgtggatcatccttcttctgatcttctgcggaggatgcggcaatggattcggaaacaacggatgtggatgcagcaataacggatgcggatgctaatctgcctttgaacgcaaaactccccggcaatctgccggggaatttttaatgcccggctttttccgaccggatcttttctctgtctttcttttccttctctttgtccaacctgtttttcaacatgcagttttcatcaatctcgtataccgcatttccgtcaatgatcagttttcgtttcataaaaatcctcttttcttttttcttcctttctttatagtatgataccaactaaaaaaagtcattcaggttttcattcattttcgtgtacttttccacatatatatttacaacgctacataccgggaggatttatggaaaagaatccaaaacactttctgacaccttttgatgaactgactacttccagacaattacagacgatcaaacttttgctgccctatcttccaacaaacggccaacggatgctggggatcttcatccgcctgaatgaattgcagaatgccattcatctctttcggggatttccggtttcccctccttctgactctctttctccatcccggattttaagtgacctctcaccctatctttccgaagaagaatcacagcagatggcgcaggtaaaccagcttctgcagatgatggagctttttcagaatatgccggcagacaatcctaccggtttttctcctgatctgctgatgggaatgttgaatccggaacaaaaagaaatgtttcagacatatgatgccatgttttccgatacaatgaatcaaatggattttacaacttctaaaggaggtacttcacatgaacgaatggatgaatcatccaaaaatgcagaacatggatccaatcaaactggaactgattaaaatggccgctgcacaaactgccggaaaatccggaaaagacctcgcgcccatcttgttcgcactgatcaccaatgcgggaaagcataatattcagttctcgccggaagaaatcactctgattctggatcttctgaaagaaggaaaatcagatgccgaaaaagcacagatcgaccgcaccgtcaatatggctgcgtccatgttaaagaagaaggcataaaaccttcttcttttcatttcattgcattctgtctcgtcttcctgtacaatattgaactagaatcaaatattcaggaggatttctatgcagactctcatgcttacagttgaatatgacggcacccggtatgcaggctggaaggccgctcccaaaaaagaaaatcttgatacggtcttggggagaatccatactgctcttgccaggctgctcaaagaggacatacagttattctgtgccgcaaaaacagaccctggtgttcatgcaagagggcagattctcagctttcagaccacttcttccctgttgccttctgctctaaagagcagtctgaatcaggtgctgcctcaggatatcgccgttttagatgccagacaggtttccgaacgttttcatgcagaattactccccaaacactgtatctgggagctttgtatcaaaaccggtccgactcctgatgttttccgtcagaagtatactttatttctccccgacttgccggatcccctgcgaatgcaggaagcattttcttttttgaaaggcaggcatgatgtccgttgcttttctcctgtcaaaaagaaaaaagcaatcatgagagaactctattctctccggattgagcattccgatgacgaaatgcagcttttcctggaaggcagtgattttctgccattcatgcccgcaacactcatgcagctgctgcttgatatcggaacgggcacactggatgcctgctgtattccttcgatctttgcaggagaacattcttattccgggcatgctcctgcccatgcactgtatcttcatgatattgtttatatttcagatagaaaggatgatttttaatgtcgatttactatagtatcctctacttttttgtatatggctttctgggatggtgtacagaagtcatatttgcagcttttaaacagcatcgttttgtaaaccgcggatttttaaacggaccgatctgcccgatctacggggttggcgttacactggtcatcgcatgcctggaagctttccagtccaacctgttacttttgtacatttcttctgtcatactggtaactgttttagagggcgtaaccggatgggcaatggacaagctgttccacaacaaatggtgggattattccaaactgcctttcaatatcggagggtatgtctgccttttattttccttgatctggggcgttgcatgcgttttcatcgtatattttgtccacccgctgatccatcaggtgttatccctgattccgcacacagccggaattgctttgatcgcaatccttggcattgctctgctttccgatatgatcgtaaccacttctgcaatcgtgaagttcaatcaatatctggaactgctgaagcatatcaccgacgaattacacgcaatttccaatcagatcggagcagagctttatcagaatgtaatgcacgtactggatatgcaggaaagttccagacaaaaactggatgatgtcaaactggaagtatccgaagaaatccggatgcagattgtagaattaaaaacaagagcccagaatctgggagaaaaggttccaaaaccggcacgccgtctcttaaaggcattcccgaaactggaatccagaaattacaaagcacagctggaattgttccggcaaaaactggaacagcaccttggcagacattaatctatcctgataaaaaccacgcagcccatgcgtctccaaacaccatggctgctgtcatacccatacataaaaacgggccgaaggcgaatgctgtcttttgcccgtttcttttttctgccagaagccggatacaataaatccctgccagtaggattgctgccgcacttcccataacgaccagcttcactccgattgccaccccgacagctgcaacaaacttgatatcaccgccgccaaagcttcccggaacaaaaaacaaaaggcatgccatcgggacacttaccgcaaacatccctagtatcctctcctgccaggaaaccgaaggatccaccagtgccagcagtactgccaccagaagaatccctgcattccatctgtccggaatcttatgcgtccgccagtcagaaatggaaatcacgacaaagataaaaatcagtatcgactttaacagcatcgtcatcatgattttcccgtgtagtacaactcgatcggatcaatcggatcaatcggatgttcttcctccattttaaccttccgccctcttcgttttataagctcgccgcctttattataaagccagaatgaatacaccagaactttattcacctttccgatcctgtcctttgttgtcttttcatactgtacgccacccacttcaaaaggaactttcttgtggatcatagagatcagctctgtctcacacgtcacaggctccggcagaatcgtataagcacgtcccacacacccggtcttgtgagaatcacttccaccggtcgtcacctttttatattttgccgccagccttgccgcccctgtatttgatactacagattcacagcagttataagcttcaataaaatcaaaccgtttcatgatttccggcgactgataaaatttctttgtattagcgatactcatatacttttctccgcacggatgtgccggtccaagcacacctccgtttcgatgcaccagatcgatcagcagcgataccggcattccccgcatctctaaaagccgcatcttcacgccttccggcatgatcaccagaatgtgccctgcatctcttgtatcatattcgatcccttttaataccacaaaatcagtgtgaacctttcctttcatgtggtttttccagtatcgatatccgttgtatgtgttatggtctgtgatcaccattccctgaaatcccttctttttaaggagtgtgatgtaatcctccagactcaccttactgtcaatcgatccctctttcacatggcaatgcatatcaattttcatagataagcctcctttttgtctctgcattttacttacgcacaggctttcgtctcttttttctattataccgcgttgccatccctcttacaagaaagtccatcaaaaaaacacactcttcccaatgctttccacattggaaaaagtgcgtctgtgttacttatcttcgtcatcctgatccgaaagatcgatctccacgatttctacatcatcatcctcatcatcccagaactcatccagatcttcatcgaaatcttcatccagatccttatccaaatactcatcttctgtaacaatctcttctgacacgatcagatcttctttcatcacttcttcgtcttcctcatcctcgtcatcgtcttcaaattcatcttcaaattccatttccagctcttctgcatgaggaacagccgctgtatgtacttctttctctgcctgcttttcttctttaaactcttcatccagaagagctctggctttatccacttcattctctgtggaattctgttcgcgaatctccgcagcttttttcagatgcagcttttgacgctttccggattccatcagaaactgtaccagaattccaaggactgccaacaccgcaaatgccagcgtgaccatccaacgctctaattcaactcctgcatgacccagcaaaacagttcccgcctgactgatgcatacagcaccggtcactcctgtaagaagcatcagaaccggaacaaaaagcttaatcgtcaacaacgcaaataccagaccaattccaacacacaccagcagccagatcagattcgccggccggagccagtatatacttagtgctgctccaagtacaaaggcagtcacaaacattcctgcccgcttcaaaattgcaaacacgattgccagaataatccctgccgcaagaccaataatcccgctcagtgtttcatctgacgtaatctgcatcgccacagccgctgctgctcctgttccaatcacaaaaactgtcagaaatgaccagaatcttgccagcttcaatccaaagaaacagctcagaattcccagtaataccgtaattccaagcgaaataagcacaatctctgccagcttgtctgccattccaagccgctctaatgcggtcggcaaaacttccttttcctgcagccatcttcctatttcatttatcatatccattgtacctctcccttattatctgaatctgtcaatagcaacctatattttaccaactttttcagaaagatacaacagaaagatggatgcaaatcttttattttgattcacatccatctttacattgttggctcaatcaccttttctacctctcttcacttattaataagtcctgtttttaagatttactgtcctggcggtctgtaccttcctttcttaagtgattctcattttctcgcttcctcgataaccctgcccctcaaatgaattttacttctctcgtaactttctcgtcattacgataatttcttcattttcaccggttatctttcctcgcttcaaatgagtgtttgtttcatctgttttatttgttgactttatattagcactcttttttaatattgtcaatggtatttttagtttttatatattttattttataattatctgtctttttatctttctttatttattttacagttttattgttttatgtaaaaaccaaaaggccgtataccagtgctttttctgatatacggtctttgtcttaaaaattcttcatcacattctggatcactgtctcccgcagctttccttcctctgtatttcctgcctgatgatctgcaaatcttgcttctacatacagataatctgcaagtctgttcacatactgcatggcttttgcatctgctccgtaattctgtgccactttgcggaatctccgctctgcccttcttgtcacagcccgcgcaatatccagtcttgcggaaagctcacatcctccgtacaaaacaaagtccctggctctcggaaacgcagcttccaactcatcgatctgatcttccagatgcacagtctcttctgcgctcatgcggtaatccagatttctcggatctgccactgctgccatgatcttcatcaatgttctctgaatctctgccagattcgtcttcagatgatcctctgaaagcacttttgcatgtccgatataactattcagttcatcgatcgtcccgatcagctcgatccgatcgtctgctttcgaaacactcatcccatttgcaagagaggtatttccgccatcaccttttttggtatatactttcatttgcacatttcctttcccggaacattttcgctatttaaagggctgttttttaatcgcacgggcactgtttgctcccacttttctgcactgctcttttgtcggagacagatatgcctcgatattacgccctttctcaagcccccgcattttcagacaaacggccgttccaaaaatcccgattccggatcccagcatggaatcccgtgccgctttataggaaagcttttccatacattcatccggaaactctgtaatctcataaaacacaccctcttcttccactcctgcacagacttcccgcaaaattgcttcatctgccagatgtgtatatataaagattgaaggtttcttcactatcatcgctgttctcctatatatgaaagtaccagccctgttgcaactgcatttcgcggaccttcctctccccggatatttccacgtccgcacacgatccgaaattctgaaagttcttccatcagcatttccggaatctcaaaatcctccgcagacccgccgactaaaacaacattcgaaatatgtttcagatcctgccctggtgccactttcttcaatgcacgaaatgcattggtcacaaacactttacgttttgcctctcttcgcacctgcacaatcttctccatcgggatatcctgttccagccgaatcattccatcctccgtaagaaggaccactcttccgtaaaacctcggatcaatggactgctccacaaatgtcatctgtccgttttccatccgcatatggaacagactttccactttggcaagcgggtactttttaatctgctctgccatgtgccggtctcccagaccaagctctgtctcgatcagcatggacacaagctctcccgcacctgcctgatgcgtcatagatacctttccatcctcggaaatcaccgctgcatccgtagaaccgccgcccatatccagaattgcaagcggaaggcttgttccgggagtcgtcagggctccgagactggccataaccgcttccacgcctgccaccatcacgtttacacccagttctatccgtaattgttctgcaatcttctgcatcggaagatgcctcgtctttaccatcgccgcgattccgaccgctttctcaagacaggtctctcctgccagggcaccggaaatccgaaccggtgccatcgtatccactgccagaatatcagtaatatgaatctctctcttcgcagtctcatccagattttccattccctgtttgatccttgagaacatattgcccacattggtgtcatgctctccttccatatcgtagatcgtaccggcatccgaaactacctgcatgatcttctcggcaccttcatccagatcaacaactgcgtcctgatctgcatggagacagatttttcctgcgggaagaagattctcccggatattgccgcccggtgtttttaaaacgaccgcacttcgctttccgatcagacttttcgcaatcggcgtgatcatccgcgtctgctctgcatccagtccgagcagcgttgcaatcccgtacgggttggaaagcatacggattgtctgtcccggaagcgccacttcgatcgctgccagaacatcatccggaagcttttgaattcccgccacctcatcaatgatcggcactttttcttccagacgattctccacaagaaccgcctcatctgcctgcaggatcacacctgtgatcgtcagccgcttcctctctctgttgataacttctgcgatctcctcataggatgcggctgcttttgcaaatacaatatacggcgttcccggcacgccttcccggattcgctcaaaatccagcgtctttccgactgcctgccctgcacctgcaggggtagacgggttatgtccgatcatggaagaatctgtaatgatcgtctctgtaagcgtctccattgctgtatctccgataaccggcgcggcttcattcaggcggatcagggaaagcgcttccgtctccatcccaatctttcccatagcttctttcaatgctgcccgtatcccatgaacattggcaatggtccccttcgttcctgtcgtcttacaggaagcactgcttaagaaatggacctgtgctcccccgacttctccgatacagacttctgttgtagaatttccaatatcaactccggcaatatatgtcaaagcagaatccctcttttctcataaacctctgccgcttccattacaaggcgcgcacagttttttgcattgtatttttccaacagctcctgtgccattaaaaccagttccagctttgtggaacgattcggacgaagcttatcgtacatctttaaaatcacatcatccggaacatctaccagttctgcagcacgttcaaaattcttttccatcggatcattgccgttttcttttgccacctgtccctgtgcataaagcatttcttttgaaatcttaatgtcatccggggcaatctggtttctcatcactgcatccagcgtgatctcatccagtttttttcctgtcttggatgcgatctgttctctttcgtgttcacctaacgggtactgcatttatctttcctcccattcaacaattccaacttccggatccagctgctctgtctccgcaatgtgcatcaacgctgccttcacctgatattttggtctggacatcggatcatttgtacatggaatcggcactacctgctcaccctttacatatttggcagcattctgtccgatctgacggtaagtctccagattcatcagaggcgcctgcggaaacaattccagattggaaagcggataaaggtctctctgatggatcacggttgtccctttcgactggatgccgatcccgattccggaaccagaaagctttgccgcttccaatgccataaaacagacatcggatgtatccaatattttgaccactctcgggatcattccttcctcttcaattcccgctttcacatttttcagaacatcttccagtaaaataccgcagatggttcttttaatctctttctggaatgcagctcctactccgatcacaacttcctttggatctgtcccctgcttcgcccgcggataatctctgtaggatgtcttttcttcattgatcctgtcccgccctgccatagaaggcacctcggaagatgtatgtgatccagtctcctgccccatctccgaaagaacggcattggttatctgtttaattaactcttcactaatctgcatgatcctgcctcctatatatcctgtgggttgatgatgtgcgggatcttcttgatctcttcccagcgctctccctgtacccggtatccggttccaggtcccatatagtcattcggtgtattgatgccggacaatacatggaagtctttgtccaaaatcgctgctgtctgcatgtaatctccgaccacacgctgctttaacatactcaacacactctctgccacatccacaaatccagtctctgccagcgcttttacgacatcgattcccgtgatgccgcgttttaatacatcctcagccgccatcagatccgcggtcacatcccgatccagtgtatctttgcttccatgtgcgtaggtaactgcctccacctgcgcatctgtcaccggtgaaagtcccagctgtgtaaacactgcctgcaccgctcttgcagccttgtttctgacatgaatgacttcttcttccgttaccgggcgaagtcctccgtctacctgcatatctctctgtaatacattgtaatcatcaaagtcttcggcatcaaagttcgatcccgcaaacatattgtcatagttcggctctgccgcatagccggagaagataaagtctgttcccggcaagaactgcagcatcgttcttgcagtacggcgcatatcggagttggaaaagctctggtcattggaagatgcacactccagcccaagcagcgctgccacaaggttttccgcgatgacttcccggataccggacggtacggaacctgtcactccgatacaacttacagatccattctggattccctgacttccagctccctttgtcgcatacagacagcggcactccagatacagcatagatttcttttcactgcttcccatcagcacctcggaaccggatcctgatgtaaagcggaccttcagtcctctggaagcatacgccgaattcaaaaatgctttggaatatggtgtatcatccccatcgataaacaccttttccgttccatatacagagagtgtctctgcataagtcgtcagtccgcggattcccagctccagctctgttgcttcctctgcggagcactgtgtcagcacacccggacgccccacctgagaaccaatcagaagcgccatggcactcagcggtgcatatctggcaactcccatagtcgtctcttcctccgcaaatccacgaagagctccctctgccgcgtccgctgcaatctgtaccggatcatctttcagatttgtgatgtgcgcctgatttcccggtgttcttctcgcacggatcttctgcattcccatcatcagctctacgacattcagatgattcataacctctgtcatctttgcaggcgtgatccctgtcacaagctccagaatctcttttctggacacatgaatatccacgatcatgcgcgcgatctccagtgaagatactgccatggacgcttctgcacgctctacgttcatcgcataatcagcgataaactgatcgataaaatcaaagtcctctctctttttcccatccagttccacaattctgccgtttgctactttcacagacggctttggatcatacggacttgtcattgccacaaatcccatttccggccattcattgatatatccgtcaagatttaccgggcgctgatccagtgtctcaattcgttttgatcttctcatgttcgttctcctaaatatgatatctcctacacactatagttgtattataccttaaatccaaaagaatcgcaatccggatcgtggtgaaattgtgcacaaatccacattgttttcaaaagaaatcaacaaaaaccctcgcatttttcttcttttttctctgtgatttctattttttgatgctttgtctgcattctcccattgacttccattttttcggactgtaaaatagacctatctttttaaataagaacaaaaacttatacagcttacctacgaaaggagtttggcatatggaacacttaaccatcccacaggggtatgtttctcccctgacaatccgcgagactgaggtggcgatcaaagagatcaaggattattttgaacgctcccttgcaaaatcactgcatcttacccgtgtatctgcacctttatttgtaaaaccggaatccggtctgaatgataatttaaatggtgtggagcgcccggtttcgttcgggatcaaggagcaggaggacactcccgcggagatcgtgcattctctggcaaaatggaaacgctatgcactcaagcactacggttttcattccggtgaaggtctttacaccgatatgagtgccatccgcagagatgaggatacggacaatattcactctatctacgtagatcagtgggactgggaaaaagtgatttccaaagaagaacgaaacatggagacactgcagtatacagtccgcaaggtctacagtgcactcaaagaaacagaagattatatttccagacggtataactatatcgagccgctgcttccggacgatatcttttttatcacatcccaggagcttgaagacctgtatccaggatgtgacgccaaggaaagagagcaccggcttgccaaagaaaagggagcgatctttgtggcacagattggaaaagttctcgcttcaggtgaaaagcatgacggacgcgccccggactatgatgactgggaattaaacggtgatatcatcgtctactaccctgtactggacattgccctggagctttcctctatgggaatccgcgtggatgaagaagcgcttgcaaagcagttaaagctttccggatgcgaggaccgcgcaaagcttccgttccagaagtctctgctgaacagggaactgccttacacgatcggcggcggaatcggacagtcccgtatctgtatgtattatttgcgcaaggcacatatcggagaggtacagtcctccctctggccggatgacatttacaactgcgcactggaacacggaatccagttattataaaagaaaaacaggagtctgctgattttgaatcgatcaacagactcctgcccttctttatttcttttttactgccacagcctgcatatgctgtgctttgtatctgtcttctacaatctctttcggatagcggatcactccattgttctcatacggatcattgaaataatatccttcttcatcatatccgaccaaaagcatacagtgctcattggaaatccaggtaaatacttccccgctgtcttttaatttccactgtgggcccgtgatcggttctctcatattgatacacgcccagagaatcaccggcattcctttgtcaatgtactctgtttgtaaagtttttatctctgttcccgtaagatccagcacctcatacatttcaccgatcgcttttttcagcgcctgagtgatcaccggtgcatagcagccaaatgactcctcatcatagggacttccacaaaaatattttgtgggatccggaccgtaaagctccccctcacgaagttcaaactcctgcctgtccagatattgctcaataaattcatccacagacatttcgtatcccagatacctaagcagcatcacagccgacacactctcgcatccggtcggataacgcacactttgatccagatacggcacatcaattacattacgcatgctgttcctccgcatcctttttctgctctcgtctcttcaaaaccgtcagtactgcaaacaagatcaaaagactgctgcccagtgcagcccaccagatcttcacgattcctgcgatcagatatcctacgatacaaactgccgccacgaccatggcatactgcatctgagtggatacatgattgatgtgattgctctgtgcacccgcagaagacattactgttgtatctgagattggagaaatgtgatctccgcatactgctcctgccagaactgccgccacagagatgatcatcatttccagatttttctgtcccgggaacatcgctactacgatcggcaccaggatcgcaaaggttccccatgaggttcctgttgaaaatgcaagaaaaatcgcgatcataaacatcaccgcaggcaggatcacgcttgccgaagcatttgttcccaccagattctctacaaatactccaattccaagggcatctcccattccttttaaggaccatgcaaaaatcaggatcgccaccgccgggatcatcagtttaaagccttctacgaagctgtccataaatcccttaaatgtaatgacctttctcggcagatataaaatcaacataaataaaatcgtaacagaagttgcaaaaatcagacttgtctctgcatcacatccggaaaaggcagtgaatacatcggttgctccgcccagatatccggtgtagatcatagccccgatcgcagacaggatcagaaccgctaccggcaggatcagatccatcactttccctttttctgatgcattttctgtctcaactgtctcaaattcttccgcaccgcttgtgaagagatccccgtttgcagcattcttttcatgacgcttcatctgtccgaaatcaaatcctgtgatcaccacaaacaataccattgccagtgtcagaagcgcatacagattgtagggaatcgttcttaaaaacagctgaaaccctgtaatccccgcatcgtccggcacataagagttgaccgcagccgcccagcttgaaatcggcgcgatgatgcagaccggagctgccgtggaatcaatgatatacgccagcttcgctctggaaactttatagcggtctgtcaccggacgcatcacggaaccgaccgtcagacagttgaaataatcatctacaaaaatcagcaccccaagtcccgttgttgcaagaagcgcgctttttttgctcctgatcttgcttcctgcccagtttccataggcggcagaacctcctgattttgccatcaacacgatgatcatccccagaagcacgtcaaagataagaatattcagattcatgctttctttcataatttcaaaaaatgacacaaaagaatcccagggagaaaatcctgtatacagcagtgcccccacagcaactcctacaaacagggagctgtacacttcctttgtgagaaacgcaagcacgattgcaagcaacggtggcacaagtgaccaccaagttccgataaacatagaaccatccattttttctttcatcctcttttctattacttttccacatgataataccctgtcctggctccggcacttgccttgtcataacagggtatcctttcttattttactggatgatgcataaatatgcaattataattttttattcgttcctgttccatgcaaatgcatggttcatcggcccacttcctgctcccagatccagcttgaactccaatgcatctgaaagatactgctttgctctttttacagactcttccaatccaaattctttcgccagattggctgcgatcgcactcgaaagcgtgcatcctgttccgtgagtattcggattctctatcctcgttccgtaaaaccaccgcatcgctccgtcttctttccacaaaaggtcattggcatcctgtctttgatgacctccctttaacagcacactgcatccaaactgtctgccaatcatttctgctgccctctccatatctctttgtgtctgaatttcaattccggacaaaagctcagcctccgggatattgggcgtgatcacctccgcaattttaaaaagcttctcctgcatcgcgcagattgcatcctcccggatcagccttgctccgcttgtcgccaccataaccggatccacgacaatatgtgctgcctcgtattgcctcaatgatcctgcgatcacctcgatcaattctgtggacgataccatcccgatcttcaccgcgtccggtctgatatctgtaaaaatgcaatccagctgttcttttaaaaattgcggagacacttccagaatatcacgtactccggttgtattctgtgccgtcagcgccgtgatcgcgctcgtcgcatagactccgtttgtcgtcattgtcttgatgtccgcctggattccggcaccgccgctgcagtcgcttcccgcgatcgtcagtcctgtcttcatcgatgtcatgtgttacttacatccttcctgttatcatttctgtcagttgttcatcgaaagacttcagataaatatccgctgtctctctgattttttcctgttccttgtttgctttgtcatagacagctgctgtagaaaaccctgccttttttgcagtctcaatggcatggagtgcatcttccacaaccagcgcttcatccggcctgcaattcatctttctcgccgcttccagataaatgtccggcctgtcttttcctgcaccaacctcgctgcagaataacagctccgtaaaatactgccggatctccagccgctcacacgcctgtcggatacagtcttgatctcctgaggtcgccaggatcatggggtatcctttttgtttgaattctgccagaagctcttttgcccccggttttaatgtcacttctcttctgtaaaaggtttcaatctggcagtggattccctccagaacatctgccacaccaaccggcaggtggtagcgatcgatcagatactttgctccctgctccagactcatctcaaacagaatctctcccagatttggttccggctcgattcccagtgtctccagataatgatccggagcatgctcccagatttccatggaatccaacagtgttccgtccgcatcccagatgatccccttgatcgtcattggatcgcctctactttctttttcaattcttctgctgccagcttcgggaaatcctgcgcaaagatcgcactgattactgcaatcccgtcgattcccgttcctgcaagctgactgacattttctgcgctgattccgccgattgctacgaccggaatctgcactgccacacaaatgtcacgaagtgtggcgtgttccacttccaccgcatctgctttggagctggtcggaaatactgctcccactcccaggtaatctgctccatctttttctgcctttatagcctgctccacagtctgtgcagacacaccaatgatcttgtcctctcctaaaatctcccgcaccttccacgcgggcatatcatcctgccccacatgtacaccgtcagctcctactgtacgggcaatttctacattgtcgttgatcacaaacggaactctgtatgcggcacacaactttttcatctcctctgcctcctgcagaaagttttctgtattcagatctttttccctcagctgcaggaatgtcaccccgccttttaaggcctcctctacctggtgatacagcgtgtcgtttttcgtccagcttctgtccgtcactgcatataaaagcagagattccttatcgcacctcatagtttgctctcctttccagttcttctccggtcagattgcagaccgcatcaatgatccggtttctgtaggtggaattgccgtctcccggctgcatattttcccagccgatctcacctgctgttcccatgatacaaacagccgctgccgccgcatccagcatttcttccggattcgcacacaaaaatgcagtcagcatcccggagagctgacatccggttcctgtaatctgtcccatttcttttctgccgtttcggatcacataacaacgtttgtcatctgccaccagatcgatcgcacctgttactgccacgatgcatccacaggattttgcaaacgcttttacaaatgccactgcctcctctaaagtctcttccgtaacaatatccgtctcacagacatccactcctcttgcaccgcccatgccgccggagagaactttgatctctgacatatttccacggattacagaaaagcggacttcctgcatcagtttcactgctgtctgtgtgcgaagagtgctcgcaccggctccaaccggatccagaagcacaggatgtcccagttcgtttgccttctttcctgccaggaacatactttcaatactgctcttgtgaagcgttccgatattgatgttcaacccctgacagatggttgtgatttcctgcacttcctccggctcatccgccatgatcgggctggcaccacatgccaggatgatattcgccacatcatttacggtcacgtaattcgtgatattatgtaccaatgggcaatgatttctcacagtttccagatattttttcataaatgtctcctttcagacctgaagttgttttttggaatctgctgccttatcgcacaacaaagcgggtacaccaatgtatggcatacccgctgtctcagcttttctatccctacgttggcattatccaaatcaggtcacaggtcgaagcgattcagcttcctctcagcctgcttgatacgcaagctcccttgttttttatttacatttattatactccgttttgcccccattgcaatccttattttctttacaatttaatctggatctggtattttttcatccagtaattgatctgcagcacatatgcaatcatctgaggtcctgccatcagctgtccgtaccacggttttccgtaatccttcggcgaatttaaaaaccgctctgccttctttcgatccagaaatgcccgaatgggcgcacttgtatcctgtaacacttcttctctcagccggtctgccagaagtgcttcgtactgcggattgtatgttttcggatatggacttttctttctccagagtacttcatccggtacttttccttttcccgcacggcgaagcaatgctttggtaataccatcctcacatttcacagaccatggcacattccatacatactcgatgatgcggtaatccgctattggcactcgcgccgacaatccataccaggtactggtcctctccatccggtctaacagtgttgccataaaccatttcaaattcagatacgcaatctctctgcgacgcttctccacaggagaatcctcggtacagcacggtgtttcccgtacagctttctcataggcttcctctgcatactctttcatcggaagcttccgaatccacttttcctgaagcagactctgccggacagactgatctgctgaccacggaaatccgtctgtctcaaaggcttcttttttatgaaaccacgggtatcctccgaaaatctcatccgcacattctcctgtcagagctgccttgctgtactgtgacacctgagagcagaaatacagcatagaggactccacatccgccatacacggcagacaccttgcatccacagctttgtaaagatattccgccagcttttcattgctgcactccaaatagcgatgctcactgccgcaatatgttaccatctgctccacccacggccggtcctgactcggctgaaatgcatttgcctgaaaatactgccggtttccctcaaaatcaaaggaaaatgtctgaagcctttcccccttttcccgcagagcatccgcacagactgccgtcacaaggctgctgtccactccgccggagagaaatgtagagatcgtctcttcactctccatctgccgtttaatcgaatcctccaagagccacgctgttttttctactgtttcttccctggaatcttcatgtggctgactttttacattccagtaacaatgatcttttagaattccgtctgcaaaagaaagataatgtcccggaagcacttcataaatatctcgaaaaacaccgtttccgggagttcttgccggaccaagcgcaaaaatttcacagagaccattctcatccagcacagggtccacacccggatactgaaataagcttccaatggcagaggcaaaaaacagcgtctcctttttctgcgtataaaacattggttttgccccgatcctgtctctgaacaagaacaatatttttttcgtttcatcccagatcaccgcaccgaaaacaccatttatttttttcacaaattccggtccgtactgcatataggcaagcagaaacaattcctcatttctgtctgtgtcggctttcagctcccgcccaagctcttttgcattgtatagttccccattcaaaatgagcgtacacacacgccccggccgttttaatgtaaccggatgtgcatgttctgtttcttccacacagcgtcccggtgcaaatcccatattccggctgcaaaatcctgtaaatgttcccattgtcttccccttttctactgaatgatcggttgatactgtctgccttccagtgccgcctcggccgccgggatcagatactccaggctggcgatcatcgaatttggctttttctgcggattatcctgtttaaacggtacaaaataaacatgcttagtgtttaacaacaacccgatatttttcatattcatacccagtgcatcatttgtagaaatcgaaaccagcagcggacgctcattgcgcagatgcgcttttgcagccatcagcgcaggagtgtccgtaatcccattggccagcttcgcaatgctgtttcccgtacacggcattaaaatcagcagatccaaaaggcctttcggtccgataggctccgcctgggggattgtcagcatcggctctgcccctgtgatttcctttgcctttgtcacaaaatcctctgcatttccaaaacgactgtctatagactgtgccgcatctgaaaaaatggtctgcagctctgcctcttccttttttaatgcccgcagtgcctgaaacactttttcataagtgcaaaaagatcctgtgatcgcaactccgatcttcctgccttttagcttcatgatttacactccctttttatgattctttctatttccttcaaaatctcctctcccagcagtctgcctgatgtacacggcgcaaaacgtcccggcaggcccggcaggacatttatatggattcccagtctgtctgccgcatcccggtcaattcctcccggcatggaagccagctccagaatacagacttcttgtggcactccttccagcaatccctctgtccacacagcagacggcgctgtattaaaaagaaatgctgcttttttcagtacttttgaaagatccttatattcacagatcttcgctcctgcttcttttgcacgttcgcatgcgttctcatcacggtcatacaccacgatcgtacatccccagtttttcaggcactgatgaattgcacttccgcatcggccataccctgtcagaatacacaaactcccccgaagcgtaaccggactgttttgtaccgcttcggcaaccgcaccttctgctgtggcagctgcattttctcttacaatccgttccagctgcatcaggtcatagctctcaccgccgcggcataaaatcctgtttttcagttcttttgaaaaacagccgccaaagatacactgtccatgtttcacatattccatgagctgctctgcatctggtttatattccgctcctgtattgagctttcctttccgcaatacaggcaccggaagcaccacaaaccggcagttctcaaaaatctcccgaagccgctctgttgtttcctcctgtctggtaccatccggaaaaaatgctgtttctgtctgccatccatgctcttccagaaattgttttacataaatctgcctctgatccccgccaataattccgattttttccaatcacacaaaatcctttttcttttaacatatgcacacactttcattgcgtgtctgtatctgagacgcaaaaagagtccgctgtttttggcgaactcttttttcacatggcgctatcctaagaaacatctgccggaaaccggattcccatcttttcccttgccagatccagaaactgcatttcgtttccggacgcttcctcatatattttacttttctcatcctcctgactgttctcgatcagacgcagccattcccgtatttcatataccatattattctcttcttttgggatcaggatcacatctctgcgcccagtacgctcatgtatcgtaatttttcttgtatctgcgatccgatcgatctgcatactcccgttttctccctgaacctcactttccgtatatccacttgtaattttggaatactgcagaactgcctgccagcccggatactgcgccaggatggttcccataccatccacaccattttccagaaagacggaagctccttctattttctccggcattccaaacaatcgtaccagcggatgtacacaatacactccgatgtccatcaaggccccgttggaaagctccggccgaaacgcattctcgatgattcctttgcggaagttatcataacgcgacgaatactgacaaaatcgaaagctcacactccggatttttccaaggcgatacagatttgcttcaattgcctgaaatccgggatcatacaccgaacgcatggcttctaacagcaccgcctgtccgttttccgccgccgctctcatcctctgcagctctgccgcattacttgcagcaggcttttcacagagtacatgctttccgtgcttaagcatctctactgcctgttcacaatggcaggaattggggctggcaatgtataccgcgtctatgtccgaggattctgccagctcctttagatctgtataaataaactctgctccgtgcttttttgcaaatgccttggctgtctccttctttcttgaaaatactgccgtgtggaccagtccctcacacaaagctgccgcttccagaaaacggtccacaatcgcactcgttccaatagttgcaaatcgtatcatattctctgctccttccttttatgatgatcacttgttacggctaaattactggttcacagtaaccaataatccgaatattatcattttactattttacatattggcaaagcaagtttaaaatagaaatgaaaggagaatatgcaaatgaaatctcaaaaacatctgttaagcaaattatttatttctaccctttatctgagtgccttcacttttggcggcggttatgtgatcgttacactcatgaaaaagaaatttgtggaccagtatcactggatcgatgatgaggaaatgctggatttgatcgccatcgcgcagtcttctccgggagctatcgcagtcaacggcgcaattgttgtcggctacaagttggcaggaattccaggagttctgctctgtgtcctcgccaccgttttgccgccttttgtcattatttccatcctttctgtattttacgctgctttccagagcaatgtctggatacggcttcttctggaagggatgcaatccggtgttgcggctgtcatcgcatcagttgtttatgatatgggccgcggaatcatccgtgaaaaaacaccgatttctcttctgatcatgggcggagcatttcttgcaaactatatgtttcagatcaatgccgtctacatcattttattttgtattgcacttggctgcctgcagacctggtatcagaaaaggaggacactctcatgatttacctgcagctttttttcagttttcttcaaatcggaacctttagcttcggcggcggttatgctgcactccccctgatccagaatcaggtcgtctctcttcatcattggatctcaatggctgagttcacagatctgatcaccatttcccagatgactcccggaccgatcgccatcaattccgccacctttgtcggaatcaagatcgcaggaatgcccggtgcacttgttgcgactctcggatgtatcctgccctcctgcatcattgtgaccattattgcatatctgtatatgagataccgaaatctggacaccctgcagggaattcttgggatgcttcgtcccgccgtcgttgcactgattgcctctgcaggaatttcgatcctgatcactgctttctttggagattcggggataaagctttcctcatgcaacccaaaggccgtggtaatctttgcaggctgtctgattcttctgagaaaacgagtcaatcctgttctggtcatggtacttgccgggattgtaaatgtgggactctccctttttatatgaatctcagtaaaaagggaaaactcttccgaataaaaagaattttccctccgtcttaaactacaatttcatatttttctacattcactttcgcttttccatcacatgagaacacaatctcatctgcctctatcggtgtgcagattgcagttgtcacaacctgttctccgtcattgacaaacagttcaatggactgtctgtccagaataaaacgaagtttcaatgtttcttttccttccgtaactttccatattcttctgcagattacatcttttgtcactccgcaacaagtacgatccacttccataatctgcttttttcgattatatgtataagtagtcgtatattccatgttatgtgccagttccagacaaaattcatcaaattggccattttcgatttctacagtcagatccagcatccttcctctcacttcatcaaactgaacagttcctgaaatctcctggtctttcaaacaacatggatttttacgatactgcttcagttcttccaccggattttgatataatcttccattcatataccgcagttctctcggcagtgtcatcattccctgccacttttgaccatccggaatcacacaggcatcccatgacttcatccaggcgattagaatccgacgtccatccggaagttttgtcgtctgcggcgcataaaaatccagaccataatccaatgattttggagcttccttctgaaatgtatgctctgtttcattatattttcctgaaaaatatacggaattatttccattatgaaattcatatttctgcgctttcatgttctgtggcgaacagatcaaaaaatgtgtcccatccagttcaaaaaaatccgggcattcccacatagttccaatctgacctgtgctattttctgccaacacagtctcaaatttccatttctccaaatttttactggaaaaaagtacaacctgacctttctgctctgagttcttatttccaacaatcagataatagtttttcccttttttccacactttcggatctctgaaatcaatcttgctacaatccgcaggcagcatatctccggttataacaggattctggggtgatttcacatagatttctccatctccatacgcaatacactgattctgtcgttcttgaatgcttccattctccatctgcacattacttactccggtatagatgagtacatgttttccatctttttccgttgcacttcctgaaaaacatcctcgtttgtcatattcctgatccggagcaagtactgatggcatattcttccaatgaatcatatcatctgaaacactgtgtccccagtgcattggtccccactccgttgtatacggatgatattgataaaaaagatgaatctgtccctgataccaggaaaatccatttggatcattgatccatcccactggagcagctacatgaaatgccggtttttcttctaccggaattttctcttgttctgttttttcatattcattggctttctttaattcaatactcataatgtctcctattctttcccctgttcactcttcaaggattcctgatacttgtcaaaatacttctgcttgattgcaagataatcagacaatccatattgttccattttctttaaatagctgtcccactctttttcaattccgccatttaatatccaatctgcttttttctgttctgcatattttctgatatctgtatcgtattgagtcactttgtttgtgtcttcaatactcataaatacatttggatatacatatttactgtgcatatcttccaaataggtttcatgcatattgtccagacgccattttgcatccgcaggctgtgtcacataaacatcgtaatattcatttaatactgctaacggtccattcactgactgagcttctctgacttctaccggagactcatttccaagatccatatgctttaacattttctctccatccttgttcgttcccatctcgaaaatattaaaggaatctttttctccatatgttccccaattgttctgtggagattgtaaaggcgcatacatctgatcaatccacgccgctgccagtgctgtgtttttacagctggttgtcagcacgcagcgtcctctgtcaaatccacttgtctcactgttattctgtctggtgatattcaccagaccattcggaccagccaatgccggaagcatcacataatcctcataattatcaatattcgaaatatcccatgtaaaacacagaccataacggtggcttttccctttcgccacataagtagaccattcctgtgtaaaagcttccggatcaaccaatttctgctctaccagttcatgcagccactgaataccttctttatagccttcctgtacagtggtataaataaccttgccttcatctgtcactgcaaagtgatccccagtgtctccgtatccctcaccaaatccattgatcaaaattgcaggatcctgatctccattgttgatgataaaggacatcggtatcacatctccctctatgtcaaattctgactttagttcttccgcatgatcccggaacgcaattaataccttttccagttcttctgttgtttcaggtactttcaatccaagaaaatccagccattttttattgatatacggaatattcccaatcgcctgaattgcttctttcccttcccccagctgttcgatccaggggaaagaatagatatgtccgtccggagctgtacacattgttctgtattccggatatttttcaaaaatagccttcagattcggcatatatttatcaatcaaatgctctaccggaataataatcccctgttttgcataacgaaggagatcataatcattcattcccgcattaaagagcccatccggcagatttccaaactgtgccagtgccagatttttcttatccgcaaactgatctgccacaaagcaggtccagtcaatatgtacattcgtctgtttttccaaccgtttgaagattgttcgctcgttcggctcctgtgtagatgttgcaggagcactggtgataaatgataattctgctttttctttcagaggaaactccacgtcttcgactggtgtatccggattgatctctgcctccatcctttctttgcttccacatcccgtcattgaaaatacaagcacaagagaaaggcttgccgcaataatcgatttgattctttttttcatagctgcacctcctaaccatctaaccttttactgaaccgaccatgattcccttatcgaaatatttctggaaaaacggatacatgatcaaaagcggcagactggatacaacaatcgtcgcatatttcagtaattctgctacttttgccatttctgctgtactctggatatccgcaatcatacctggctgtggcgtattttgtaccaaaatcgaacgtagtacaagctgcaatggctgtaaattggcatcattcagatagatcattgcatcaaaatagctgttccacattcccacaaaagaccagagtgccaaaactgcaatgattggtttacacaccggaagcataatccggaaaaagtgctggatttcatttgctccgtcaatagctgacgcttctcgaagctcttttggaatggactgataatatgttctcgccaaaatcatattccatacattaaaggctcccggaagcaaaattgcccagaccgtatttaccatatggagctgatttaccagaataaatgtaggtatcagaccgccgccaaaaaacatggtgatgataaaaacagtattaaaaaactttcttcccacaaattcttttttagacattggatacgctgccaataaagttacaaaaactgaaattacagtaaatgctgttgaataaaagaacgaattcaaaaatcctctccatatcatttcattttcaagcactcttctatatgcatccagtgtccagtctttaaaattgaaactgattccctggctgttcaatacattcggatccataaaagaagcaaccacaacatagaccagcggaatgagtatcgcaagtacaaaaatccccagaaccgcatagccaaaccctaaaagcactttatccgaagtgctaagtttcatttttcttcttgtttccatcttcgtacctcctaaagaccttccccgtcattgagtttctttacaatccagtttactgcgattagaaggattacattaataatcgaattgaacaatcccactgctgtcgaatatccataatctccatttaacagaccgattcgatatacataagtagagaggatctcagatgctggaagattcatatctgtctgcaacgcaaatgccttttcaaatccaatgctcataatatttcctgcctgcaaaataaactggatgacaataatatttttgattgccggaagttctacataccaaatctgctgtaaaatatttgcaccatctacaattgctgcctcttccagatctttgctcgcatttgacagcgctgcagtatacatgatcgatgcccatcctgctgtctgccagattccgctggcgatatagattgtacgaaacgattccggcattgtcatccaattggtatcaatccccaacacctgattgattggtcctaccggagaaagaaacatacggatcataccacagagaacgattacggaaataaaattcggtgcatagatcagtaactgaatcttctttcgaattcctgcttttctaatgcggtttaaaagtaatgcaagaataatcggtaccggaaagccccatagtaatccatatgcactcagcttcaacgtgttcatcagataattcataaaatctggtgatgacaaaaaacgctgaaaatattccaaccctacccattcacttccaaacacaccgtcaatcacattataatcctcaaatgcgatcagcactccactcattggaatgtacttgaaaataatcgtcaaaagaagtgccggcattagaaagaataagtataactgccagttttttctgacatactgtagcttttgttttgctgtctgcttcaccggaaccgctttcttgtttgtaaatgtcctcatttcttttttcctccctgcttctttttaataaaccggttatgcaaccggtaaagtaaccggttacttttaattcgatattacaccagattctctaacatgtcaacatattttcataaatacacgttctctgttcaccaaattttagtcttattgcataaccggttccgtaaccagttatttcttaattgcttttttctgctgttcttgctatactgaaagtaatttacagaaaacaggagttgttatattatgggcaaaaagaaagtaacctttgcagatattgcaaaatatacgaacttttccaaaactacgatttcaagatattttaatagtccagattctcttactttagaaaatcaggaaaaaatcgcaaaggctctggatgatcttggatatcaggaaaataagcttgctaaagttctggcaaatgggaaaagcgaatttataggaatcattattcccaatctatatctgcactactattctgagatgttgaatcagcttttgtccagctacagtgactaccactacaaattccttgtattcgtaagcagtgacaaaaaggaactggaacaacagtacctggatgaattgatggcttataaaattgaaggtctgattatattgagccatactttttcttccgaggagcttgcttcctatcacattccaatcgtcgcaattgaacgggaagctgagcatatctgtagcgtagacacagacaactatatgggagctgtacaggcaaccaatctgctgattcgcaatcaatgtgatgtactgattcatgtaaatgttcctgtacctgaacacgtgcctgcctataaccgtatccgaggatttgaagatacttgtaaggaacatcacattccatatgaactaatgcttcaggatcttggctatacttatgaaactacttatgtagcgatcagacaggtttttcaaaaaatagacagcacctattctggaaagaaaaaaggagtctttctttcaaatgatacttacgcaaatatatttttgaacctgcttttccaaaaatatggaaaattaccggaagattaccaaatcgtaggctttgataattctccaattgccaacgaagcaattctcccaattactacgattggccaacagattgataaaatcgcaaaaaccgcaatggagcttttgattttgcaaatggatgagatgaaaaaaagaagacctactcctttagaacatcccattcacaaacaaatcactcctgttctgattcgccgtgagactacagattcctgatatttatacctgatcggaggaagtccgcccgctaaaggcataagttacgggatacccgaataggtaaaaaccatcagtaaaaagacagagcctggaatcacaccctactctgtccttcatatattttatatccgtttttctgttctctttttacttcataaagtgcctcatctgctttttcataaagtttttcaaaactctctgtttccgcctgtccaagtgcgattcctattgaggcactgatctgaatcctttgtccgtccttttcataagtattgcatagagattcattcaacttctttgccatccgatgaaccgcttctatccggtcaatccttcgaatcagcagcacaaattcatctccgccaagacgtcctacaatatcttcttttcgaaaacattgatcaagaatctttgctgtgttttgcaatacctgatcccctgttccatgccccagaaaatcattgatttccttaaaatgatccagattcagaatgaaaaatgcgtccactccctgtttatttttatcttctttcagtgctttttcaatattctgtatcaagccttcccgattgtacactcctgtcagaaagtctctttgcgatgccttttggattttattgatattttttaagtgatgttctatttccgcctctttttccttttgttcatcgtaattttccagtacaccgataatctttttatttttttcctttccatttataattgttctgctacggatccatcctctttttccaccatattggaccggcaatactacaggctcacattccttttcttacataatgctaaaatacagcttttcgtattgtgtcagcccttcttcacaaatataacccgctttgaccatttcactcggatgaatccgatccagagaataatgtttttcacactcgttttccatatccccatacagtaaaattcgtttctgtttcatatccacaaattcctgctgaaatgtcatatgatacaccctgagctgaaaccagataaacgcaatcatgttcagactcactgtcagaatcatgataaaaatcactgtaaaaagcagttccctcctctgtccctttaacatcccttttttcattctcatttctccttctgaaaattgctgtccatgattcctaaaacacatgaaacataatattatattcctgattcctcccgataatgacaagctctcatctattttcttcttttttatcattcttgctttttttatttgttttgtatatgatagagataacttttattggactgatttaaatttattttcacaaaggagacatgtatgagcaaccgacattatctgatcaattcagaagatcttcaaaatctgaatgccaaattactttccattgctttctccaaagacgaaggtgactggaaaagtattatgcatacacatcattttacggaactcttatttgtagtcagtggagaaggcagcttttcttttaaccaggagcaatcgcctctacgccggggagatctggtcatcatcccgccttacacagaacataccgaacgttcctctcaaaatcatccgctggaatattatgtgctcggaattgatggaatttcattcctgtcccaaaaagacagagaatgcgcacaggtattctgcaattttgagcatgatcccagtattcatgaactgttccgccagatgctctacgaaatccggaccgcacaatacggttctcagaccatctgccagcatctgcttgagattctgattctgaagatcatacgatcccaacagctcattcccgtatcgatcaactcgatccgaatgacaaaggaatgtgcccagatcaaagaatacctggactcaaactatgcagaacacattacgctggacacgctgaccggtttgacacatatgaacaaatattatatggtgcactcttttacaaaatatgccggactctccccaattcagtatctgaatcagacgcgtctgaagcgtgcacagcatttgctgaaaaataccaactattcgatttctgatattgcgtcctccaccggattttcttcccagtcctattttacacagattttccggaagaattttaatatgacaccggtgaaataccggcaggaacatgcaaagaattaaattttatacctgaatacccggataggtacacaaaaaggaacgctctcacagaactttctatgatcgcgttcctttttcttttatcaatctctaaatctcataccacttaatttcatttgcttccatatccagatcaaagcaacttccgtctccgcggtagacagttgttctctgtggctcataagtgttattcactacacagtattttccattcttcacatacgcatgtacttctacattgtagtttgtactgaaccacttatgcagatcttcttcatcatgagaagaccagatgatggaacgatataacagtctgctgttttcgaaactatatggaagtccgctgatgtaaacgcagcgtccctgtccaaactcattgactgcaagctgtacttctttgtcaatctgtttgacgatcgttgtaccgtccagtgcaaagatgctctttttgccttctccgaagtcgatctcccctttacagtcttctgtgatgaagtgctcatgctcttcccagttatatttatccatgttcagtgtaaatcctgtctctttttctacacccatcaccgttgcaagctggaagaaatgaccttcatactgatgagcagccggctctccgactccgataaatccgccgccgttgtaaacaaatttcttgatcgctgtgacgatcgtctcatcagtccagttgtctccgcctgtgtatgcagtatctgcatcaccaatattcagtaccacatcaatgtcatctaaaattgccggattctcacggatatcatcaaagctgataaatctgacatcaaacggagcaccgctgagcgcttcgattacacctgcataagagtagttctgtttgtagtagatcgcatgatgcaccatatgatttccccatgcacgcatcttgccccagcagtttaatactgcgaccttcttgatgcagtatggcgtcgttcctttgatatttgtatacagagtacggaattcgttgcagacactctctacataatcgataaattccgggaactccatcgccagttttaagtatccgccgtatccgatacggtcaatcggttttcttaaaatcgcacgtcttgccgttacccagttgacttttgcttccttgaccggatctcctccttcatggaacgtatccgggaagaagtatggcaagaatcttccttctgtatatttcaccccgtcaatatcactgatcagacgcagcgtcgcaccgtttccaacacttcctacgactgcatccagaccgatggtcttgaactcatccataaacggttccattccgatccagtgatctccaaggaacatcatggcttcttttccacattcatgtgtgatatccaccatctcttttgcaagcttggcaacctctcttctctggaatgcctgaaaatccttaaattctttggatggaatccgatacgtattgttcatatatccctgatcgataataaattccggacggaacttatatccgacctcctgctcaaactgctccagaatatatggacttaccgatgcagaatatccataccagtctacataacgctctctcgccagttcatcaaaaatcagtgtaaactgatggaaaaatgtcgtataacggatcacgtcgatatgtggattgtcctgaatatattttctgagacgctccatggaatatttgtgtgtctttggctgacgcacatcaaatgtgatctgcttttcaaagtctgtccatccgtttgtcaccgcattgtacatatgtaccggatcccacataatataggcaagaaaacttactgtataatcatgaaatgcctttgcactgtggatcgtcacatccccgctctcgctgtcatagctccactgctctgtcggaactacttctcccgtggtacggtcaatcacttcccaccatcttgtgatatcatcatggtcattgaccttcagcatatccggatacagatggttcatcagatgaatggataactcctcttccactgctgtataaaaaggagtcataatatacatctgctgaatctcttccggatttgcctttgcccatgcgttgtcttttctggttgtataataagtagaatatacttttgcatctacattctttaattcttctggataatcggttccgtcacagtcacggatcgcatctgccccccagcgctttaccaaatccagtgtttccggcacaacgtccacatctgtagggatcgtaacccttccgctcgtacactctttcaaaatgattctcctctctcttctctgttatagtctactttgtataaatcaagaatagaagaaaaccctgctttcgtcaatttgcttcttgctttcatttttagcattcttgctgttgtatttttttcgtgttgaaactgataattttattcgaattttacattctcccgctccagagaaatataaattttcgttcccactccgacacgggattccgcccggatgctgtgtcctaatttctgtatgatcgtcttgcacaggtacagaccgattcccgtagatttctggtgctctcttccgttatatccggtaaatccacgctcaaaaatacgcggaagatcttccggggcgattccaattccagtatcctccaccaccagttccgtgccttttatataaagggaaatgctccctgccttcggcgggcggacttcgtccgatgatgtgtatttcagggcattggacagtatctgctcgatcacgaacagcagccacttttcatcggtgagcaccatctgcctgctgtcctgaaaattcaaatggatctttttcaaaatgaagatctgggaatatttgcgaactgcctgccgcataatatcaccgatcggataccactggaatttcaggtcattccccatatcctccatccgcagataagacagtaccattcccacatattcttccgtctgaaaaatcttcattttcatctcatttaggaaatccagtgtctcctctgcatgttcctcaaattccattgcctgttcttcaaaagactggatcagaagatgcatagcggaaatcggtgtcttgatctgatgcacccacagactgtaatagtcagatgcatcctttttgctaaggagtacttcgttttccagcatctctctccatgcaaaaattgtctccgtgatttcctgatattctgcttcaatccggctctttggatccggaaactctttcaattcatgcggaagtgccgcagacagatccagcagactttgataccgcttccgataaaaccagaaattcagcgctcccacaaataaaagccagattgcagagagctctgctccatactcgatcacatcaaagggaacttcttttaaccagaataatatacagaaaatcacaagcattacggcatatactccgacaaccggaagtttttctttcaaataagaaatcaacaatctcattctatcacgtacccgattcctttctttgtagcaataaaatcacagattccaatactttccagtttctttctgagtctggtcatatttacagtcagtgtgttgtcatcaataaactcatcactctcccagagacgttccatgatccgatccctttttacgatctttcccgcattctccatcaggatctgcaggattttgaaatcatttttcgtcagctccatacgctctccgtgaaatgtcactgccgcatcgttcagatttaagatcacatcccgatactccaacacatttaactgcccggtacaagaatacgctctccttaataatgcctggatttttgccgtcaggacattcagatcaaacggtttttccacaaagtcatcccctcccatattcatcgccatcacaatattcatattatcatttgctgaagataaaaacagaatcggtacactggaaatctgtcggatctgggtacaccagtgaaatccattataaaacggcaaaataatatccatgatcacaagctgcggatcaaacgctgtatactcctcctgtacgcgtttgaaatcctgcacacatgccacctcataatcccacttttccagatgttccttcattttatccgcgatgacacggtcatcttccacaatcagtattttatacatcgtcttcccctttcacgctcttatatatagaaataatatccttgcttttgctcactgtcaacgacaagaatgctcacctttagaaagtctttagaattcttaagtttatatatattgaccgtatatattatattttctataatatgctcaaaagatagatatacagttttcttacctatcaaatatacgaaaggaagggatggattttatgacatttacactcaacacacccatgtttgattttcttgttctttctattatcgccgagggtgatgcctatggatatcagatcagccagatcatcaaacgagtatctgataccaaagattctgccctgtatccgattttaaagaaattacaggaaaacggctatgtagagacctatgaccagcagtttcagggacggaaccgcaaatattataagattacacaaagcggaaagatccggcaggaacacctaaaaaaggaatggaaagagtacattacgatcattgacgatattgtaaatggaggaatgggaaatgactaagaaagagtatatgaaaaaacttgcataccagcttcgtcgtcttcctaaagaggatttcgataaagcaatggactactttgaagaatattttgaagatgcaggcatcgaaaatgagcaaaaagccatcgaggacctaggcgctccggaagaagccgcttccgcactgattctggatctggcacaggaaaatgctgtcaaaccgccaaaaacaatgaaacggcgcttttccgctttatggatcgctattctggcactttttgcagccccgatcgcactgcctctggcactttgtatcctggctgtgctcgcatccctgatccttggaatacttgcagtcgttggaggtatcttagtcactgcacttgccgcagtggcaggaagcgtgcttggcatcattggaggaattgcgatcatccctcagactcttgggggaggactggttacgatcggtctgtctctgatgctgatcggttgtggaatcctggtcacatatttcaccatattactggctcgctggatcatcatcaaacttgccggactgctcggcaaacttgtgagaaaagggggaaaaagacatgaagaaaagtaaaaaaatcattctgacactttctgcagtcacactgactgccggtgttcttttcaccggaatcggatatatgaatggaggacgatttggctttgccttctccgatggaaaatttatctctgctgacagtatagaagaggagaaacaaccatttattctggaaaaaaagaagctggattctgtaaaagacattgacattaacattttgtcctatgccgacatccggattctgccgtctgcagacaactccttttacctggagtataatctgcccggtgaatacccaaagccgtctttctcctgtacagacggcaagctcaccctgactcaggagaaccgggagcccattgccatcataggatttggttttcacgattcccaaagctccgaacgcgaagtgacactgtacgttccctcaaaagcggaattaaacagctgcaatctctacagtgactccggaaatatccaggcatcggatcttactgcctccgtttttggcatcggatgtgactatggagatgtcacacttaagaatatcaaaagcaaggaacagcttgctctgaatttaagtgccggacagctaaatgctgatacactctccggaaagacagtcacgatttacaatgacagcgggaacatttctctggattcctgcacttcggatgatcttcatctcgaaacggactacggagatatccagcttgataacgctgctgtgaaaaatgcatccgacatgactttagactccggaaccctcacgatcaaaaacagtgctctgggcgctgccaggatcaccaatgatagtggaactatttctctggctcaagtaaccggaaaatccctggaggcaacttcggaatatggggatatttccctgacagatacccagctttctgataacgctgttttaactctggattccggtgatctttcggcggataccagcagcgtaaaaaagatttctgtaaaaaatgacagcggcagtatttctctgaatcaattttccagtgaaaatgcggactttatgttatcctatggtgatctggatctgatcgcaacaaaacttggctctcttagctgcaagagcgaaaacggagatgttgccatacaactgccggacaaatttgattcctacggatttaatcttcttacacaatacggagatatctcactcccttccggcaaggctgacggcattgtttctgatgaagacgactcctctgaggtttcctacagtgcaaatccagaggcaaaaaataaaattcaggtagaatgtgaaagcggaaatatccagatccgttagcaggaaagacgactgactccactttctgaaaaagtggagccgccgtcttttttattcctttgaaaccacatataaggaatagaaaaatcctttcttttgcatcaactcctgaaatgttcccttttcgacaatttctcctgcatgcataaccaaaatctcatcatactgatacaacagcttttcctctagccggtgcgttacaataatctccgtcatttctttcattgataaaacagcatcaatcactgcgtacgatgtttgattgtccaatgctgcggttgcttcatccagtaataacacctgacttcctctcagcaatgcccttgctattgcaatgcgctgtctttccccacctgacagcttgttcccattttctccacaactgtcatttaatccgcgtttgtctatcaattctcgcaaaccagcctgatctgctgcttttttcactttttcctcatcaaattctttgaataatgtgatattatttcggatcgtatcacgaaatacaaataccgattgctgcactggtgaaaatccatccataattgtattgatcagtgttgattttcctgctccggaacttcccacaactgcatacttttttccaatttcaaactcaaagtttaaatgatgaagaacattcttgttgccgatactgacactgacatccttcaacgaaattccttttttcagcattcctattttgttttccttcatttgctcctgattgatctgcacacttaccagcattttttcaatcaacccaatcgcggcttttcgctttgccaaaatagacggtatcctctcgatcggggaaatcacataattcattaattgaagaaataccaacacaatccccggtgtaacaccatatcctgaaactgacatccaggctccgatcagaaaaattcccaatcgcatcattacacttgctgctgttccccacaaattgatgctttcttctatgtaacgactttgatacttcagatgttccattctttcattttccctgaaaaaattcttcttcatttctttttctgcctgaaagcttttgataacaggaaatctctgaagaatgtctcttacaatactcacaaactcaccgtttccatcagaaactttcctttcagcctccgccattttatttgcaatcggaaacgatgctgcaatcggcagaacagacagtatcaacccaaataccgtcagtatcggactataccataacatcagcagcaatgctcccacaaaactgaccgtcagatcaatcatttccagaacactgtcaaaataatacatttctatcatttttgcatcatttgtatacatggaaagatactggctggtattttctttgcgaaaggacgaaagatttttatcaatcattttacaaaatatcttttgtttataacacaacatcgcctgatataaatattttggtcgtgccactcgataaatcacgtacgccgctataaatatcaaaaatgttatcattgcaattataccaacctgcaaaatcgtcattgagctgtctcctgatacaatgtcaatgatcgtctgcagcagctatgaaatcacaatattataaatacttaaaatcaacatcgcaattcctgccatcacaagccattttctgctttgacaaacaatttctttcaaataccgtttacgtattctctgaatctcaatttcttttttcattctctgctccttctatttgcactgtctttgtcgccacagcctcccgaaaagcctgatcatgctcgaccagaagcatcgtcggggagaattcccggatcagttgttcgatctgcatccttgaatacagatccacaaaattcagcggctcatcccacacatataagtgtgcctgttcgcagagactttttgcgatcagcacctttttcttctgtccaccggaaaaatcctgtatttccttttcaaactgaatcctctcaaaatccagtttccgcaggattgctttgaataaagcttcctcgatctggctctttttcgcaaaatccgaaagtgtcccctgcaaatgtgacgtatcctgcggtacataagaaatgacgagcccagatcccatcgtaatcgtccctgtatgctccaaagcttctcccgccacgaatttgagcaggctgcttttcccacttccgttgcttccatccaataccacccgttctcctcgatggattgaaaaggacaccggacagctgaccggatttcccccataacaaactgccgcatccaaaaacgtaaccagtgtatccgaacggtattgcaacggaagcagttttaactcctctgcccgctccctgtttttcaaaagacctgacttctgctcgattgctttttgctgtcttgcctcgatcgacttggcacgtttcatcattttcgcggacttatgtccgatataccccttatccgctgccccggttttggatgcttccactcgatctgaccatccttgtgtacgttttgctgactgcgaaagccttcggatatccttttttaaagattcattctgcgcttcttccagtcgctgctgttgttcaaaattttgaagaaacgcagaaaaagtaccgctctgtacttcaatattacttcgattcaaagataaaatatgatccacacacccatccaggaaacacctgtcatgggacaccagaataaatcccttcttttttctcaaatactccgatacaatctgtctgccatgtgtatccagatgattggtcggctcatcgatcaacagaaaatgtccttcattcaaaaacagtgctgcaagaaggactttcgtctgttctccgttggaaagtgtctcaaaaggacgccaaagcacttcttcatccacttccagagcgtaaagttccttccgtatctgccactcttctgcctgcggacacacctcattcagtacttccatcgtccacttttttgtatcttttaccaaatacggaaaataatcaaaccggactgattttataattttccctcgatactcatactgatccatcaaaagatttaaaaacgtcgtctttcctctgccgtttctccccacaaatcccagtttccagtctgtgtcgatctgaaaactcacattttcaaaaataggatcataactggacggataagaaaacgtaagattttctacttttatcatcgacattgctcctacctcctaacatcaaaaaaagctgcaagaaagtcaattcctgcagcttctcatagcacaaaccatccccatatcagacgtatgcggccaatgatccatatctgtgaacaagactcttaactttcctgcaaaaaggcgcaatcattgcgtatctgcacaatcactgctgttttccattctacttgcaagaaaaattaatcatcctttcacctctttcatttcaaatctgtttctaacatatcacaagatgaaaaaacaggcaagccttttttgcctgcctgtcagaactctttgtttcgattacagctcttcttcccactgagcctctttaaatccaaccagcacctgatcctctgttactacaatcggacgctttacgagcattccgtctgaagcaagcagtgccagctgttcgtcctcgctcatttccggaagtttatcttttagcttcatctctttgtaaagcattccgcttgtattaaagaagcgcttaagaggaagcccgcttctctgataccattcttttaactcttccagtgacgggttattctctttgatatctcgttcttcataagaaatctgatgctcatccagccactttttggcacgtttacatgtggtacatttcggatagtgtacaaataacatcggtctgtcttcctttcttttcgtattagatttcgtttgtattctatatcgtttttcaaacttttgcaattacttatttctgggattctttcgcaatccgcagtcttacccatgcgcctttcatcctcgtagagttggccaatgtaagacttcctccgttttcttttgcaaattgctctgccagatacaagcccatcccgtaatgtttcctggaatgtctgcttttgtctccctgataaaacagtttttttgcagactgcagatcttccgccgaaaatccgctcccctcatcctctacggaaatttccagttgttcatttccctccgatatacagattcgtatcattcctccctgtggcgtatattcgattgcgttatataccagattttcccaggaccgtatcaacagtttctcattgacacagatccactttggcagattttcacattcaaactgaatcgtttgctttttcccggcagccgccgcttcgatccgctctctgaattgtcctgtcagttctcgtatgtccacctgttcttttttgtacatctgataacctcctgtggagatcatctcctgcaaaatctgcaaatattcttcgattccctgaatttccagttccaatgcaaggctgtacttttgtgcttcttccagactctctgcctcttccatcagctgtacgttcccccggatcacagtcaaaggtgtcttcagatcatgcgccagcgctcccatctgctcttttctggctgattcaagctcccactgcttcatcagagactctttcagtgtatcccgcatttttccgaacgtctccaggattttcttgatttccagaacctgagaatccggacatggaaattccagatcctgatgctcaattttttctgtcatccattcaattttttgaagttcttgtttaatcttccggctgaaatatcggatcaaaaacatcacttccgcacaaaaaatcaaaagcgctgccagcaaaagtaattccagaacatgcggaaaccgttctctgagtgccggattcccaaattgaacacgaagctgataggataccagacagattccctcttctctctggaatcgtttcagatatccgctgctgatttcatttttctcttccagaacagcttcccatacttcttctctttctgattctgtaaatgttccgtaaagccacctgcctgaattgtcaaacactccaaacctggttccgtatggaagcattttttcctccactttttctgctgtctgaatctcttcccttttttgctccaactgctgttcatcataattagcgggatgtatcaccgcctttatggtcaaaatctggacaatcactcccaaaaccagtatagttgctgctcctgcaagtaaaaaactaaacagaaaacgtctgaaaatccctgaaatattcttttgccttactcccacttgtacccaatcccccacactgtctgtatattcttcttcccatatctggcaaattttgcccgaatatttttcacatgctctgtaattgcggagctgtcactttctctctcatatccaaatacactctcaaaaattttctctttagaaaaaacctgtccatggttcaatgccagaagctcactgatctcatattcacttttcgtcagaggaattttctcttcccccacctgaacactctttcccgccagatcaaaacgtactcctgaaatttccactgcatgtgttttttctctggcttctcttcgcaaatgtgccgcaacccttgcccggagttctccgattccaaacggcttacagatataatcatctccaccggaaccaagcccttccatgatacttttttcctccgcttttgctgtcagaaataaaatcgggcagtccacataccgtctgatctttttgcaccaggtgatgccgtctgttcccggcatcatgatatccagtaaaatcagatcatagtgaatcaaatccttttcctttatcacctctgtattttcacatacactcactcgatgtccgtctttttccaatgcattctgaatcagatttcgaatcccttcttcatcatctaccgccaatatccatgccattttgactcctctttcctgtcattgtgaaatgcttttcctgtcgtgatgctgtatccagatacaccagaggatcagccctgttatcgtcattcccaccattgagagaacgcccgtcctgatctgttctttcagcatttctcctgccattttaaacaattcgctctctgttttccattttacataatacaacagcagatgtccactccatccacatggaaaccacatccagagtccgtctcctaatccagtaaagagcagtgccgcaatcagactctgcgtcacccctgctgccagacaggctccacttccgaaacgcattgccagaaaaaagtgcagaagatagattcctgcctgcgttatccacaagatcagcccgcatataagatattcttttaccgacagattccacgcagctttcgttccccagacgcccattccaaagagtaaaaaagcaagcaatgatgccgccagtccgagaatccaaagtgtgagtatctttctcaacactgcgctccagcgcaatgttgacacacacagcagattttgaaaatttcccgcctttaattcctgcatcacagactgcatacagatgatcgcagaaacagacgggtacacgatcgcgagtgtttctgcataaaattccagtacactctgccattctcttttggcagccactccatacaataaaaacaatcccgcgcctgcaacaggaactcccaaatggatccagaaaatccaggttcctttcaattttaagaattcacttcccaccagtttttttatttttcccatccggcttccatcctcctctgataccatcttgctgtcatagctgtcaacagggcaaataatcccatactgagtaagattcccggaacgatcacactcttttccagtacctgcggcgtaaacatgacgctttccggcactgcaggaagtccgtttggcagtatttgaagaaccggacacatcagccttggcagaattgcaaacggattcatccaccatctggatcctgttgtccaaacagtcgaaagaatcgaattcgctcccatcccaagtaaaaaggtcaggaccatccccgtcttttgataacaaaacatccacaaaggaatctgccagcatatcgcgcagactaacagtccccatgctgctgccacagtaatcggggaaaacagatttcctcctgtaaataattgtttcaaaaccaaactgattccggccaccgccgctgcgatcattcctgtacttacaatgatctgcccaatgcagctgacaacctttgctatccagatcttccctgctgatacaggaagcatctgcactgctctgtacttcagacgtttctccctccggcagataaaaatactgcctgcgattacctggattggaaggaaacacatataccaccagttatactgattcatctgataatatgctgcatttccaaacgaaaaatatacggaacataaaatcgatattgtaggaaaaataaccatcagtcttgcccattcggaatgtctgtttttcagaagctctgccttgatatatgctctcatatccgttcaccccctgtttctgctcacaatttccgtgaacaattcttccagattttcctgctgtcccccctgatatcccaatactccatttgccaggattccaatgtagtctgccgtttgctggatttcacctaaaatatggctggagacaagtactgtcatcccactttctgcaaaagaaaccagcatttcccgaagctgacggattccaaacggatccagtccgttcgccggttcgtccaggatcagaaaatccggatcatttaacaatgccaccgcaattcccagccgctgcttcattcccatagaaaactttcccacctgctttttccccgtatttttcagatccacaatatcaagtacctccaggatccgggcatctgaaatcccaagcgtccatgtccgcactttcagattatccactgcacttaaattttcataaacaggaggcagctcgatcaaagccccaatccgttctatgcactttcgactccatatttttccgtcaaaaaatacttccccggcatctgcccgcgtcatcccgcacaatattttcatcaatgtcgattttcctgcgccatttgctcccaaaagcccgtatacacaccctttcggaattctcatattgatatttttcagcacagtctgtttgtgatactgcttgcatagttcttttgtttccaaaattatttcttccataaaatgattctcccttctctttgtacagctttactttaagagcgaattctaaggattttataaggaactgtcatttttttgcacaaaaacccatacccgccttgcgaatttatctcaatatgttaaaatatagacgttaatatgtgaacttctatagattgacagaatcatagtgaaaataaaggaggaactttaacatgcattgtgtcagaaaagtaaccgaagatttatactgggtcggaagcaatgacagaagactggaactatttgaaaacatttttccgattcagaaaggagtttcctacaactcttatctgctgctggatgaaaagaccgtccttttcgatacggtagacagcgcagtaggcagacagtttctggaaaatatcgcggctgttttgaacgggcgtactctggattaccttgtgatcaatcacatggaaccggatcattgcgctttgatcgaggatctgcacctgcgttatccggatatgaagctgatcggaaacgccaaaacatttccgatgatcgatcagttctacggcatggatcttggagataaaaagatcatcatcaaagaaggcgagacattctcctgcggaaaacacacacttcactttgtgatggcgccaatggtgcactggccggaagctatgatgacttacgatgagaccgataaagttttgttctctgccgatgcattcggtactttcggagcactggacggagtgatcttcaacgatgagatggatttcgaccgtgattatctggacgaagcccgccgctattacacaaatattgtcggaaaatatgggattcaggtacagaatgtcctgaaaaaagcagctgcattggatattcagatgatctgccctctccacggacctgtatggagaagtaacctctcctatattctggaaaaatacgatatctggagcaaatatgaagcagagacaaagggtgttatgattgcctatgcttccatgtatggcaatacagaaaatatggtcaatgttctggctgccatgctcgctgatgccggaatcacaaatatcaagatccacaatatttccaaaacacatgtatctgagctgatttctgacagtttcaaatacagccatcttgtacttgccgcaccaacctacaacaatggaatttatcctctgatggcaaactatctggaagatatgaaagctttgatggtacaggggcgcaccgtagctgttttaggaaacggaagctgggctccgcagtccgcaaaactgatggaagcaaagcttgcagaactgaaaaacatgacacttctgacagaaaacttcgctgtaaaatcagcactgcatgattctcaaatggaacaactgcaggaactgtgcacaaaaatcacagattctgtcaacgcataaattctgacaaatacaaaggaggaattcatatgaaattagtaatcaccatgagccgtcgtttcggaaccggtgcaagtatcattgcagatgaactttccaaaagactggacattcctgtctatgaccgtgcctatattgaacagcaggtcaatgaccgcatgtatgactccgaggcagaagccatccgtaatcttgccgaaaaaccatgtatcattctcggacggtgcgcttctgatattttaaaagaccgcatgaatgttctgaatattttcgtatgtgctgataaagaagaccgtatcaaacgcattatgaagctggaagacctttcctacgaggatgcaaaagagaaaatcgataagactgatgaacagcgtgcttcttattattatgaacatacaggaaaaacctggggtgatgtaaatgactatcatatgattctggatacctccgcactgggagtcgaaaattgtccggatattttaatgcactatttcgaaaaactggaatacatttaaatcgaatgtaaaaataaaaatcttccatagaattccgtgtttcccgacacatgatcttctatggaagattttttacatcactctctgaatccatacgaatgacaagtcagaagtgtaatcattttctcgcccgaacagatttttgtatcatctctgcaatgacctcttcctcttcttccagctcctctgcaatctcagaaattgactttccttttaccagcttcttttgaatcagcctttctaaaagctcctgttttccctttttaattccttcttctatcccctcttctctgccctcttcccaggacgcttcccgctcctgccgcatatgcttttcctcatcatattcataaatactcacttgtttcgcctccgctctgttttgtttcaaaaactctgaaagaatcccttcctgaatacactcactgattgcctgttccactgcttcttccaccggctttacctgggcgtactcccgcactctttcagtatattccgagtaatccttcagagatttgcacatttcctttaacttctcattatgcccgcggttaatgttcagcatcaccgcagtcagctccaatgccggatgttcttctttgacgcaatacgcatcagacaatcttaaaatttttcgatccggctgttcctgacttccattgtaaaaaatcacaaactgcggggtcgggatctgaatccttttcgtaccatacaggttttcatctttcgctcaaacctctctgctgttttagattgaaatcaaagcatagagatcttccgatatgctataagaataaaagatgcggtatcgttccgcttagaaaaccagaattttatgcttttctgcattatagcacgattgaccaaaaagaacaagctactgtaaaatccatacataacggatttacagcaacttgttcttttttattttgcgatcttataatattctcttgacgtgattgcaaagactatcacatagaatactgcaaagactgctgatactccaattgtgcacatcatggataaatgtgtatctgacagattaaacacaagaaggagctttgtaatcggtttaaatgccactgtcacatgcaggatcgccataagaagcggaacaaagaatactgtcaaaatctggctgtgaatcgatcctttgacttctttcttactcattcctactttctgcataatctgataccggtctttgtcatcatagccttcagaaatctgtttgtaataaatgatcaggaccgtcgccatcaggaacaagaatcctacaaaaattccaaggaagaaaaatccgccgtaaacgccataaaattcctgtgcataagcttctctgtattctacatagcatgactgcacctcgccgcttgtctccatccgcgctttcatggattccagagcttcactttttgcagtgtcatttcccttcatatcaaaattcaacagatactgcatcgtgatcggaattttggtcggaccatagagctgtatcacatgctctacagctgcatcatccgccattaccagataaatattctttgtcacatctgcctctttctttttctgcagattggattccttcaagttttcttttacatgataattctctttacctaacacgatttctccgctgtcaaactcttcatccgggaaataggtcagcacttcatccggagcaagtgaaatatcggttccttccagtgcattataatctgccaatggaatcacatacaagctgcgcatcgcatctgcatcatatccacttcctgaatccgtatcaaacttgagctgattgtcatatttcatggcgctcagcggcacataccggtatttttgttcatgaataatctccagcccccggctttgcgtctcttcctgcacgatccgctccatcgcttgtatattttccggagttgtttcatcagatgttgcggaaaattcagtcttaaaacgtgtattcattatattttcctgcccgatatacaaggatgctgtcgcagaaatcaataccagtacaatggtactcataatacagatatttgccagtcctactgcattttgtttcattcgatagatcagacctgacactgaaacaaaatgttttgtcttataataataggctttatttttcttcaataattttaacagcgctacacttcccgctgtaaacagagcgtaggttccgaaaataaccagaattactgcaataaaaaattttgtgatcgcactaagcggtgactctgtcgtctgtgcaatataatatccgcttcccaacaaaagaattccgatcactgcgatcagccagtttgcttttggttctttttctccttttttccctccctgcagaagttccaccggattgactctctgcacctggaaaatgttccagatcagaatcacaagaaagatagctccaaatagaccggcactgatcaaaatagcctccggttccacagaaaactgaaatgcaacatcaaaccggatcaatttcaggagtaccagaaagatgaggcgtccgaatacgattcctgccaggattcctccaaggatacctgcgcccgcagtatagatgctctcccagaccatcatctttgtcaggttcgtcttatccattccaagcacctgatacaatcccatctctttttttctctgacgaaccagaaaactgttcgtataaaagagaaagattgccgaaaaaccacctgtgatcgtaactgcaaaattcaggatcagacgcagctgggatgcaccgggcatggtatccagcgccgaattggtggagactaacaagagatcataaaacatcatgacagtcaaaatgcaggtcagaagatacggaaaatacgtctttccgtttttcttaatgttggtcgcagccagctttggatacaatacattacgcattgtcctcacctcccgttgtcagcgcagtcagtgttgcggatattttttcatacaattcttcattgctcatattgccgcggtacaactgatggaacacttctccgtccttgatgaacagaactctgtttgccgtactcgctgccttcacactgtgcgtcaccatcaggatggtctgtccctgctgattgatctccttaaacaagcgaagcagttcatctgcagcccgcgaatccaacgctcctgtcggctcatctgcaaggatcagcttgggctgcgtgatcagcgctcttgccactgccgccctttgtttctgaccgccggatacttcatatggaaacttcttcaaaagttgagtgattccaagctgctgtgcaattggtttgagtttctgactcatctccggatactttttgccggaaagtaccatcggaagatagatattgtcctccagagaaaatgtatccagaagattgaaatcctgaaatacaaatcccagattctgccggcgaaatgctgccatttctttattgcggatctctcccagatctcttcctttcaggtacaccttcccggatgttggtttatccagcgctgccagaatatttaaaagtgttgtctttccggatccggactctcccatgatcgctacatattctttctcctccaccgaaaagttcacattggaaagcgcctgtacctgatttcctccaaatcgtgtggtatatatttttttcagattctttacttccagtaatgtcatcgtcattccttcctttcatttctcccgttttcttacttctcgtttattataactggaacacagaagcttgttccattgattcacattacaaatcacaactgttgtcttacgtttttgtaaggtttggctttccggcagataaaacattgccacatctcatccgcaatgttacaattagtatcagtttgaatacaaaggagttttcagatatgaaacaagaacgatggaaatctattttaaaacctctgaccattcttccggtcattgtcatgctctgtaccatctttggattttccaatcagaacggaacaacttccggtggattgagccaaaaagtaagcaggcagatcgtcactgtctgtgataccctctttcatcaggacttggcggaagagacaatcgaacattataccgaaaaaatcgaatatcctctgcgcaaagcagcccacgccacggaatacctgatcctgactctgctggctgccctgccgctttatacctatggtcttcgtggaaaaaaactgcttttggctctatttttattctgtgtcatctgcgcatccggggacgaattccaccagtcctttattcccggcaggtctccccagattacagatgtatttgtagacagcatcggaatcctgacaggatgcggcatcacataccttgtattacgtaatcgcccgtccgatacggcttcttcgaagaagcgtaatacacagaaaggatagacctccgattccggcaatcaggaccggcactgcaatccacgcagatacagcagccggttctgcatattttttatatccatccagaaaaagaatgtggatcagatagatcccaaacgaacatccgcaaccgatatcaagaagtcttcttgtcctttctttcagacggatctcacagtcctgccagcgaataagaatcataaaaaatgcagcgcctgcaagtacgatgagcggacatccgtattccagaacccgttcataatgctcccctgaccgctgtgtgataaagactgtcagagcaaacacgccggtcatacagccgataaaaattgcagctgcccatttctgactgattcggatatatctccggtacttataaataaaatacccgataaaaatataaagcatatacaccttgtctccgatcagcggcaaatcataatacgcttccccattttgcagggaaaccacatagttaaagactacggaagcgctgcagacaacaagcagagctctctccagttttccgctcattcctttgcacatgacctgaaaaaacggcaataccatataaattgggatcatcgcataaagataccacaaatgaggttctgtcggtacatacagaatctctttcagatcatattctgtcttcataaaagcacgattccagatatagtacactacactccatactaccagtgcgatcaaaaaacgaagcagtctctccccgtgttttttcaacggttcttctcttcccagaagcaatgctccggagatcataaaaaaacagggaacacttactctcgccagtgtatccagtaaaagtgcaaacaaatactcactctgtgtaatttctccatatgccctacaaaaataattggtcacatggatcacaatcacaaaaatgcaggaaatcatccgtatgatctccagattataatttcgtctcatttatcttctcttttcgtctttctcttttgtatccggttcttttttcatcagacttgccttaatgacagtcccttttccaaaacgggcatccagcttctccatcgcatcttttaatttctgatgcttctcatccaaaggcttggggatctcaatatcaaaaatagatagctgcataggctctttttcatccaccagttttgccgtccggattccaagcaggcggaccggttcacctgtccatacttcttcaaacagttcacaggcactctcgtaaagaacattctgatccgatgtcggccgcatcagctgtttctgatgcgaaatctttcggaaatcataatatttgatttccatactgaccatggatgctttctgaccggcttttttcagcctttcaccaacactcgctgccagatgtgcaaagaccggacggatttcttccagtgtttctgcatcctttgacaatgtcgtagaatttccaaccccttttgcttctgcctgctgtgactgtacactggaatgatcgattccgtttgcaaactcccagagcatctgtccatggctcttcaaatgcagcgtgatcagtctgggatctgcctgtgccagatctccaatcgtcagaatttccagctttttcaggatctccacactggaatgccctgccatatacagttctccaatcggaagaggccacatttttacacggatttcttccggaaacaaggtatgtaccttgtcgggcttttcaaaatccgaagccatctttgccagcagcttattcgaagaaattcccacattgaccgtaaaaccgaacttctcccgaactccgttcttgatcaacatagccgcatcaaccggggaacagaaaccttccatcgcctgtgtcatatccacatagcactcatccacactgacctgttcgatttctttcgtaaatgtccgaagatagtccatcagcatccggcttttttcccggtacatcttatgatccggcggttccatcaccagattcggacacttacgaaaggcattcgcaacaggttcccctgtgcggatgccatatctttttgccggaattgactttgcgagaacaaccccatgacgggatttctgatctccgccgatgatcgacgggatcatacgcaaatctgttccggcaccattttttaattgttcgactgcagtccagcttaaataagccgagttgacatctatatggaaaataacgggtgtcatgcgacgatctgtcctttcacttttgcctctaattttccgtcaacaacatcaatctcaatccgatctcctctgcccacatttcctgcaaggatcagttttgctgccagcgtctccacattcttctggagatatctcttcagcggtcttgctccgtacatcggatcatatccgccttccactacgaaattcttcgcagcatccgtcagctcaatggagagttctttgtctgccagacgcttgttgacatcttttactaacaaatcaatgatggcatgaatattggatttcgtcaatggtttaaacataattatttcatccagccggttcaaaaattccggtctgaaatgtgctcttaagtcattcatgaccagattctgatttgattcttcgatcgtgccgtcttcccggattccttccagaagataattcgccccgatattggaagtcatgatcaggatcgtattcttaaagtctacggttctgccctgtgaatccgtaatccttccgtcatccagcacctgaagcaggacattgaatacatccggatgggctttctcgatctcatcaaataatacaacagaatacggttttcttctgactgcctctgtgagctgtccgccttcgtcatatccgacatatcccggaggcgctccgatcagtctggacacggaatacttctccatgtattcactcatatcaatgcggaccatgttattctcatcgtcaaacagactctgagcaagtgccttggcaagttctgtctttccaactccggtaggtcccaggaataagaaagaaccaatcggtttggtcggatctttgattcctgctttggaacggataatcgcttctgttaccagctccactccttcgtcctgtccgatgactcttcggtgcagctcgtctcccagatgcagcgtcttgcttctctcactctcgttgagttttgccaccggaattcctgtccaccgggaaatgattcttgcaatctcctcatctgtcacagcctcatgcaccagagaaagatcttttgcctttaccttttcttcctcttcctccagctgtttctgcagctgcggaagtcttccgtactgcaattccgccgctttgttcagatcgtattctcgctgcgctttctggatctctttattgacctgctcgatctcttctctgaccttctgtacccgctctacagatgtcttttcattctcccactgtactttcttgcctgcatattcttcttttagtcctgccagctcttcctgcagatgttccagacgctctctgctcaaacggtcctcttcctttttcagtgcctcttcttcaatctccagctgcatcacacgtcgtctcagctcgtccagctctgtcggcatggaatccagctctgtcttgatcagcgcacaggcttcatccaccagatcaatggccttatccggcaggaaacggtcagaaatatatcgattcgacaaggttgctgctgccacaagcgcactgtctgtgatcttcactccgtggaagacttcataacgctctttgagtcctcttaaaatagaaatcgcatcttccacactcggctcttccaccatgaccggctggaaacgtctctccagagccgcatctttctcaatatactggcgatactcatccagtgtcgtcgcaccgatacagtgcagctcgcctcttgccagcattggctttaacatatttcccgcatccatggcaccatctgtcttacctgctcccacaatggtatgcaattcgtcaataaagagaatgatcttgccgtcactgttcttcacttcttccagaacggctttcagacgctcttcaaattctcctctgtattttgctcctgcaaccagagctcccatatccagtgcaaaaatcgtcttatctttcagtccctccggcacatctccgctgacgatccgctgtgccagcccttctacggctgccgtttttccgaccccgggctctccgatcaggaccggattgttctttgtcttacgcgacaggatccggatcacatttcgaatctcttcgtcacgtccaatgaccggatccagtttctgatctctcgcccgctccaccagatcctgtccgtatttgtttaacgtatcatacgttgcttccggattgtcactggtcactctctgatttccacgcaccgtagaaagtgcatacagaaaaccttcccggctgattccaaactcacgaaataacggctttaaatctctgcttgcatatttcagtaaagaaaggaaaatatgctctacagacacatactcatcgcccatctgctttgcttcatcctctgcatggatcagtgcattgttcagatcctgaccgacaaacacctgcccgccctgtactttcggacgcttattcaaaagctcttctactctgttaataaacagagatccctgaatactcatcttttccaacaattttaagatcagactgtcatcctgcgtaaccagcgcatataataaatgctcctgcgcaagctcctgattgccataatcatacgcaatcttttcacaattctgcactgcctgcattgaattctgtgtaaatttatttatattcatagcaact

SEQ ID NO: 6969 - DNA, 44037 bp, Unknown
  gut microbiota DNA sequence
tgcggcatggtgtgtggcagcagtggcgatgggagtggatattgtgatattggttatttttagcaggaagtacagaaatcgtgtataaatggaagatattaaaaaacagtcggcctacctgttggtatgtcggctgttttgtgctatgataaaaaacggattgtgaaaaaaataaaagtttaccatagtaaaagaggagttgattacatatgacaaaaaagaaacttgcactggagatcatagaacgacttcgcacggcgtatccggatgcggattgtacgctcgattatgaccacagtgaggcgtggaagcttctggtaggagtgcgtctggcagcacaatgtacagatgagagagtcaatattgttgtaaaagatctgtatgcaaagtttccagatgtaaatgcactggcagaagcagatccacaggagattgaagcaatcgtaagaccttgcgggcttgggaaaagcaaagcgagagatatcagcgcctgtatgaggattctgcgtgatgagtatcatggagaagtgccggatgattttgatgcattattaaaacttccgggagtcggaagaaaaagtgccaatctgatcatgggcgatgtattcggaaaaccggcgatcgtgacagatacacactgtatccgtctgatcaatcgaatgggacttgtagatgggatcaaagagccgaaaaaggtagagatggctttgtggaagatcattcctccggaggagggcagcagcttttgccatcgtcttgtatatcatggaagagaaatctgtactgcaaggacagcaccatattgtgacagatgttgtctgtttgatatctgcaaaaaaagaggtgtttagaaatgaaagcaaaaggacagatgtcagaatccatgccgctggcaatatttcttacattggccggtggtttgcaggatgcctattcttataattgcagaggcaaagtatttgccaatgcccagacaggaaatattgtacttttgggacagaatcttgcagagggaaactggggcgttgcgcttcattatctgattccgttgctggcgtttatcagtggtgtttatgtggcagtccgcattcagaatctgtgcaaagaaagcgaaaaaatccactggagacagattgtgctggtcattcagatcatattgctgtttttggtaggcttgtttccgcagagtatgaatgtaccggccaatgcgatgatgtcattcagttgtgcgatgcaggtaaatgccttccggaaattccacgggattccgtgtgcaacgaccatgtgtatcggaaatatgcgaagtgcgacagaaatgctctgtaaatatcaggtaacgggcaatcaggaactgaagaaaaaaagtatgcattattactttgtaattctggtttttgcggttggagcggccatgggagcattattcatccggcagattggtgatcggacgatctggattgcggcgatactgctgctggcaggatttgttttgatgttcataaaagaggatagagaatacgtgagaagataaatctgcaagatttgttctctattcttgcataatagaaactatgggtgtatcctaagaacgtatttgatcaaaatgatttgacagaacataaagagggggcaaaaaagtggatgcacaaaagcatctatttgataacaagaaaatggcggctctattgattccgcttgcaatcgatcagcttttgaattcctttatgggaaccgtggatactctggtagtcagtaatcttggttcggcagctatttcagcggtgacgttggtggattccatcaatattctgatcgtacaggcattttttgcactggcatccggggaacggtagtctgctcacattatttgggatgcaaaaagcaggatcatgcaaaagaggcagcgagacagctgatttttatcacattttgtttgtcagtgttgatcgcagttatctgtcttttatttaatggacagattctggggctgatcttcggagaagtcgaggagagcgtgatggcaaatgcaaagcagtactttttcttttccgccatctcttatccgtttattgcattgtatgatgacggttcctgtatcctgagagcacaggagaacagcagtcttccgatgaaaatctcgatttgttcgaatattgtaaatgccgtactgaatatctggtttgtatgggggcttcattttggtgtggcaggctctgcctgcgcaacaatgcttgcaagattgtttgccatgtttgtagttatgtacaaacttcgaaaaccagatctggaaatccccgtgtacgattactttacgattcgtccgcagtggaaagagatcagaagaatcttgaatatcggaattccttcaggaattgaaaacagtatgtttcagtttggaaagctggcaatccagtctacagtttctctgatgggaatggctgccattgcggctcagggaatggcaaatctgattgaaaatctgaatggaatcctggcgatcggagttggtgtcgggctgatgaccgttgtgggagaaagcctcggcgccggtcgtaaggatgaagcgatttattatgtgaaaaagctgagtattgtttcagaggtcgtaattgtaatttcctgtcttgtgatgtatattctcgtctatccaattacaaaattcgggggaatggaagcggagagtgcaagactttgtattcatatggtaacctggatcacgattgtcaaacctgttgcatgggtattttctttcattccggcatatggattccgtgcggctggagatgtgaagtttacaatgaccgtatcagtactttcgatgtggttttgcagagtgcttcttgcaatgattctcgcaagaggattcggaatgggaccgatggcggtatggatcggaatgtttgcagactggtctgtacgtggaatcatttatgcgattcggctgaaaaataaaaaatggctgaatcatcaggtaatcggttaaaaaagaataatttcagaaaaaaacaacattctagtagagaggttacaaaactggaatgttgttctttttttaacacaatcaggaaaattcaggaaaaagaattgcataattcctagttttatggtagggtttaaaacagtaatagttattattttaaacaaaagtgagggagatcgatatgataaatattcaaaaagcagcagtgataggatgtggatttgtaggagcatctacggcgttcagcctggtgcagaaaggattgttttcagagctggttctgatcgatgcgaacaaggagaaggcggaaggcgaggctatggacctcagtcatggaagaccgtttgttcattccatgaagatttacgcaggcgattatgatgatatcagtgactgtgcgttgatcatcattacagcgggagcaaaccagaaaccgggagagacaagactggatttagtacacaaaaatgtggcgatcttcaaatcaattattccggagattacaaaacgaaattttgagggaaaccttctgatcgtggcaaacccggtggatattctgacatatgcggcattgaagatttccggttatccaaaagagcgtgtgtttggaagcggaacagttctggattctgcaagattccgctatctgttgagtgaacatctggatgtggacagcagaagtgttcatgcgtttatcatcggagagcatggagacagtgagctggctgtctggagcagtgcgaatgttgcgggaattgatatccatgatttctgtgagctgcgcggccattatgagcatgatgcggcaatggagcggatttataaagaagttcgcgacagtgcatatgagatcattgagcgaaagggtgcgacctattacggagtagctatggcagtaggcagaattgcagaaagtattatccgtgatgaaaattctgttctgccagtttccagtctgatggagggcgaatatggattggaagatctttgtatcagtgttccgactctggtttcccagaaaggagcagagcaggtgcttgagattccattggatgaaaaagagcatgagaaactgagacagtctgccgcggaattgaaaaaagtcctggaaactctggacttataggacattgacgataacatatttttcgtgatatccttgtacgaatggggtgttttttatacacctgaaaaggagagaaagaacggggatacaaacgatggatgttattgtgattatgtgtattggagtgctggccggcaaatttttattgccacgcaatttaaacaggtggaatcagatcttgcaggtagtgtgcacactgtttctgattttttccatgggagttctgctgggaagccgggaaaactttctggaagaactttctacattgggaattcagagtgtgattttctttttgctgccgtctgtgggatcggttcttctggtctatcctctgaccagacgttttttagaaaataaaaagactggaaaggggagaaaatagacatggtatatctggcaattattgcgctgcttggcggcattgcctgcggaatgacaggattggacgagaacgtgatcgtatcctggattacttcgaataaagatatgatcttatacctgctgatgtttctggtaggaatcagcattggttttaatcaggggattgtcagtaagatcaaggaatatcatattaaaatttttgtgattcccctgggaatcgtagttggctctattttaggaggaatcgcgggaggacttctgacagggatgccgcttggtgagagtacagcaattgccagtggacttggctggtacagcctttccggggttaccattggcaatctggcgggagcacaggcgggaagtatcgcatttttaagtaatctgctgcgggagattttctcctttttcagcattccgtggatttcgaaaaaactgaattattatacctgtattgcgccggcgggagcaaccagtgaagatacgacactgccgatgatgatacggtatacgaacgaagagaccgtggtactgtctgtgtttaacggagtgatctgttccgcactggtgccgtttctgatttcgttttgttataatattttttaaaaatatgaggatagtgtgtaatcaatgttttgcaaaacaggaggttttacaaaatgcttacgaatctttaacaagcttagcatggatataaaatgaagaacatgacataattaaacccaacgatagtggaactgaaaggaaccttcataaaaggggaagcctgcaatttataacgtgcagtcttccccttcttttatagtctttataatcaggttaccgtaaaaacgtattgatcacatgtaaaatcccatcttcatcattggatttcgtgataaaatcagccgtttctttgacgatcggctgtgcgttttccatggcaacgccaagtccggcgtattcgatcatggaaatgtcattgaagccatctccgcagcagatcatagaatctgcagtcagtccgatgctgtttagcagtttttgcagagagtatgctttgtcgatattctgtggcatgatctccaggaaaaacggctcagaccggtaaatattcagcagcttatgaaacttctgctggaggtgcggcatcagttcttccaagatagacggttctcctgcaatcaacagtttgttgacagggaaagtcagtcgggatacgaaatccggtacctgtacgatttccattttattgataaaagattctttttcggtatattcgttggaagcaataccggacagaatctggttcccgtcataagtcagaatatccagtcccggataggtggatgtaatttcatagatcggcgcaatcacgtcggcaggcagggtacgattatagatgatctctccggtagagcactgggtaatcctggctccgttgaaggagagcatatatccgccgtatttggaaagattcagcttttctgccagaggaacgataccgttgatcgggcgtccgctggcaagtacaactttctttccttcctcctgaatctcgatgagtgcctgttttgtcggttctgtaagttcttttctggaattggtcaaagtgccgtccagatcaagaacgagcatctggtagtccatatgttacctctcttttagtacactgacgatctcggaaaacttcataccgttggaagctttgacaagaactgtatcctttggatttaaaatacggtctgcctgttcgaaaaagtcatcttttgtttcaaaataaaatacctgtgttttggaacactgttcacttgcaccggttgccatatgttctgagagctgtccgatgcagacaagtatatcgattccaaggccggcagcatattttccgacctcatagtgcatctgtttttctgtcggccccagttcaaacatatcgccaaggactgcaatctgacgagtgtctgcctttgcaagaacatccagagatgcttttgtggaagccggattagcattgtagcagtcatcaatgatcgtaagggaatctgtctcgatcagattgttgcgtcctgccagaggaaccaaagcttcaatgccggctttgatctcttcgtcgttcattcccagtgcataccctgcggcaatgccggcaagtgcattgagaaccatatgttctcccggaatcgagatatgtgcagagaaggttgaatttggtgtgtggaagacggcattggtaccgcgcagtccgcaggattctacctgatccgcataaaaatcccggctgtcatccagaccaaagaagaccggctggattccgtttgcagggtgaacggttgagagtttatcatcatccccgtttaagataatggaaccgttcgggttcatatagaggaaaatctccgtttttgctttcaaaataccgtctctggactttaaatgctccagatgggcaactccgatattggtgatgacgcagatgtcaggacgggcaatctttgcaagccgttccatctcgccgaaattgctgataccaagttccagcacggcaacctcatgttcttcgcggatattgaagatcgtaagcgggagcccgatctcgttgttgaagttcccggctgttttcaatacgttatatttttctccaagcacagatgcgatcatttctttggtgctggtctttcccacacttccggtgacacctacgactttcagattaaggcttttccgatagtgctcggcaatatccttcaatgcctgttcacaggaggtgaccagaatgtatggataagaggcattttcaatccgtttttcggagagcgcacacagagcgccgtcccggatcgtctgcgggatgaacatgtgtccatccactcttgcaccgcgaatggcgataaacagacagtctttttctactttccggctgtcgatcacaacgctggaaacttctttataatagctttcatcatcgccgtaataaattccaccacaggcaacggcgatttctttcaatgtcatgtttttcataaacgttccatcctttattgtatttgcttactgatatcttgcttccatggatttctggatgatcagctcgcacagatctccgtattcaattccgtctgcaagtgcttcttttggaaggaggcttgcagaagtcatgcccggaagggtattcatttccaggcagtacagattgccgtctgcgtccaggataaagtcagcccggctgtatacgttcagcttcaatgcctggaaagcgcggactgtgagagctttcatgcgctctgcaatctcttcgctgatatcggcagggcatacttcttcagtcgcatttgcctgatatttgttggcatagtcaaaccatccgtttttgggaatgatttcgatcggaggaagtgcttttccatcgatcacgccgcatgcaaattcgcggcctttgatgtaagtttcgacgaccacttcgttttcataacggaaagaatttttcagtgcctgacggtattcctcttctgtatttacaatatatactccgatgctggagccgccggagcatggctttacaacgaccgggaaggaaagtcccagagattccagggaacagtcactgtcttctttatacaggcagactccggaaggtgtgtccacaccggcttccataaaaatctgtttggtgagtcctttatccatggcaacagcacatccaagcgagtcaggtcctgtgtagcggattccgagcagatcaaatgaagcctgcagctttccgttttctccttctccgccgtgaagtccgaggaaggtcatatctgccaggcggcagagttcgatgacattcggaccgaagaagcagtcagactggtccggacgggaagcttttacagctgcaagatccggctctgtttcggaaatattctttgcgatttccagaccgtgtccgggcagtgtaaagacgtcttccagattctcgggtgcgttctcaaggccgagaaatacgtccagaagaaatgcatcgtgtcctttctccagtaatgttttacagattccggcagcagaagcgagagaaacgtcgcgttctgtactgagtccaccggctaatacgataattttcatgatgatctcctatcttatttatttacttcatttaacagttttgcttttgtgtcatagagcttccgggacaaatccacataaactttgtgtggatataagagacgttttgtctcatcccagagagtctctttttcctgtttgcaatatgctgcgatctccatgacagaaggagaagtgtagacacattctccgtggatgaagattggttgtaacatctcacgcatcgtgtagcttccgcccggaagacgagtctttttccaggtttcgtttggatcgaataaaagcagttcttcggatgtgtcataggtttcgtccgcaaaacagatcagatccgcacgaagctttccggtctctttatcgtatacacgataaatggttttgtttcccggattcgtgattttttccgtattctctgaaatcttgatcttcggaaggaatttgccgtctttttcaatggcagccagtttgtaaacgccgccgaaggaagggcagtccttggaggtgatcagatgtgttccgactccccatgaggtgatcgctgcaccttggatcttcagatcattgatcagcatctcatccagatcgttggaagctgcgatcacggcatcctcaaatcctgcggcatccagcatgacacgtgcttttttggacaggtatgcgagatctccgctgtccagacgaatgccgtagctctttggatggataccggcgtccttcatttcacggaagacacggatcgcatttggaactccggattttaacgtgtcataggtgtccaccaaaagggtacatgcgtccggatataattcggcataggctttgaatgcggtgtactcgtccggaaaactcatgatccagctgtgggcatgggttcccatgatcgggacatcaaacatcttgccggcaagcacattagatgtgccgacacatccgccgatcatagcggctctggctccataaagtccggcatccggtccctgagcacggcggagaccaaattccatgacaccgtctccctgtgccgcatggacaacacgggctgtttttgtcgcgatcaggctctgatgattgatgatattcaagatcgcagtctccacaagctgtgcctccatgatcggagcgatgacttttaagatcggctccttcgggaagatcacacttccttccggaatcgcgtaaatatttccgctgaaatgaaatccactcagatagtggagaaagtcctcactgaaaatgccgagtccccgcaggtaatctacatcttcgtaagaaaaattcagatttttgatgtattcgatgacctgttccagaccggccatgatggagtagccgttttttaccggattctcccggaaaaatacatcaaagatcacggtttcgtttgcagactgtttttcaaaatagccctgcatcatggtcagctcatataaatctgtgagcaatgttaaattatctgctctcataaaaaatctccttttttaaatcagattaattctgcatttttattgatcgtttcctgaatgatattctgtacataagcaccgatgtgttttttgtcctccggtgcaagatcttttggatagatcggtgttccgtattctacgacaacattgacctttttgatccttggaaactgattttcaaagatcgcggcagtgttgttcatggaaatcggaacgatcgcacatcctgttttggcggcgatcttaaaagcgccctctttaaaaggaagcatactgagctcttcgcctttgtttctcgttccctcagggaaaatacagatggaaattccctgcttcacataatcgatcgcctgaaggatggttttcagtccctcttttggattctcacggtccagaaacagacagtatacaaagcgcatccaggtagataaaagtggaattttttccatctcctttttcgccacatatccggtcagtctcggacagcgggagtacgtcagaagaatatcaaagaaactgcggtgatttccgataaacagcacgggctcgtccggaatattttcgaatccgattacggtcgtgtgtacaccggttacttttaagattgctttgaatccccactgtacgattcgaagacaactgtagtctcttgcattgcggttgaactttccgatcagccattcaatgaaaaatactggaattgtcagaataagaaacagaataaggaaaacaacaacacaaataaaacgaatcatgttataaaccttctctcttagttttttagacgttgggggcaaagatgcctgacatctttttagtctagtacagattatactaaagcatcctgtgaaatacaagtttcgcggtcataaaaagacagaaatgttaataagataaatggaaagagggactccggagcagagggtgaacagaaaaagaaaaaataaaacattcaaaattgtggttttgtggatgatgattctgtcagcgatctggctgccctgcggctgtatccgcaaaaagccggagatcacaggggagaaaagtgcagcatttcagctgatgagtgaaagagaaatcccggaagaactaaaggaatggatggaacaggagaaagcccatccttttatgctgacatatgccgtggagcaggatatttacgctgccagaagctacggaccgcagaataagaccggatatcagatcaaggtcgatgccgtcctggagggggaaaaaacggtgcggatccagacaagtcttctgggaccggaaaaaggagagaaaacaaaggatgtcgtaacctatccgtatgtggtggtgaaattaaaaaagacagaaaaagaaattttatttgagtaggaggagtttatggagctgatacagaaaacaatccgttataatcaggaaggaaaaaaaacatttgaccagttttatctggacgaagattacaatgttccggatgcaaagcaggatgtgcggcgtatcatcaagggacagggaactgtcaagatcgaggatgtcaagctggtggaaaattatgtgcggatttccggaaagctgtatttccagattttgtatgtgacggatcagggagagccgatgccggcagtactggatggcaagattccgtttgaagaaatggtgtacacggagggagaagagcgcacccagtattttgtccggaatatccgggtagagttcggtacgaccctggtacactccagaaagatcagtatccgcgcgatgattgagatggaagtcggatgtgaaaatctcattgaagaagagacggcggtggatctggagagcagtgcttctatttacaagaagcagaaaccggtgaatctcttaaagctgcatactgcgaaaaaggatacataccgcatcaaagaagaaattacgatccccggaacaaaagagagcatcggtcaggtgcttctgacggatattacagggcgcaagctggaagtgcgggcagcacaggatgaactgcttctgcggggagaactgcagattttctgtatgtatctctcagaagaaggaaagaccgactggctggagcagagtgttccttatgagggacgaatcgaatgcagcggggcgacagaagggatgtattatgatgtgcagcacgcgctggaagatacactggcagatgtacggatggatgaggacggagagatgcgcatcatcgggattgagggaaccgtaagtcttcggatcaatctgtatgaagaggaagagctgaatcttctggaagatctgtactctctggaacagaaagtttcgtatcagacaagagaggcagtctatgaagaattgcttttacagaatcagtccaaatgcaagattgtagaaaacctgtcgcttccggagctgaaagacgatgttctgcagatctgtcacagctcgggaagtgtgcagatcgaacatgtggagacaagagcggaaaaacaggggggaatcctgattgaaggaatcctgcatgtgtcatttttgtatctgaaagcggatgatgcgcttccgtttggaaactggcagggaatggttccgttttcttatctgctggaatgtccggatatgccaaaagacgtgcggtatcagttatccaaccgagtggaacagatctcagtgaccatgactggcagtgattcagtagaagtaaaggcagttctggattttgatgtatttttaagaaaagaagtgccgatgcaggtcatcacagaagtgtctctggaggaaacagaccgggaggaactggcgaaaaaaccggggatcgtagggtatatggtaaaatccggggatgatctgtggacgctggcaaaacaatatatgacgaccgaggagagtatccgtcagatcaaccatctcgaaaatggaaaaatcaaaccgggcgataagctcatcatctgtaaagagatcggaatgtagagatatatcgttgatttttgaaggcaaaatgggtatactataaacacaaatgtatacaagatacaaacggaggacacaggatgaaacagatagaattaaaggcacttgccaagatcaatctgggactggacgtactgggaagaagagaaaatggatatcatgatgtgcggatgatcatgcagtccgtttatctgtatgatgatgttgtgatcgtgagaaaggatctgccgggcatagaagtggagacgaatctgcattttctgccgacggatgaaaataatatcgcgtataaggcggcagccatgctgatggaagaatttaagcttccgggcggcgtcaggattgttttgaacaagcacattcccgtagcggcaggtatggcaggggggagttccaatgcagcggcagttttgtttgggatgaacaagatgttccgtttgggcttaagtcagagatctctgatggagagaggtgtccgtctgggagcagatgttccgtattgtattatgagaggaacggtactggcagagggaattggagaggagctgactacacttcctgcacttccggcgtgtacggtactgatcgcaaaaccgccgatcagtgtttctaccaaagtggtatatgaggcactggatgcaaaagagatcgtggatcatccggacatagacgggatcatccgggggctggagacggggtctctttccgagattgccgctcatatgggcaatgtgctggaggatgttacgattgggatgtatccggtcattgaaaagatcaaggatgagatgaaaaaagcaggtgcgctcaatgcgatgatgagcgggagcggtcctaccgtattcgggatttttgaaagccgtgcggcagcgcgcagagcgcaggagcagatccgcaggaaggcactggcaaaacaggtatatgtgacaaatgtgcatggcgcaaggaggacataagatggaaccgaaattagaagtgacaatggatgaatatcttccgcttcgggatgtggtatttaagacactcaggcaggcgatcctgcgcggagaattaaagccgggagagcgtttgatggagatcaagctggcaaataagctgggtgtgagccgcacaccgatccgggaggcgatccgcaagctggagctggaaggtctcgtgctgatgatcccaagacgcggggcagaagtcgcagagattacggagaaaagtctgaatgatgtgctggaagtcagaaaggcactggaagagcttgcagttcagctggcttgtgagcggatggatgaagaaggactcgaagcgttgaagaaagcggcgaaggagtttgaagaatctctgggaagtgaggatgtgaccagaatcgcagaggctgatgtggcatatcatgatattatctgtcgttctacagacaatcagaggctgatgcagcttttgaataatttcagagaacagatgtaccgctacagagtagagtatctcaagaagaaagaatgttatccgcagcttttgagagaacatcaggcgatcatcgaggcgatcgagaagagtaataaagagacagcatctgagatcatgggacagcatattgagaatcaggtgactgcagtgacagattcattgagacataagtaagggcgtagtgaaggatttcttcactacgtcttaaattacggaaatttgtataaacttcctgtttttggtacatacttcggatatcaaaatgaaaccggaggagatacatatgaaattttcaaatcagaacaggaacagaatcattgcattgctgtccatgctggcagcgggaattctgatcggacagatctttagtacagcagagagaacagtacaggcaaaggtacaaaaggaactggcagatgaggtgctcagatttcatgtgctggcaaacagtgacagtaccctggatcaggagatgaagctgtgtgtacgcaatgagattttggaatttctgcagaccgagatgccaacaggtgcaggcgcagaagcgacaaaagagtgggtgcgttcccactgtgatgaaattgagcagactgcagaaaagtgccttacagaaaagggatacgatgatccggtcaatgcggctgtgacaaccacctattttccggaaaagaagtatcaggatatgacatttccggcaggaaattacgaagcactccgtgtggagatcggaagtgccaaaggtcacaactggtggggaatgctctatccggagctggcattttgggatgcagtgcatacggtaaatgaggagacgaaaagtgagagagacgggatcctgttgtcagaggaagaaaaaaagccggagaaagtaaaatttcgcttttacctgcaggagatatttcaaaaataaaacaacagaaggagacgaaagagaagtatgacggaatttttagtcagacattttgtgaaagactatgaagcggtagaaaaatctgcggtccgcactgcatatggagtgttggcgagtatggtggggattgtttgtaatgtatttctgtttcttgtgaagtttattgtggggcttttgctgcacagtgtttctgtcacagcagatgcgtttaacaacctgtcagatgcggcatcttcgatcatcagttttatcggggtgaagatggcgggcaagccggcggacaaggagcatccgttcggacacggaaggattgaatatatagcggctttgattgtatcatttctggtactggaagtgggatttacttttttgaaggattctgtttccaagatcagaaccccggaaaccttgaattttcagttgatttcggtagtgatcctgattttatccatcggagttaagctatggctcggtgtatttaataaaaagctgggaaagaagattgattccaaggtgatgatggcagtctttacagattctatgggagatgtgatcacgaccagtgcaacgattttgtctttggtgatcttccggctgaccgggcttaatattgatgggattgtggggatcggagtcgctctggtagttatgtgggccggtgtcggaattgcaaaagacacgctggagcctctgatcggagaagcaatcgatccggaagaatatgataaagtcaagcattttgtagagcgttatcagggaattgagggaactcatgatctgatcatacataattacggaccgaatcaaagtatggcatccattcatgcggaagtgccaaacgacgcggatattgaggaagcccatgagctgatcgatcggatcgaacgggatgcggtggatgagctgggaattcttctggtgattcatatggatccgatcgagatgagggatgaacaggtgatgacggtgagaggagaagtggaagccgcattaaaggaactggattctcagtgcagcattcatgatctgcgtgttgtcaacgggatggggcagatcaatctgatctttgatatggtcgtaccatttgaatatgatgaggaagaaaaaaataatctgcagcttcaattgatggaaaagctgcaggagattgataaaagatatcagtgtgtcattacgatggaacacagctataaggcacacgtataaggaacaggaactgttcgggaaggaagaaaagatgtacacatttgacagcagagtaagatacagtgagatcgatcataccgggaatatgaccctgccggcactgatcaattattttcaggactgcagtacgtttcagtctgaggatatcgggttgggcacagaggtgttaaaggcaaagaaaaaagcatggattttgtcttactggcagatcgtgatcgaacgtctgccggcattgggagagcgtattacagcaggaacctttgcgacggaatttaaaggcttgtatggaaaccggaattttgtgctcgatgatgcccggggaaaccggcttgcgtatgccaattctgtgtgggtgtttatggatatggaaaaaggaagaccggcaagacctgagccggaagatgtacttccatatggatcagagcctgcgcttgagatggagtatgaagacagaaagatccgtcttccggagaatctggaggaaaaaccatcgtttccggtgagaaagtatcacattgataccaacgagcatgtgaataattgtcagtatgtacagatggctctggaggttttgccggaagagacaagagtccgtcagattcgggtggaatacaagaaatcagcagttcttggagatgtgatctttccgaaagtggcaagagaggaaaatcgtattgtgacagaattgtgcgatgaaaacggaaaaccgtatgcagtgattgaaatcaagtaagggaccatgttatactgttcaaagaacggtgaagaggagattttaaatgaaattaggagaaaagcaggttttaactgttgtaaagattgtagattttggtgtgtatctgggaaatgatgaagaacgtgtacttcttccgaaaaagcaggtaccggaaggaattgaaccgggggatccggtggaagtatttttgtaccgggattcatctgaccgtctgatcgcgacgacgaatgagccgaagctgactatgggacatctggcagttctggaagtggcagatacaggaaagatgggagcttttctggaatggggactggaaaaagatctgttccttccatttaaagaacagacagcaaaggtacagaaaggagataagtgccttgttgcattgtacgtagacaagagcggaagactctgcgccaccatgaaagtttatcatatgctgcgtacagactcgccgtatcagaaagacgatcaggtaaaaggaattgtatacgacagaagtgatgagtttggagtttttgttgcggtggatcatcagttttctgcaagaatcccgaaaaaggatgtttttggaaaaatccgcatcggtgatgagatcgaagcgcgtgtgacaaatgtaaaggaagatggaaagctggatttaagtgtcagagggaagattccgcagcagatggatgcagatgcagaactgatcttgaaaagaatccagtcttatgacggagtactgccgtttaatgacaaggcagatccggatacgatcaaggcagagtttggtatgagcaaggctgcatttaagcgtgccgtcggaagactgctgaaagaaaaccgcgtaaaaatctttccggacagtatccgaattcgctaaaaagccttgcaatccatggtaaataggctataatgaagaaagaaatagagaagaaaggggacagatagaaatgaaagtacagaatattacagacatagacgcattttttaaagtagtagacaactgcaaaggaagagtagaactggtaacaggagagggagacagactgaacctgaaatccaaactttcccagtatgtatctatggcaaatattttctcaaacggagagattccggagcttgagatcattgcttatgagccggaagatacagaaagactgatcaattttatgatcaacggtgaataagaatatctcagattttgaatcgccggttttgacagacacgagaagatgtaagggcagttctctgtaagggaacgccctttttagatttacagcaatactggatatagaggtgaattatgagttttgcgcatttacacgtccatacggagtacagtcttttggacggttccaacaaaataaaagaatatgtatccagagttaaagaactgggcatgaacagtgctgcgatcacggaccacggggttatgtacggtgtgatcgatttttacagggaagccagaaagcagggaatcaagccgattctcggctgtgaagtttatgtggcgccgaattcccggtttgaccgtgagactgccggtggagagagcagatatcatcatctggtacttctggcagaaaacaatacgggatatgccaatctgatgaagatcgtttccagaggatttacagaagggtattattataagccccgtgtggataaggatcttctgcgtcagtatcacgagggaatcattgccttaagtgcctgtcttgcgggggaggtacagcggtatctgagccggggacttaccgaagaggcgaagaaggtggcgctggagtatcaggatattttcggaaaaggaaatttctttctggaaatgcaggatcacgggatcccggagcagcagcttgtaaaccagagacagatccagctttctaaggagacagggatcgagcttgttgtgaccaatgatatccattatacgtacgcggaagatgcgaagccgcatgatatcctgctctgtattcagaccgggaagaagctggacgatgagaacaggatgcggtatgagggcggccagtattatgtaaagtcccctcaggagatggaagcgctgtttccatatgcaaaacaggcactggagaatacgcagaagattgcaaaccggtgtgaggtagagattgaattcggagtcacaaagctgccaaagtatgatgtgccggacggcatgacttcctgggagtatttgaacaagttatgctgggaaggacttgaaaagcattatggagagccttccagggagctgaaagaacggctgcgctatgagctggatacgatccgcaacatgggatatgtagattatttcctcattgtatgggattttatcaaatatgccaaagatcacgggatcgcagtaggaccggggcgtggctccgcagcgggaagtattgtttcttattgtctggagatcacaaatatcgacccgatccggtatcagcttctgtttgagcgttttctcaacccggagcgtgtgaccatgcccgatatcgacgtggatttctgcttcgagagacggcaggaggtgatcgactatgttgtgcgtaagtatggaaaagaccgggtagtccagattgtgacgtttggtacgctggctgccagaggtgtgatccgtgatgtgggacgcgtgatggatcttccgtatgcatttgtggattcgattgccaagatgattccgcaggaactcaatatcacgattgataaagcactgcagatgaatccggaattacgtaaaacatatgaaaatgatccgcaggtaaaactgttgatcgacatgtgcaaacgactggaaggactgccgcgccacagctccatgcatgcggcaggggttgtgatcggtcagagagaaattgatgattttgttcccctttcaagagcttctgacggctcgatcacaactcagtttacaatgaccactctggaagaactgggacttttaaaaatggacttcctgggacttcggacgctgactgtgatccagaatgcggtgcagcttgcaaaaagcaaaaatccggaacttgatatggatcagattgactataacgacaaacaggtactttcttatatcggaaccggtaagaccgatggaatcttccagctggagagcggcggaatgaaaggcttcatgaaagagctcaagccaaacagtctggaggatattattgccggtatttccctgtaccgtccgggtccgatggactttatcccacagtatatccggggaaaaaatgatgcaggatcgatcacctatgactgtccgcagctggagccgattctggcgcctacttacggatgtattgtctatcaggagcaggttatgcagatcgtgcgtgaccttgccggatacacactgggacgaagcgatcttcttcgccgtgccatgtccaagaaaaagggcgatgtgatgcagaaagagcgccagatctttgtctatggagatgaggagaacggtgtgccgggctgtattaaaaatggaattgatgaaaagacagccaataagatctatgatgaaatgatcgattttgcgaagtatgcattcaacaaatcccatgcggcggcctatgcggttgtttcctatcagacagcatacctgaaatattattatccggtggaatacatggcagcactgatgacttctgtgattgaaaatccgtccaaagtggcagaatatatttatgcctgccggcagatgaatattcagattctgtcaccggatattaaccgcgggatcggcaacttttcggtagacggcaacaacatccggtacggactggcggccatcaagagcattggaagaccggtgatcgctgcgatcatagaagatcgggatgagtttgggccgtttaaaaatctggaagattttatcagtcggatgtcagtcaaggatggactgaataaacgggcaattgagcatttgatcaaatcaggtgcgctggactgcctgggaggcacgagaaagcagtttatgagcatttatgttcagatcgtcgatcacgtcaatcaggaaaagaaatatgccatgaccggtcagatgacactgtttgatatggtgggtgaggaagaaaaagagcagtttgaaatcaaactgccggatgtcggggagtattcgaaagagaatctgctggcgtttgaaaaggaagtgctgggagtttacttaagcggacatccattgcaggagtatgaggacaaatggagaaaatccatttcagccaccacactggatttccagccggatgaagagacaggccgggcaaaggtgcatgacggaacgagggagatcgtaggcggcatgattaccgcaaaaacgatcaagcatacaaagacaaatcagatgatggcatttttgtctctggaagacctggtgggaacggtagaggtgatcgtcttcccgcgggactatgaaaaaaacagagagtatctggagattgataaaaaaatctttgtaaagggaagagtatccgaggaagaggagcggccgagcaagctgatctgtgagacgatcattccgtttgagcagaccaaaaaagagctgtgggtgcagttttcagataaagaagattttctgcgaaatgagcatattttatatggatacctggcagactcggaaggagatgacgaggttgtgatctattgtcagaaagagcgggcgatcaagcggcttccgagaaacagaaacattcggatcggccaggaagtattgagcagattgatgaatcattacggggaaaagcgagtaaaagtcgtagaaaaatctattgataaaggaatataaataaggtagaatatacccggagtgttaaaaaataggcaaactttacttttgaagagtagaagaattcagaaaggtggaaaagttatggcaaacaaagcagacaaagaaaaaatgttagaagagattgaagatagagttcgtaccattggagtacttacaagtggtggagatgcaccgggaatgaacgctgcgatccgtgcagttgtaagaagagctcttgcaaaaggactgaaggtacgcggaatcagaagaggatatcacggacttttaaaagaagagatcattgatttgacggcacgcgatgtgtctgatatcatccagagaggtggtacaattcttcagacagcacgctgccagacaatgcgtacagaagaaggacagcagaaagcagcagcaatttgtaaaaaatacggaattgacggtcttgtagtaatcggaggagacggatcttttgccggagcacagaagctggcgaacctcggagtaaatacgattgctcttccgggaacgatcgatcttgacattgcatgtacagattatacgattggatttgatacagctgtcaatacagctatggaagcgatcgataaggtccgtgatacatctacttcacacgagagatgcagtatcattgaggtaatgggacgtgatgcaggataccttgcgttgtggtgcggtattgccaacggagcagaaaagattcttcttccggaagaaaaagactatgatgagcaggcgttgatcgaagatattttggagaacaaaaaacgcggtaaaaagaattacatcatcatcaatgcagagggaatcggtgattccatcaatatggcgaagagaattgaagaagcaacaggaatcgagacaagagcaacaatcctcggacacatgcagcgaggaggaagcccgacatgtaaagacagagtatatgcgtctacaatgggggcactggcagttgacttactgtgcgaaggaaaatccaaccgtgtcattggatatcaggatggaaaatatgtagatttcgatattgatcaggcattgtccatgaagaagacaattccggagtatcagtataaaatcgcaaaatcatttgcaatctaggagagaaaaattatgagtatggaatgtgagaagaaaaaggctccgatcggagtatttgattccggtgtagggggacttactgttgtacgggagataacacggcagctgccgcatgaaaatattgtatattttggtgacactgcccgcgttccatacggaagtaaatctaagagcaatattattcgcttttctgagcagatcatccgttttctcaaaacaaaacaggtcaaagccattgtcattgcctgcaatacggcaagtgcactggctttggatgctgttcgggatgaatttgatattccaatcattggtgtgatcgttccgggagcaagggcggcagtagaagctacggcaaacggagagatcggtgtggtaggaacggatgcaacggtgaagagcggtacttatacaaaggtgattcatcagatggatccgaatatccatgtgagggagaaagcctgcccgctgtttgtccctcttgtggaagaaggattcaaagaacatgtggtcacagaagaggttattgaatattatctggaatcgttaaagcatacagagatcgatgcgatgatcttaggatgtacccattatccgcttttacgttccaagatccgttcttatatgggagaacgaatccagatcgtcaatccggcctatgagaccgccatggatctcaaacggcttcttcagagtgaagatatggaaaatgacggggaagagggcacaagtagcaaatatgaattttatgtcagcgatgcggcggaaaagtttgtaaattttgcaaatacagtgatgccgtttgatatttcgaaagcaaatattgtgaatatagaagaatattaggggaacacagatgacaaaggatgtattggtcagtatttcagggctgcatatggatatggacgcccagattccgggaccggatgaggatgatgtgatcgaagttgtgacaccggctacttactactacagaaatggaaaacattatatcatctatgatgagatcgtagaaggagtcagtgacacgatcaagaataaaatcaaaatatcaggaacagacagtcttgagattatgaaaagcggattatcgaatacacatatgatatttgagaaaaacaagaagaatctgacatattacaaaacactatatggtcagatgctggtaggattgaataccagaaatatggaaattgaagtttcggatgaaacgattaaagtacgggtggattatgaactggatgtgaatcatgaaccgcttgcgaattgtaagatccgaatgaatattgtatccaaaggcagcgggattgctgtataaaaaagagcactgcagcgcagattttctgccggcaatgctctttgtcttatttgttgtcttttttgaatcttgcaaaaaagccttttttctttgctttttccggagcctcgagtggtccgcgaacaccttttacagcagtgatgtagatgccgcttacggtggctttgacttctttcttgattgggatgaggtcaaagatcttagcatcacacatcaaagtcatcactcttggtccgacttttgcttttacaacaggtactttggtacgtctcaaatattttggcgtattctccagcactgcggaaggaagattggcttctttgagtttcattttctttttatcgatgatcagcatgttgacagtctgcgccatggcatccatctgttcctgctgtgctgcctgcttcttctctgctttttttccgaagaaataaaggccgacgagtacaccgatcagaatcacaagtacaacgatcagtacgatccatcctgtagacacgataaaaccctcctaaaattctcttttttcataattatgcatgtaatattgtaacattgtttccctggaagtgcaagagatttggacggcagggctttacttttcttggagaaaacaggtatactaaggaaatgagaaaaagataggggagaggtatttatggcagaaacgatatggaacagtgcagtcagtgtgtatcattttatgatggacaatctggttgtgattaatattttgctttctctggtcattgtgttttttcagagaagatctccgcagacggtatggacctggctgttattgctgtattttataccgattctcggatttgtcctgtatctgctgatcgggcaggattttcataaaagcaggatgtttaaggcaaaagagattgaaggagagataaaatatgctgtgcgcaggcaggaagagacgatatacagacgtaggctccgcctgacgaatccagcggtggcaagatatcgggatctgattttatataatctggaagcagggcaggctgttttgacagataataacgatgtgcggatctataccgatggaaaggaaaaattcaaagcgctgctggaagagatgcaaaaagcaaaaaaatatattcattttcagtattatattatccgtaatgatgaattgtggcagcatattgagccggtgctgatcaaaagggcgaaagagggagttgaggtccgcattttgtttgacagtatgggctgtcgagggatgcataaccgggactgggaacgtctggagaaggaaggaatccacgtggcagaatttttcccggcgctgtttggaaatcttcagcttcgaatgaactaccggaatcaccgcaagattgtcgtgatagacggcagggtcggatttgtgggtggtttcaatgtaggaagggaatatctgggactggacaaaaagaagttcggttactggagggacacccatctttgtatcgaaggggcagccgtaacctctctggccgtacggtttgtactggattggaattatgcggcaaaggaaaatctgtttcaggaggataccttatttgagattccgaagtatgagcgggagggaagagacccggtgcagattatttccagtggtccggactcgcagatcaaaacaatccatgacaattatctgcgactgattcacagcgcaaaagatcatgtatatctgcagacaccgtattttattccggatgattcgattctggatgcattgaagattgccgcccgttccggtgtggatgtaaggattatgattccgtgcaagccggatcatccgtttgtatactgggcgacctattcctatattggtgaaatggtggaggccggagcaaaatgttatgtgtatgacaacggatttctgcatgcaaagacagtgatggtggatggaaccgtagcgtgtgtgggaactgccaatatggattttcgcagctttggattgaactttgaagtcaatgcagtggtatacagcgaggagacaacgcagaaattggagcagagctttgaaaatgatatgacaaaatctacacagatcacgagaaatgcgtatcaccagagaagtcttatcatccggggaaaagagcagttttcaagattgctgtcaccgcttttataaacagacagaaaaaacagtgaaaatcttatgaactcttaagaaaaatgtacgtctcattcaacagaatgtggtataataaaaaacaggctgtcaaaaagacaggcagaggatcatataggaaatggaagggcaagaagatgaaaaagaagttaattgcagtaattgcaggtgtattcctgatgggatcactgacagggtgttccagtcagttatccaatgagtatattacgattaaacagtacaagggactggaagtgccgcaggtggaagcaactgaactgacagatgatcaggtgacgaattatgtgaattattttctgcaggcagatgcaaccagaacagaggtgacagaccgtgcagcgcagacaggggatacagtcaatattgattatgtcggaaaagtagacggtgtggaatttcagggtggttctgcccagggaacagacctggagcttggttccggttcttttatcggtgcaaacggagactaccagggatttgaagaccagattgtcggtcataacaaaggagagcagtttgacattacggtacagttcccggatacgtatatgaatacagaaatggccggaaaagtcgcagtgtttaccattactttaaatggcatttatacagtagatgtgccgaagctgacagataagtgggtcaaagagaacagtgtagaagcgacaactgtaaaggaatataaaaaagagatcaaagaaaaaatcgaaaaccagcagatgtaccagaatcttttgaatgctctggtggatcagatcgaagtgaaaaaagatcttccgaaagataaagtaaaagagcagaaagaggcgatcataaaccagtatgagagtacagcagaatactatcagatggagctgggagattatttgactcagtacatgggaatgacagaagatcagtttaaagagaaggcacagacagtagcagagaataccgtgagaaatcagatggcagtagagcttctctgtgagaaaaagaatttagaacctacagataaagagtatgagatcgggctgaagcagtatgcagcacttgccggatatcgtacagatcagattgcggaatatgaagagaaaaacggaaaagaaaacatcgagcagtccatcatgcaggaaaaagctgccaagtatctgcagaagagttgtgttcaggtagagcaggaagacgaaacgacgaatgaaaatgcgaaagatacacagaacagcacaacagagaacaaagatcagaataccgatcagagttcggacgagagttcagatcagagcagtacagataatgcacaggaataaaaagagagcgccggaaaacagattttgtttttccggtgctttctggttgtactgacaggcagaatggtgtacagttgtagtagacgaatgaaaagaagcggagggagttttatgaaattggaaaacgcatgcctttgtgtggaaatcgcagaaaaaggcgcagaactgacaagaatttttaacaaaaagacaggagcagagatcttgtggaacggaaatcctgaattttggaaccggcattctccgatcctgttcccaaatgtagggaagacacacggaaatactgttctgatcaaaggaacacagtatccgacgtctcagcatggatttgcaagagacagccagtttcgttgtgtaaaatctgcagcagaggaagcgcagtttttattttgttcgaatgaagagacgagagaagtgtatccctatgactttgagctgtatatcacataccgtctggatggaaaaaatatttttgtagactggaaagtaaaaaatccatcagaagaaacgatttactttacgatcggagcacatccggcatttatgtttgaaggcgcaaaggagacgaaagacgactatcttctgtggttttcgaagatggaaacgctggaatgctgcgggctgaatctggaatgcggaacaggcctgccggaagaaagctattctctggaactggaggacggctatctgcagctttccgaaaaattgtttggggtggatacactgatctgtgatgattatcagttaaaagaagtatggctgtgcaaaaaggatggaagaaagccatatgtaggcgtaaagagtgaaggattttacagttacggaatctggtcaccgaagaatgcgccgttcgtatgtctggagccatgggcaggccgttgtgatgatactggatttgataaagatatttctgaaaagaagggaatcaatgcggtgcagccgggagagatatttgaaaaaggataccagattctggtgggatagtggtgcagcatgaaaaagacaaatgattttggaagggattcagttccacttttagtattaaagacatcaattccttttatgtttgcccagttcgtcaatgtgctctacagtattgtagaccggatctatatcggaaatattccggggatcggcggggattcccttgcaggcgccggagtatgtgctccgatcattacgcttttgtcttcgtttgctgctctgatcggaatcggaggatcggttacgttttcggtgaaactgggggcaggagataagaagagcgcacaacggatattggcgaatagtttttccatgctgcttatattttccgcagtgctgacagttgtgtttttgctgatcaaggattttttactgaactggttcggtgccagtgaagtgacgtttccatatgcgaatacatatctgacgatttatactctgggaacattttttgcccttgtgtctatgggcatgaactattttattacagcgcagggatttccgtttctgggaatggcaactacattgatcggagcagtggtaaacattgtgctggacccgatttttatttttgtatttgaaatggatattgcaggagcggctgttgcgacagtcatcgcacagctttcgtcctgtatttttgtacttttgactttacacagtaagaagatgcagattccgatccatcttgtaaagccggagtgggagattgggaaacgaatctgtaaaatcggtttttcgccatttttgatccttgcgacagacagtgtgatcatcattgcattgaatgctgtacttcagtattatggcggcgaatctcagggagatacgctgatcacggcagcaacgatcgtacagagctatatgcttttgattacctctccgatgcttggaattacgggaggatcacagcctttgatcagttttaattacggtgcgaacaaaccggatcgtatccgtaagacagtgaagtgggtattggtgctatgtattacatttacaacggtgatgttccttgtatccagaattctgccgcagtattttgtgcagatttttacagacaatgcaagataccgggaactgtccatatggggaatccaggtgtttacattgatggtgatcccactcagcctccagtatgtgtttgtggatgcgctgacggcgcttgggatgacaaggctttcccttagcttgtcactgtttcgaaagattgtgtattttgtgatgacatgtgtcctgccgatcgcgtttgcggcgaagagtgcattttatgcagagcccctcgcggatggagcggcagcatgtctgaccagtctggtgttctttgtgatttacagaaagtatctgaaaggagaaggcagactgggagagatacggttgtaaagaaggttggaatatcaaaaaaatcagaaaacaggaggaaaatgcaatgttacaaacaggaacaaaagctccggaatttacacttccggatcagaatggagagttacacagtttaaaagattacagagggaaaagagttcttttgtatttctatccaagggataatacaccggggtgtacaaagcaggcttgcggatacagcgaacgttatccgcagtttgaagaaaaaggtgtggtaattcttggaatcagcaaagacagtgttgcgtcgcataaaagatttgaagaaaaacaaggtctgacgattacattgctttctgatacggaattagaagtgattcaggcatatgatgtctggaaagagaaaaagaattacggaaaagtatccatgggagtagtaagaacgacctatctgattgatgaagagggtgtgatcattcaggcaaacgataaagtgaaggcagcagaagatccggagaagatgctggcggagatttcataggggccgatacagtatattgggatacggggacaataaaataaggacagatgtgcgggcgtgttagagttaacacgtccgttttgatgtataattcgcgaaatttacacggtcttttctgaaacaaataacaaataattccgtaaatgagtattgctatcacattagcgtgatgaaatatactcatttacacggagaaaggaaagaccgtgatgaaaaaaaataatgaagtaagtcaaattgtagggtatactgtgtatatgattgcacataggaggaaatgagaaaatgatagaaaagaagaatgtgaaaaaactggcatgggtggcagtggcacttgtgataatggtcctttcgatgactgttgtttcaaaagcggcaagcaatccggaaaaccataaaaaaacgatagaggcactggatgagaagaaggcagatattctaaaactaacagcaacatcagcggcagcatcaacagccattgcggcaattcccggagatgcgacaacaccgatagcaaataagctgacagatttaacatcatattttctgattattctggtcgttatatttttggaaaagtatttggtgacacttaccggatatgcaacgttttctatattgattccggcagcgtgtgttttgttcgcggcaggaatcggatttaatcgaacggttttgaaaatattggcagcaaaaatagcagcattcggtcttgttatatttatgattattccattcagcatgaatgtttcggcaatgatagaaaaaacatatgagtcaacgatggaagagactgtaaaggaagcacaggatataacgaatgaaattgagaaaaatacagattcagaaggtaacatcatagagaaagcattatcgaaaatcaaagatggaatttcaggattgttggaaaaaggggaagaacttttaaatcaatttattgagttgatcgcggtgatgttggttacatcttgtcttattccaatttttatattcttgtttatgatctggtttattcggatgttatttggagtacagatcaatgtgccgaaaggggtatcaaagcagattgctgcaaaaatgccagggcgtaaaaaagtaagaaacgatttaaattgagtgaataaaggaaaagtcgggagagattccgactttttatgatgtagacccgagtgatagagatgaatatattgcgttagacgactatttttagttatttaaaaatagcgcgaataagagaattacaaaagattgtgcaggatcttggggcaaaacattttagagtaacatacaaagaagaaaatgtaccggaaatacaacgatagtaagtgaagtacacaatgaatttgctgctttgagtactggagaaacatgaaaaccattaaaaatcttcgaatagttttaaaaatttgggtatcattctgggtgtctggtgttatcttttatttatagcatgagcctacggtttttaattgtttttgagtaactcaattctaccaaaccggatggcatccatactattttttacgccctcaattattggattttcaaggtgtatacgaacttattgaaatgcaaagtttgagtaattaaaagggattctttggaaatttaataaatagtttattgcttttcatatactgtcatattatacttgaatcatctaaactttctgataaatttctaaatgatttctagaaggtcaagaccgttcggtcagatatttcagaaaaaatttaactgaacaaagaggcaagtaaatatgatggaaaagcagttgtacaatagacaatatttctttataatgaaaatatcaaaaaagaacatcatgtatgattgtgttttccacaccgtggaaaggagcagttatatgtgtaagaaaacgaaagaacagaagtttattatgttacctagcgtggatttttgttttcaggagctgatggaagatgaagaagtgcgccgaggatttataggtgcgtttcttcggattccaccggaagagattctggatatggaattacttccgaagaagcttcgtaagaaatataaggaagagaagtacggaatcctggatgtgcgagttcgtctaagagagggagagcagctaaacattgaaatgcagtctattgcctatgattactggcaggagcggtctttgttttatcttgggaaaatgtatgtagaccagatccacgaaggggaagattatgataagttgaagaaatgtatccatgtagggattctggattttacactgtttgaacatgagagatattattcttgttttcatatctgggaggatacgatacgggacatgtattccgacaaattcgagattcatgtacttgagctgccaaagcttgcgaagtatgaatatccacagacagaactccttcgatgggcacaatttttcggtgcaaggagcagggaggaaattgaagtgttggcagaaaaagatgaatatatccataaagcatatgataaattggaagaaatcagtgcagacgaggaaaaacgattagaatatgaggaacgacaaaaggcaatccgggatcatcgccatatgttagctagtggaaggcgcgaaggattacgtgaaggattacgtgaaggaaaacatgagcacgcagtggaaatggcgcgtaagatgttggaggataagttgccgatagaaaagatcgcggagtattccggattatcaccggaagatgtgcacaggttggaagaacaatgaatacaaagcagaatttgattcttgcacagtacaggtattcattcaccatcttggtaattaagtagacaagcaaaaatgaggctggtgtaaagcaaaataatctgcgttcccggcctcatttttacatgaaatattgaaaatgagtctgttatttttatttcaaattggagatggtgaacgtaacctctaacatattttcatctttatagtctgcattctggaaagaaaaagattcttttttctgcagaccttcgatcatcggctctgcttcgctccactgattgatcagatccatctgaaggctgcctttttcagagaaaacctcatcatttttattttcttttaccgtgtaatccgttccattaaaaagaaccttgtcaattacaatctgagcattggtaaagtcggattttgtctgatttccaagttcaacgtcacagtcttttaaagcaatggttgtaatgtttaaaagcatatctttatcacctttcagtttcagagtataggtgccgccttttttggtaattcttgcagtgttatcactttgaatggtcgtccagtatttactgtctgacacatacaggcggacggacatcagagtgctgttttgagatgctttctgaccaaaaccttccataatggcatcaataatgacaggctgtgtgacttcacatgttgtacgatcaaataagccgaatccgtggacaccattgtatccattgtcccagtacattggaatacatccgtttttacgactcagctggcacaattttcgggcaaaatatgcacggtaatattcgttttcactgtcataggatgttttgtcgatagagccgtattcaccgatgaaaacagggtatcccttgtctgcaaatgttgttttcatcagatttaactgatttttcatgtaagtttcgtcacaggttgtacttgttttggaaggatcatccgcttcgttgcctcattgagtgatcacaccgttttctccgccacagaagtcccaaggagaataatagtgaacagaaatcataattcgttgttcttctttatcgattggtttgtcgcggtattgatccgtaggaagtttaaaaccgtaatctccggcggtatagtcaatatttgtgttccagccgggaataatcagccaacgctttgtattgttatctcctgtttcccgaacagtatcaacgaatatctggttgtagtcattaatattttgatagtactctttattcggttcagaataactgccgtcaaattcttcattcatggactcgaacagtaagtgctcatcgtaatttttaaatctttctgcaatttgcttccatacctttttatattttttcttaatctctgtttgattttttccattgcacaaaagccagctgccatcgatggtattatagccatctccgtgaatgttgatcactgcatataagtcatttttaatgcagtagtctacaacttcctgtacacgatccagccatttgctgtcaatcgtataatctttgtcatcgtcgattttggcaaaataggatacagggatacggatcgatttaaagcctgcagcctttacactttgaatgagtttttctgtgattacaggatttccccagtttgtttcctccggaacgttgtcagtgacactttccagctgatttcctaaattccagccaggtcccattgcttctactatttgagactggtttaaatcttcaaaagatgtggtgtcctttttcgctgcctgaacagaaaatggagctgtgaagcttcctgcgacaactgtgccaaccagtacggcggctataaacatggatcgtaaacgatttttcatagtgccctcctacataaaaaatttactcttcttgttatccttcagatcgcgcgtgtttgaaaaactggaagaattgtttttataatatcatggttttttggcgtgtaatactataaaaattggtaaaatattacaataaaattttgaggttttgaagtgtggagaatggggaaaaagtaatgactgcaggggaattccggtctttttgtcactcattttcttgagttacagatgaaaagcagttaaaatgaaggataggaaggagatataatagtatgggaaattgcagaaatgtaacaaatactttttcggaagaaagaagacattattcgaatacgtatttagaaatatgcgaggtatatgatgaagctgtagaagtgagcgtattttcagcagttgctacaaaaggattatgaagaaaataaagaactatcaggtgaatttataagaatgtttgtagatacatatgggctatgcttatcaaatgatgtactttttgatgagtcatcgttgtttggtttgttttaaagatacgagtaaagggaggataatagaatggcgaagcaggaaaaagattatcttgccattgctaaataataggaggttttggatgaatgaaaagaaaaagaaaattatgaagttgagcataccttagattttggaacaataatagaagacttagggatattgtgccgaaaaaaacggaggcatgttatgagattatatcatggaagtatattgtaattgatagtataaatcatgtggtggaacttgcctgaattatttacaatcgaatagatacagaaaaatgaaacaggttcagattagttgttgtagatatcaaaagaaatatagacgaatcggagtgtacattccgcatactgtctcttagccctgcatagattgtataaacaaattatacaggggtttccatgaaagattatatcgaggagagggccgttgagatcgcaacttatataatagaaaataatgcgacagtgaggcagacagcgaagcagtttgggattagtaagagtacggtgcacaaggatgtgacagaaagattacttcaggttcggccgatactggcggcaaaggcgcgaaaagtgttggatatgaacaaatcagagcgtcacatacgcggtggactggctacaaaggaaaaatatttacaccagcatgagaagaacaagagctgacataggaatgtgtgctataataaggaagaaagtcagcaggtatgctgagaataaaaagtaagatacaggagaagctaattgagacaaggaaaaaacgggcaaatacgaggcaccctgaaacgcagattaatgacaaattttcttttgacagcattgattccggttttgatctttgcaattatctcgcagatcaatatacagcagcgattaaaagaaaatctatcagaccgaataaagagtaatctggatacggcagagaaaaatctggagatggttctggataagtacgagacaatcttatatgatttcagcacggatgaagatgttctggaaattgtaagagcattgaacgagagccggggggatcgtgagagtaacagcaccagtctcaggaaaaaactgagtcatatttgcaatcagtttaccggagtggaagggatcacgatacagttaaagacgggagagatcatatattatgagagtctttcgtcattttctggaagtgagacgtgggcagataaggttgagattccgaaaatagaacggggggctgtttatttcggagatggaaagccagtgaagattgctgacaagaatcattatatgttttatattgcaagaaatattacagactatcgtattatcgagaattttcagggaacggtcgtattaagtgtcaatgaggagagaattcgcagagcaattgcatcggatattggttccagagaatatctgctgagcgacgatgtgattgtgagtgcgcctgatccaaagaagatcgggaagaagctcagtgagatacaggattccgaaaattaccagtatacgacagcagatcatgaaatcagcggatttgcaatctgcaatgagcagccacttgcgtattactggaaaatgtccgtcagtcaatggatttatctgtttatcattatcagcatgacgatcgtgatcatgttcatattgcttcattttttcagcagaccatacattcaggcggtagaatcaattaccggcgtaatgagttgtgtagaacagggtgagtttgatcatcaggtgagagtgaacccgcatctgcctatggagatacaacagatcagttcaggatttaatgagatggttgcacatctggagatgttgattgcaaaagtaaaacaggcggttctggatcagaaaaatgcagaattgtcagccctggaggcacagatcgatcctcattttctctataatacgctggatacgatcaactggaaggcgattgaaaatgagcagtatgagattagtggaatggttggtgcacttgcggacattctgcgttatacagtgaaaaatgcaggaggaacagcgagtatcagcgaagaaattgcctggctgaagcaatatattatgctgcagagtgcaaaattcggaaagcgtctggatgtaaagatttatatgccggaagatgtgaaggaatgcagaatccacaaattgcttttacagccgtttgtggagaatacgatcaaatatgcgtttgcagatcaggaagagtgtgctttgaatatccgcatgaagaaaagcggagaacagctgcatattctgatccaggacaatggacagggaatggatccggacatggtagccaaacttaatcaggacgagtgcgagatggaaggacatcttggaattgcaaatgtaagaaagcgcctgaaattgtattatgggggacaggcagcattatattttgaaagtgaagttggaaactatacaaaagtacacttatttataccgatagaggaggaaactacatgcgtattgtagtggttgaggatgaagcgccgattcgtgaaggaatggcaaagcttctaagcaagatcaatccggaatatgagctggtaggaaaagcggcggatggggaagccggctatcagctgattcgtgaactgaatccggatctggtcattatggatattcggatgcccaaaatggatgggattgccatgatgaagaaattgcgggaggaaaatataaaatgtaaagccattatcctttcggcatattcggaatttcagtatgcccaaaaggcgattgaactcaaagcagacagctatctgctgaagccgattaagattccggaattgaaaagtgccttaaaacaggcagagagagaaatctcagaggatcaggggacagagcagattttttccgtggaaaatattatgttggcctgtatgcatggtcaggtgcgccagaattcacaattaaataaaacaatgcagcaaaaatacggtgtttctctggaagaaccggcagaactttttggtgtgtggctaggggacagttacagaaaacagaagtcgttgaccaggcagattttggaaacggtgggggatcacgctatacattataagtcctgcattttggaatccgacagctggcagctgttgacgatggtgatttatcagctgaaagacggagcgtcccagaaagagcgatttgaaaagtccgttgtcccaatggtttgcagtcagctggaaactccggtggtctgcttctggaaaacggtagaacggctgttggatatgccgtctgcattgcaggaaatccgtgtacagagagaatggaatctgatgtttccgaaaggaacactgatcagcaacgagttgattgagcagcagcatccggtaccgttaaaatatcctgtggaattggaagaaaaggcaaaacaggcggttttacaggagaacaaaaaggaattaaaaaaatgtttctgggaactggcgaactgctatcaagaagagtttcatacaccgacagatatcaaacaggcgatcattcatttgagcctggctgtattcggaatctataaggcaaaagtttcggttgaactggatctggaagtgcagaatatcctgcaggaaattacagtagcagtgagctggaatcagctggaagctgcattgaaagcctttttcggtttgtttgagtttgagacggaagaggaaggcgaggagacaagtgttctggtaaaacaggcgaaaaagctgatccgcaaatattatgatcaggggattacactggaggagattgcgaataagctttatgtatcggaagaatatttaagcgcacagtttaaaaaagaaaccggaagtacttttaccgagacaatccgcaaatacaggatagagaaggtaaaggagctgcttttaaatacacatttgaaactgaatcagattgcggagcttgccggatattcagatccgaaatatatgagtaaggtatttaaagaggaagttgggatgcttccaaatgacttcagaaaatcggttcattaaaaaaatctccctttttaagatatttcaccctgtttcttttgacagaatgtgataacctcgtaagagtgaaacatggaaggcatcataggaagacatcagtatagatagaagaggagtatttatgatgagcgaaatgttagttagctttaaaaaccccgaggaaattctaaattttgtaaatacagtggcaaagtatccatatgatatggatatgaagagaggaagatttgtggtagatgcaaaatctattttaggaatcatgaatctcgggctgaacaacgtgatatcactgcaggtttacggtgatcattgcgaagaactgaaaaaggaaatctcccgttacgctgcctagcggcagccctcctaaatatgatgttagatgaaaatctgactccaaattccccaaactaagcaaacctaagggagagaattccaaaggccgatgtacgaaagtgcattggccttttcagtatacaaagaaatagaaaatagaagaaatgaggatagagaaatatttttcaacacttttgtccggttatccgtcttataagtgaaaggcaaaagaaaggatcgcaaggtatgatagaggaactgtataagaaatattatgaggaattgatcaattggtgccatagtatgacaggaaacctgtataccgcggaggaactggtgcatgaagctttcttgcgcgcaatgcttcatgaggataccttatccacgctgaaagaacagcaaagtcgctcatggttatatcgaactgttaaaaatttatatgtagatcgtctcagacatggcaagaaggaaatcatcttggatgagttttcgcagccacaaatagattctgaagaactggttcgattagaatgggagaagctgctggaaactttaccggatctggaaggagtaattttttcgttacgttacctggaagggtataattccaaacaaattggagatatccttttgctttcaccaggaacggtccgatccaaactttcttctgcacgtcaacatttaaaaagaattttaggagggaacaaatatgtttgataagaaaaactatgtattaaattgtgatatctgtgatgccagaaaaatgaaagaagaagattacaacaactataaaaacatgataatcaatgcagatattgttatcgtcagtacttccagtaaaagtattttaaatcgtcttcctgtcacgataaatcaagattatacaatagaaattgcagatgatgttgagacagagttaaaagtaatcaatggatcgtatgaaataacagattctatggttgttcaggaacatacattgttaatcgtaaatggagccctcaatatacattcaggtacaaaagaaattttagagaaatatgagaaaattcatgtgaacggttctgttcgatgtgcggaaagtatttcgggttatctgacaaaattatccgcaagtaattccgtttcgatctatccggatgactgtatgatattaaatgacacattcattgtagataaatatttccctttgagagcaaaagaagacaacaaatattatgtaaaagacaaagtaattattcaggataaatcggtagatatgcaaaagctagtcgaaaaaaatgtccggtttgttacagaacagttgatcattccggaagaaatggtggaatcgtgtatcgagctatttgatgaaaaagtgaattttgtagtcatccctgcaggaatggcacttcattatggagatgcagttttaaatgaagaattactgaagaaagagggagacagcatttatgtgtacggaaatctaaaagtaccggaagatgtcaaattagatacattagatgagtggatttcaaaactcatggtaaaggaaacggtagttttgatgaaaaatcaagaagcgtcatttaaaaagttaaatgtggactatcagagacttgaatttgaatgggagggcagaatcattgaaaataagcctaatattagcatagataaaatattgcttgaaaattcttcagatcaagttcttgtaagaaatatagccactgtaaagattgcacaagatgtaacgccggaattgatattaaattacctcaggattcaaaactgcgcacaggtattgtgtaatgaagaacagaaaagtgtgattgtagccatttcgcaaaatgtagcgcaacttggagaagctgatggagaagagctgcctggtaagaatatcggaattcaggatctgctctttgcgaaagtgatcaatgcagacagctatatcctttgatcagacagattagaattagagtatttgaaagtaaaactggtgaaactacaagaaaagaaacttgtaaattcagaagtgctacattataataaaaatactaggataaacattaggaggaaacatttgtgaaaaacgaattagtaatcgtactcgattttggcgggcagtacaatcagctggttgcaagacgcgttcgagaatgcaatgtatattgtgagatttattcttacaaaacagaccttcagaagatcaaggatatgaatccaaaaggaatcattctgacaggtggtccgaacagttgctatgaggcagactccccgacctatacaaaagaattgtttgaacttggaatccctgtattgggactgtgttatggagcccagctgatgatgcatgtacttggtggtgaagtaaaacgtgcagatgtcagagaatatggaaaaactgaggtgttgatcgataaagcctcttcaaaagtatttgaaggcgtgtcagcatctacaatctgctggatgagtcattttgattatattgcgcagatcgcaccgggatttgagattacagcacatacggcagactgtccggtagcagccgcagagaatgcagaaaaacagctgtatgcgatccagttccatccggaagtacttcatacagtacagggaaaagagatgctcagcaatttcgtgagaaatgtgtgcggatgtgccggcgactggaagatggatgagtttgtagaaaactcaatcaaagagattcgtgcaaaagtaggcgacggaaaagtattgtgtgcactttccggcggtgtggattcttccgtggcagcagttatgctttccaaggcaatcggaaaccagcttacctgtgtattcgtagaccatggacttcttcgtaaaaacgagggagatgaggtagaagcaatcttcggaccggaaggtgactatgacctgaactttatccgggtgaacgcacagcagagattttatgagaaacttgcaggagtgacagagccggagcagaagagaaaaatcatcggagaagaattcatccgtgtattcgaggaagaagcgaaaaagattggaacggttgatttcctggtacagggaaccatttatccggacgtagtagaaagtggtctcggcggtgaatccgcagtgattaagtctcaccataacgtaggaggactcccggattacgtagatttcaaagaaattattgagccgcttcgtgatttgttcaaggatgaagtaagaaaagcaggtctggagctcggacttccggagcgtctggtgttcagacagccgttcccgggaccgggacttggaatccgtattatcggagaagtaacagaagaaaaagtaaaaatcgttcaggatgcagatgctatttaccgtgaagagatggacgcagcaggcatgaacaagacagtcggacagtattttgctgcattgacaaacatgagaagcgttggagttatgggggatgaaagaacctatgattacgcagttgcacttcgcgcagtcaatacgattgactttatgacagcagagtcagcagagattccatgggaagtactgcataaagtgacaagcagaattgtcaatgaagtaaatcatgtgaatcgcgtagtgtatgatctgacgggaaaaccacctggaacgattgagtttgaataaatcgagttgcttaaaaaagccagtgtttatgcgggtttcagcgatttcgattagtcttttgataacaaattgataacagtcatagcaagtgccattattcttgttatccagtggtttatgggtaacggaacaattaacaggtggcttgcagactaaagttcggagcttggctctgaacaaattccatattataaactaagcccttagctgtggttaataaccatagttaagggcttttttgtcgttgccaaagcatct

SEQ ID NO: 6970 - DNA, 3799 bp, Unknown
  gut microbiota DNA sequence
gtctcataaaaattgtacgcaaggtgtactcaaaaaaatatcgtacttttgttgcttacacttacctccggcaaaataatgaaaagactgaaccatcttaaaaatacgcacaaaaaaccaccgcccccgcagcttctggtctgcaaaaacagtgatttctaagtgcgcgatcaggggttcgaaccctggacaccctgattaagagtcaggtgctctaccaactgagctaatcgcgcatccttatgttgttacttaatctgtaacgcaagaattattatatattactctttataaaaaatcaagtatttttttatttttttgtaatttttttaattttctcatcattatacacaacagcttccggattgaaaggaatttctctccatccgaaagctgtttttcagatttccagcattctgatcaaaacatctttcgcaagtacaccattggcataattcaccggttttccatcgcggaacaccacaaacgcaggaacaatccctacttcaaattctgctgccagaactgctgattcttcaatctctatctgacacaccttcacacgtccatcgtattccttcgcaatttcatccagcacatcttccatcatagcacattttccgcaccatacagcaaagaactctaccagaaccggtgtctcagacctcagtacttcctgtggataatttttcgcagttactctgatcttcatctcaaacacctactctttttacttttattatttacggcaacatcctgtattgagtatcgcacatacttcttctaatgagcgttttatacataatatttgtctgtttagttctgcctggcagtacattttctgacgcagtttctctttccagcttcttttccaccccatcgcccgctctccaactgtgggtattcctcacttttattgtatgcagcatggagaaaggtgtgaatttactctgtcggtgtttctgtacctcttcctgcgatcagtttattgatcggattcccttttgcagaaaacttttcttcatactctgtcataatatttcctttattcatctcttcatgatgatgcaagtcgtatgtatagctgagtactgtccatccatattctctgatctgctccagcgaaaaattaaacagctctgtgttatccgtcttaaactccactgtcccgtcttctgcaaggatcttgtcataacgggcaaaaaattctgtagaagtcagtcttctctttgcatgtcgtgccttcggccatggatcggaaaaattcaaataaatccgctccacttctccttttgcaaacacttccgaaagttcttttgcatccatgcaaacaaaccggatatttgtcagttcctgaaactcttctgtgtcatacttttccagtgcacgcaataatacactggaatatctctcaatcccgataaaattgatatccggatattgctttgccatatttaacagaaaacgaccttttcccatgccgatctctatgtagatcggattctcatttccaaacacctgcttccagcatcctttctgatcttccggccgcttgattgctgcctgatggctctgtattgtcccttccgcacgcggaatattacgtaatctcatctcttatactcccttctgtatcccctgaatcaaatgtcctttcaacggaccattatattatagcagaaaaccagaatataccaaaataaaattcttataaatatttttttctatacaaaatttccgcctgaccagacggagattttattttccctcgtttgctcaggcggatttaaaactgtttacagaatctaaaaactctgctctttattttattgtaaggtagaacgttaccgaagtcatatcaccatactgcagcatccgatatccttcttctccctcttccagttcataacttgccggcagattttttaccatagacagatcaaatctaaattctcccgtctcagttcctgtatgtgtccactgtccggtacgaacacggccgtcaataaataccgtataacttactgttgtcgtgcgttcttctacttccggctctaatactttcacataaacatcaaaactgctgctgtttcctgctgcatcgtatgcatagaagcgtactttatactctcccggtgtcttcgatgtgaatggctgatatccatccagaccgtgttccagaccccatttgtctactttaaatgctgctgtgccggaattatcttttacccactccggttttgtgaacatctcgaccaacttttcttcggtatactcttcaccctcattgaccgggatctcttttctgtatccgtttgctgactcgatagctgcataatcaataaccggtgcttctttgtcaatattggtgatactgaatagatgagcatctcctgtcactcctgtcacacttgtcagcgtcacactgtactctccgtttgcattaaatacctttgtgaatgttctcttattaacctgtttccatccttccggtgccacacaatctgtagatgtcttaattgtcactgtcacgtctttgtttgtccagtctgtaatatcctgtgtcagttccacaactgttggtctcgaattatcgatccgttttacttctacaaactgtggctctgatacatttcctgcaaggtctgttacggtaaagtttttatctttccagtttgcatagaatgtcttcacgtaaacaaatacgccattctcttcacccttaagtgaccatccttcatccggcagctgaatttcttcacttgtttccagacgaacttctttagactgtgcctgtgtattgttatctacaatccatttgaacgtcggcgctgttttgtcatagccaaaggtaatctttgtttcatttcccgcgttatctacaacaacggctgtattcgtaccctccactactccaagagccttgatatctgtgaaatatttgtacttatcgttgatctctgttttggtctcattgatcatcagataagaaataccttctggatcgtgtattgcaatggatttgatttcccgataattttctccatttccagttccaccaatcttgatgtttggagctttcttgtcaataccgcttaccgtgtattctacttctttctcctgaccatctgcagatctcaccgttacatgataagttccgtttttgtcgtgtgcttttgttaatacagtctgtgtttcatccagagtccatccctcgattgactgcaccggttcgtttgcagtcagtgtcactgtcacatcctgatttgtccaagttacttctcctgcttcatttacattggagtaagatactgtgacatccagatccactgccggatcactccactgtgcatacaaagtcatgtcttctgttacaactgtgttggcatctgctgatgttcctgttccgtctttttctgtattccaaccgcttaagatcttatctccattttcaaacgtagtcgggaatctaccttctgtaatcgctgtattatctacaacgtaagcgtacattacatcccagctgtttactccatggtatgtgatcaatttctgtgcattatcaatcacacgaagtccaccccattttgtatctcctgaatctttaaatggtttgcccagatctatactgatataatttccaagacatccatctggaactgttacgtctgcatccgcatgttttgcaaaagatccatcaattgtcggtggtgttgtagcttcgattgtaatatgcatttctctcttgccatttcgtttaccaacaaatgcattttttccaatgctcttgatagattcc

SEQ ID NO: 6971 - DNA, 16779 bp, Unknown
  gut microbiota DNA sequence
tatttgtaattcttttgaaaacaatcccataactttctccacattcctgcaaagctcataaatctcccggtacataggaataaacttcggatattgtttgattagctggacgattatttccggattatcctcgctgagaaatgtgagccacgcatctaaatcgtttttgataccttatcggacaaagtccgcccgccgcaggcatgtattacgggatgcccggatgggtatacctttattgtgacgggtttcccgatagatgtcaagtgggatgaaaacgaattcctgcagaagctccatatgaagtcctgtatctgacttttgacaaaaatggtggacataatcctgcttgtgccgtttcatctctccggaacttttttctataaaaacaatggtatacacgctttttatatcccgatagctgaatttctttttccgttcatttttggcacgtttgtattgccggagtaaaagatcagccaaatagcatgcgctgcgttgtccgggaaaggaatatcctattttttgcacttcaatgtttgcaatgcttccatcttccagttgaacaacaatatccataataagcaaagcattttcttctgcaattcgggaagaatcgtttggaagtacgtgtaaaatacgaatatgccgttgtaatatcagtgacagtaattcttccagacgtgaaggtgcagtatccggatttaaaatttctttgaaaaaagaatcgtaaagtattttgacaccctgcattcctgtgcaaaattgcagaaattcttcttgttgggattcgtcccacgaatcaaacagaaattttaattcaggggtagtttaaatttttttacaaagctcctctcgggtttgaatcattggaaaatattgttttaatccattgctcataagcggttcctcctgatggtttgtgaattagattgaaaatttgatgatttcatctggatttgttttttgaaaataaagaagagaacatggaaataaaaagaaatatccgttctcctgaaatgttatgaataaagtctaacacgaggaatatgaagtgtccaataaaaatttcataaatagaataacacttccattcctcactgctattttgcagatttttgtgcaagattccccataaaaaatcgccttttactttcctcaagcaaaagacgatttttacgattttcttttatttcacactctcttttgtaatcagctccacttccaccgggatggttttttccactgtttcaccctgcaaaatctgaatcgcggtctcaactgctgtctctcccatcagattcggtttctgtgccacagttgctgccatttttcctgctttgactgctgcgactgcatcgtctgtcgcatcaaaaccaaccaccaggattttcttgtttccaactgcttccactgctccaagtgccatctcatcgttatgtgcaaatacaccctgaattgcggaatttgcctgcagcatattttccataacactcattccctcagaacgattgaagttcgcggtctgtttggaaacaacattcagctttttatctgccaccaaatggaatccttttcctcgctcgatcgttgcactggctccggaaacgccctccagttctgctacttttgcattttctccaagaagtgataccatatattctgttgccattttcgcaccttccacattgtcagaagcaatggcacagtctacgtctactccgtttacaccgcggtctaatgagatcactttaattcctcttgaaaccgcatccttcactgccggtgcaactgcatcggaatccaccggatttacgatcaggacactgatattttttgaaatcagatcttcgatatcgctggtctgttttgccgcgtcatccccggcgtctaccacgatcagtttttccccttctgtttttgccttttcttttgcaccttcacttaatgtgacaaagaatgggttatttaatgtagagacagaaaatccgatacttccatttcctgccgcttctccggatacgttttctgtttctccgtcaatcgtaatcgcattacagccggtcacaccaaacaccataactgccgcagccagtacacttacaaatctcttcattctcataccgtattctcctctcttagaaaatacaacccgactgtaaaataatatttgcataaggcgttgtctctccggttcgaataactgccttgcatgtttttgtcatttttttcagatcgctgtgcaaaacaaattgtatctctggtttgaaacccgtttcatgctttgcaaaaaattgttcgatctgacggagtatctccggattctgaagtttcatctcctctgccagtatgatcttctctactttcatatctgcccctacttcttccaacacatccataaaagacggctgtccgaattttacggccagatcgatccgttctgtctcatccgggatcggcagtccacagtctccgatacagattgtgtccgtatgtcccatataagacaacactctggaaatatcactgtttaaaatcccctgtcgtttcatgctcttcctcccagtttttccaattcttcttcgacttcctgtgccatcggcattccgctctgtgccccgaatttttctgtggataagctggctgccacattcgcataccgaagtgctgtctccatatccgctccttttgctctctgcagggcaaatgcaccgtttaacgtatctcctgccccggtcgtatctgccacattcgcttttctcgccggtacactcaagatttctccattcttcaaacaagtaatcacacctctggagccctgtgtgatgatcagtttttccggatactctcttaacaagtcctctgtagaatactcctctccaaaaatcaggaccgcttcatgttcatttggtgttacatacgtcactttttcgatcacttccaacggaacgtttgacgccggagccggatttaacactaccggaatctgattgtcataacagaaatctacaacataatacaccgtatccagcggaatctcctgctgcagcacaaccatatcaaaagtcttcagctcctctttgatcctgtcaatataatctctgtccactttcccgtttgctcccggaaccacgatgatcgtattgtcattttctccgactgtgatcatagcaatccctgtcggaactccctctaaaaccttgatatgtcccgtctctacaccgactttcttgaaattctccaataaccgggtaccatttgcgtcatctccaacacatccgaacatctccacttttgctccgagctttgccatagcaaccgcctgattcgcacctttccctcccggaatataatgaaggctgtctcctcgaagtgtctccccttttagcggaatccgctctgcggtcaccgtcatatccatgttaatgcttcctactactgccagtttcattctgcttctcctttctttttcgtcgtctgacgcctgatcagctcaacatcaaatatattttctttctgatacgaaatctcttctccatgatggatgatcatctgtactgccagttttcccatttcttcaatgggctgggaaatggttgtcagctccggtgtcattctcttgctgaactcaatattgtcaaatccgaccagctgtacatcttccgggactcttcgcccgttctgatgaagcaccttatagactgccattgccgccatgtcattgctcgccaggattccatcggtatccgggtatctgcgaatcagttcttctgctgccgcaagtccggcatcgtaatcataatcacagtcgatccagacagcttttcttccatactttctgcacacatcctcatatccctgataacgctgctgcccgctggaaaacttcatcggtccccgcaggcacacaatatgctgacagccgcattcaatcagatgctctgccgcaagttttccgcctttgtaatgatctgattcgataaatgcgatttcccgtccctcagaaagctttctgtccatcacgacaaccggaagtccgcattctgcaatcttctttccggtccgatcgctgttggtcatgatcacaattccatctgcctgcatctgtacaagcatctgaatgttcatccgttctttcttcggattatttgctgaattgcataacagcatcttatatccgttttgaaaggcttcctcctccactgctttggcgatttcactgaaaaatggattttcaatattcggaacgatcattccaataatctttgatgatttcttaaacaatgcccgcgccagttcatttggtttgaaccccgtttcttgaatagcctcaagaactctttgcttcttctcctcatccacattcgctgttccattcatcactctcgatacagtagcaggtgaaactcctgcgatctttgcaacttctctgatacttgccatcttatgtcctctttcttttgctgctgtgaaactttttgaaacccgtttcatatcttgattttattataggcataactcctgacatctgtcaatctcctttgtagactttggtggtattgtatagatatctctcttttcttttattcctatcgcccaaaaactctgccttttttatgcataatccctattttatttttccgcttccattatacttgactgtttcagtccaatattgtaagatgagacaaaacgtcagggaggtcagatatgttatttaccaaagaatgtgattatgcaatccgcatcatgcgtgcattatcttccggagagttaatcagtgtctcacggatctgcgagatggagcatctgccctctgccatgacttacaagattaccagaaagctggaaaagtccggatttttaaaaagctgtcggggtaccaacgggggatatgcgctcaacttaaagcttgcagagatttctctctatgatctctgcgctgccatagatccggatatccttcttttagaatgtatgaaagagggttatccttgttctatgaacagtccgaaaaatccatgtctggtacatcacgaattctgccggctgcagaatatgctggtgcaggaaatgaaacaaaaatctcttgccgaattatttcggtaagtgtttttttgccttaatctttactattttagtacagttttatcaaaggaggattttacaaaatgaatcaatgttatggatgcaatacatgcaaaagcgcagacaagcctctagaaggctttatccgctcgcttccgatggaaacttcccatcaccgcgtggaaggacagagcacaaaatgtggatttggactgcagggagtctgttgtcgtctctgctccaacggtccttgccgcatcactccaaatgcgccgagaggaatctgcggtgccgatgccgatacgatcgtaacccgcaatttcttaagagcagtggcttccggcagcggatgctatatccatatcgttgagaatactgccctcaatctgaagaaaaccgcccagatcaaaggagaattaaagggtctgaaatctctggagcatctggcggagatgtttggaattacagacgaagatgtctatgtaaaagcagaaaaagtggcagatgccgtacttgccgatctgtacaaaccggaatatgtttctgcagaactgattgagaaaatcgcatatgcaccacgtattaaacgctggaaagaactgggaatcatgccgggcggtgcaaaagcagaggtattcaaaggtgttgtaaaatgttccaccaatctgaactccgaccctgtggatatgcttaccgactgtctgaagcttggtatttccaccggagtgtacgggctgaccttaaccaatctgctcaacgatgttttgctcggacagccggagcttcgcctggccccggtaggactgcgtgtgatcgatccggattacatcaacattatgattaccggacatcagcacacgattttcgtagatcttcaggaacgcctgatttcagaagaagcaaagacaaaagcgcaggctgttggtgcaaagggattcaaactggtaggatgtacctgcgtaggacaggacttacagctcagaggcgcacactataccgaaatatttgacggtcatgcaggaaacaactatacaagtgaagcaatcctggcaaccggagcgatcgatgcagttctttcagaatttaactgtactcttccgggaatcgagccaatctgtgaagaattgaagatccgacagatctgtctggatgatgttgcaaagaaagcgaatgcggaactgatgccgtttgaatttgaaaaccgcgaagaacaaagcagcattattattgataaaatcatcgaatcctacaaggaacgacggggaagtgttgcgttacacctcatggaagaacatggaaatgaccatacattaacgggtgtcagtgaaggttctttaaaatccttcctgggcggaaagtggacgccgctaatcgaactgctggcatccggagagatcaaaggtcttgccggtgtggtgggatgctccaacctgactgcaggcggacatgatgtcttgagcgtggaactgacaaaagaactgatctctcgcgacatcctcgtccttactgccggatgttcttcaggcggaatcgaaaactgcggactcatgactccggaagctgccaaatatgccggtccaaagctgcgcgctgtctgtgaaaaactgaacattccgccggttttgaattttggtccttgtcttgcgatcggccgtctggaaatcgttgcaacagaaatcgccgcagagcttggcgtagatcttccacagcttccactggtactttctgccgcacagtggctggaagagcaggcactggctgacggatgcttcggacttgcactgggacttccgctgcaccttggacttcctccgttcgtaacgggaagcaaaactgcagtcaaagtactcacagaagatatgaaagaactgaccggaggacaggtcatcatcaacggagatgcgaaagaatctgctgatatcctggagcagattattctggaaaaacgccagggcttacatatataggaggtgccgctatgagacgaattatgatcgatgcctcaaagtgcgatggatgcaaaaactgcaccatcgcctgtatgcaggcgcaccgggaaacaccgggaactgtttatgatctggatctgacggacatccgcaatgaatccagaaaccacatcgaaaagctgccggacggaacctatcgccctattttttgcagacactgcgatcagccggaatgcgtgatgtcctgtatgagcggtgctctgacaaaggatccgaaaacgggaatcgtatcttatgatgaaacgaaatgtggctcctgttttatgtgcgttatgaactgcccgttcggcgtcctcaaagcagatactgccacccgtaccaaagtcgtaaagtgcgacttctgcctgcaggacggtgcagaacccaactgcgtaaaagcctgtccaaaacaggcaatctatgttgaggaggtgtcattatgatgcatgttattatcggagtgggggctgccgggatcaccgcagcaaaaaccattcgcagccagcagccggatgcctctattaccatgatttccacagatgagcatgtacactcccgctgcatgcttcaccgttatttgagccatgaacgtcaggaagataccttgtcctttgtagaacctgacttttttgaaaccaataaaatcgaatggatcaagggtgtttctgtaaaaacagtggatgtaaaaaaccagcaggttctgcttgataatgacacatcctgccactatgacaaactcctgatcacaaccggtgcaaacagcttcatcccgcctgttggacagttccgtgaggcaaacaatgtattcggactgcggcatctttcggatgctcaggcgatccgcccgctggccgatcaggcagaacagattctgatcgttggttccggtctggttggaatggacgctgcctatgcatttctcgagcagggtaaagaggttactgttgtggaaatggcagatcgtattcttccgatccagttaaatgaaactgccggaactgcctatcggaaattatttgaagaacacggatgccgttttcttcttggaaaaaaggcttctgaaacgcatatgaacagcaatggttcaatcgactatgtccttctggatgatggcacccgggtagactgtgatctggtcattgttgctgccggtgttcgtcccgcagttgaatgcgtactggatactccgatcgaagtagatcgttttattaaagtgtctgacaccatggaaaccagctttaaagatatttacgctgccggagatgtaaccggattatctggaatctggccaaatgccatgaaacagggacaggtcgctgctctcaatatgtgcggaatcgaaactgtctacgatgatcgttatgctatgaaaaatacgatgaatttctatggtctggtcacactttctctcggacgcggtatcgaagaagagggagatgtagtcctggaacaggaagattcccacaattataaacgtgcaattttacgagatggaaaattagacagtattttattacagggaagtattgattattccggaatttatcaatatctgatcaaacataagatcgacctttccggtatggaaaaagatgtttttcatctgtctttcgctgatttttacggagtgaaagaaaacggcggatattgttatcaggatcaggcataaagtaaaagcattcctgcatggatcattgcttcttggcatatgatttccggcaggaatgctttttattttattatctcgcagattcaccaactgcagctgctccgctcaatccgtcttcactctttttctggtcataaacctctctgtctaaaagctgctcggattttgccacaagaactgctgctgttgccgcacctgtcacatttgttgctgtacgcatcatatcgacaacgcttgagatcggaaccagaagtacaataatctctaccggaagtcctgctgcagtaaacagtgctgtggttgttactgtggaggttcccggaactcctactgttccgatggaaacgatcagtgtcaatacgatcagaaatacatactggactgggacgtaaatgcttttttcttcccagataggacagcagtacaaacagaactactgtaatcgccactgccgctatcgctaaaacatcaatatccattattttactcctttaaatgccgcatcaagatctgcgatcagatcttctactttttcaattccgattgaaagccggatcgtgtttggtttgattccctgatctaacaattcttcctccgtacactggctgtgagtggtggttgccggatgaatcaccagagatttcacgtctgctacatttgccagcagggaaaagatagacagctgatcgataaatgcctgggccgtctgcgcatctcccttaatctcaaaagtaaagatagagccgcctccgttcgggagatatctcttatataattcatgggttgactccgtttccagtgacggatggtgtacagcctctacctgcggatgattcgcaagatactccacgatcttcagcgcattgctcacatgccgctcaacacgcagagataatgtctccagcccctgcaggaagataaaggaatggaacggagaaagtgttgcacccgtatcacgcaggatcactgcacggatataggttacaaatgccgcactgcctgctgcatctgagaacgatacaccatgataactcgggttggcttctgaaatccacggatatttgccggatgccttccagtcaaactttccactgtcaacgatcacgcctccaatcgctgttccatgaccgccgataaatttcgttgcggagtgaatcaccaaatctgcaccatgttcgatcggccggatcagatacggtgttgcaaatgtagaatctactaccaacggaatattgtgtctgtgcgcgatctctgccaccttctccagatcgatcagatttgaattcggatttccaagtgtctctacaaatatcgcttttgtattttcctgaatggctgcctcaaaagatccttctttctcagggtccacaaacgttgttgtcacatcgtttgtgagcggaagagtatgcgccagaagattgtatgtgccgccgtagatggtcttggatgccacaatatgctctcccgcctttgcaagtgcctgaaatgcataggcaattgctgccgcaccggatgctacagccagcgctgccacaccgccttctaatgctgcaatacgctgttcgaaaatatcctgtgtcggatttgtcagtcttccatatatatttcctgcatcacggagtccgaagcggtctgccgcatgctgtgagtcgtgaaatacataagaggttgttgcatagatcgggactgctcttgcatctgtaaccggatctgcctgttcctgtccaatgtgtaattgttttgtctcaaatccccagtttttagaatctctgatatctgccatttctatttcctccttctttggaatctgtttctttcttaattccttgtaatcatattaacatagtaggatttatttgtccaatatagattgagaatatcctgttatagatttattttatagcagactcattgttttgtatggctgctttaaccgtatccagaaacatttcatgtattctgttgtcctgatctaattccggatgaaatgccagcccaaactgtgtcccgtattttactgccacgatccgatcatctactgccgcaagaacttctactccttttccaactttttcaatatatggagctcttataaatgtcatcggtattttcccgattcccttcatttcctgtactgtacggaaacttccaagctgtctgccataaccgtttcttttcaccgctgccggcaatgttgcaaaataaatattccggtcatttgtcaaattttccgccagaaggatcaggccggcacaagttgccagcaccggcagtccttcttcgattttctgcttcaatatctgatatatgtccagctctttcagaagttttccctgcacagtactctcacctccgggaaggatcaatccatcaaacggtttcatcaggtcctcttttttgcggagttccatacattctattcccaggtcttctattttcttccgatgttccgcaaatgctccctgtactgcaagtactgcgatcttcattctatctgcccctttccgccatcaaaagttctatctcctgttcattaattcctaccattgcctctcccagatcctcagaaagctctgccagcatcctgtagtcttcaaagtttgttaccgcttttacaattgcttctgcccgctttctcggatctcctgacttaaaaataccagatcccacaaatacgccttctgcaccaagctgcatcatcagcgccgcatccgccggagttgcgatgcctcccgccgcgaagtttacaacaggaatacgcccgttatgatgtacatattcaaccaattcatacggtacatttagggcctttgcttcctcaaacagctcatcctccctcatggagaccagttttacaatttcccgcttcatcattctcatatgtctgactgcctgtatcacatctcctgttcccggctctccctttgtacggatcatagaagctccttcattgatccttctaagcgcttctcccaaatctcttgcaccacatacaaatggtacctggaatttgcgtttattaatatgataaacatcatctgccggagaaagtacttcactctcatcaatataatcaatttcgattgcctctaatatctgtgcttcaacaaaatgtccgatcctgcattttgccataactggaatggatactgcttcctgaatttccttgatcatcttcggatcactcattctggatactccgcccgctgcacggatatcagccggaatcctttccagcgccatcactgcacatgctcccgcctcctctgcaatccttgcctgttccggtgttgtcacatccatgatcactccgccttttaacatctgtgctaactgcttgttgagctcatatctttctgcactcatttgctgtacctcctcttaattgctatcatttttatatgaatactacattaagattggcttttcttaaatatccagttttaacgtttttaaccatgccagttttaaaaacaaaaaagctaccgctattatttccaatatttttctacttcctgctcagcctcttggaaagaaagctggaacttttcctgtacctttgcacacacgcattctttttccattcccatttcctgtaataattctacagttgcctgtcttctgccttcccttctgccttctttcaatccagtgtttttataaaccgtagaaaagtactggtgatctcgaatcgcgcgctctcttgcctcatattccagacgcttctcctcatccgcactgatccggttcaaatcctcatacgccttcttaatatattcgcttttttccgctgccatttcaaattcctccttggtttctgcattgataaactgaagccatttcagcagctctgtctccggatactcatattttgccagtttcgggagttccaatgtgtggatctcaactttatcactgtacatctttctcccctgatctgaccagaagtgaaaacaggagtaatattcttcatcttcaaacatggtaaaattcaaaatcccgatatgaatacatttttctaatttctgatagtcttctcctggttttaattgatcggtaaacatcttccccagatagaacaacgtgcgttctgcccagtattcactagctgtcacctgaatttcaatgtcaatctgctccttgttatttaacaaaacccgtacatccaaaattcccaacttatcatctttatccttctggcgcaaatgggacggcaaaatcctgctctcaacgatttctcccagatcaattccaagtaccgccgccagaaatgcgttgcgcacctcttcatcttccatcagctctttaaaacagaaatctacttttggcttcattaaaaattgtgttgttttttccttcttcatacatgctcctccttggtttctgatggaattcagaagatttcgatgagcatgtaactgtattcttaattttattatatcttttgacacgatgtttcacaatcgcaaatacagacaaactccatctattctcttgttactatgcacggtaacgtcttatccatcttttctgtgcgtttatttggaaattatttttgaatggcatcttatgccatatttgaaaactgaaagggattcctttcaagattggttttattatacttgaaattttgttgggacacaattaaatttccatgaatatgttataaatttttccgtaaaagttactgttcacaccggatgttaaatataggttctgaaccgtcatgcttgcatgtaaggcaaagaatctatatttaacatctggtggaaccagtcaccgcccatacataagcaatctagcacgaagtgcggtactggagtgcgcaagcacgacgattgcgcatggataggtggagattggtgggaacagtaactccgtaaaagttactatatgtgaaaagaaacaaggaagctgcaccttttgcgcaaacttccttgtttcttttctctataaattccagcgttttccctgagatactcgcaatcggttcatagctctcgccagagatgcctgagaatgataatattcctggatgctctgtttctggcggattcgctcctctgcacgctctttctgctcctgtgcatgacggatatcaatctcctccggcttttctgctgtatctaccagcagtgtcacacggttgttgactacctctgcaaatcctcttccgagtgcaacttctacccagtttccttcttcgatctccatacgggccattccgatcttcactgcaatcaccatattttcatggttcggcaagattcccttttcaccatccggcgccggaatcacaagctttctgcagcgtccttcgtaaaaaaccctgtcacttgcgatgattttcaaaccaaatgtatccatatgccacgctcctattctgcagcttcctcagcttttgcctttgcaatgacatcgtcaatcgttcctacattgaaaaatgcagattccggataggcatccatctctccgtcaatgatcatcttaaatccacggattgtctcttttaacggaacatattttccagggattcctgtaaatgtctctgctacaaagaatggctgagacaaaaatctctggatttttctcgcacgcataacagttgccttatcttcatctgacaactcttccataccaagaattgcaataatatcctgcagttctttgtatttctgaagaattgcgatgactttatttgccacttcgtaatgctcttctccgactacatctgcttccaggatacgggagctggattccagtggatctaccgccggatagataccctgctctacaatctttctggaaagcacggtcgttgcatccagatgcgcaaatgttgtcgccggagccgggtcagtcaaatcgtccgccggcacataaactgcctgtacggaagtgacagatccgttctttgtagaagcgatacgttcctgtaattcacccatctccgttgccagtgtcggctgatatcctactgcagacggcatacgcccaagcagtgcggaaacctcagatccggcctgtgtaaaacggaaaatattatcgatgaaaagaagcacgttctgatgctgttcatcacggaaatattctgccattgtcaaaccagtctcagccacacgcatacgcgctccaggcggctcattcatctgaccgaataccaaagcagtcttctccagaacaccggactctttcatttcagaccagaggtcatttccctcacgggaacgctctccgactccggtaaaaatagagtatccaccgtgctctgtcgcaatgtttcggatcaattcctggatcagcaccgtcttaccgactcctgcaccaccgaacaatccgatcttaccgccctttgcatatggtgcaagaaggtcgatgaccttgattcccgtctccaggatctctactacagggctctgatcttcaaatgtaggcggttctctgtggatcacccatttttctgcatcctcgatctgttctccattatcaattgtttcacctaatacattaaacagtctgcccagtgtcttctcaccgacaggaactttgattcctgctccggtggctgttacttccatatctttatgcagtccttcactggcagcaagcatcaggcagcgcacctcattgtttccaaggtgctgtgcaacctccatgatgcatttctttccgttgttttcaacttccagagcatctttgatataaggaagattgccgtcttcaaatactacgtcaacgacaggtcccataacctgtacaattcgtcctttattcatatgctattctcacttccttttctgcttctgcgccttcgcaccgctgcaaacttccgtaatttcctgggtaattgcagcctgtctggctctgttatatacgattgacaattcccggatcaggctctgtgcactgtctgtcgcagctttcattgccatcatacgggcattgtgttcactggcatatgcctctaccagacatccgtagaccataccaatgacatagttcggaacaatactgtccattacactgtccgcagacggatacagttcaattgcctcccgatacatattcagaggcatcctcatacttccaaagtctttggtctccagcggaagcagcttcaatttttccgcatctgcctgtacagaattctccatgcgggtgtatacaacatacacttcatccagctcccctgccagaaactgatcgatcaccgaccagccaatatctctggcacggtgcatcgtcggtttctgaacggtatactggaaatttgtgtcaatctctacattatgttttgcaaaataatgccgtcccagctcccctacaacaaagagcttgtgaatccccggctgtgcaaggatctcttcttccagcttgataatattatgattataagctccggcaagtcccttgtctgccgtaattacgatcgaaccgatccttttctgctctgccgggatatcctggcgggcatcaaaataagaatgccggatctctggcacatggcgcaggatacgggaaatctcaccctgaagtccataaaaatacggctctgtatccgccagtttttttctggcctgcgtcatttttgaagaggaaatcatatacatcgcatttgtgatcttcatcgtatcttttacgctgttgatgcggctctgtatttctctgatatttgccatattaacacctgctcttcttgaattcctttgcggtctccacgatcttttcgatcagttcttctgtcagtacctttttctcttcgatttcctgtccgatttccggataatctgaatcgaaatgacgaagcaggtctgcctggaactgtttgatttttgctttttctattccaagcatcactttatgtgtagcagcacacaatgtgatgactttttcatgcagactgagcggatggtaaagaggctgcttcaaaagctccatcagaccgcttccgtactcaagctgctcttttgttgcagcatccagatctgaactgaactgtgtggacacttccatctcacgatactgtgccagatc

SEQ ID NO: 6972 - DNA, 14135 bp, Unknown
  gut microbiota DNA sequence
ttctgcatcggtccagtttacaaaacggaatccttcgtttgccactgcgataacttctgctttttctccttttttgtagcttccgtctgctgaatcaatggttacagttcccatactgttgtcattggctttgattgttacgtggaatgtctcctcctgatatacaaattcaaactgatttaacttttccagaatttcagctacttcttctggtgttgcattctcgttatctaatataacctttgactgctctctaagttctgcaaattctttccaggatgcatctgtcacctgtccttgtgtcacatctttaatttcatcatattttttctgaagttctgtcttatctgcacgcaacccctgaatacgctgtttcaaaacagctatcatgttatctactgtttcctgtgtgcaagtaccattcaacaatttttcggcttcctgaataccttcctgcaatgctttaaaactctcttttgtgtatccatcctctgaaatttcttttgctatttgaagcagttctttcaatgcatcggtatctaccgtaacattttgaagattttctctcgctgtctttacttctaccgccttatcgttcatctcagaagtacacgtttcttcatctgcctttttcaaaagcactgttgcactttcaaggactgcctggagcttctcccagctttcctttgtataatcttcagaatttaatttttcacaaatctgaatttctctttgcaatttactcctgtctactgattctttcttttccttacgaactgtaagcgctccaacttcaacccatcctcttttttcctgcgcctgtgaactttttccaacacgctcaaactgaattgtataagttccctcttcaaattcttcattcataagttctgcgctttcttctcgttctggcgcgtaagtatcaatttccttttgataaatctgtctgtcagatgaatccagaattgtaattcgtataactccatgatcatttccttttaccgtcgcaacacgaatagaatgtcccttaaacttaccagtcaatgttcctgcgttctcatcttccgttgctttaaagtttcctgcctggatccatttcccacttccctgtaaatctgtggaaggaatctgtatctcttcaaatcctccctgttccaaattattcaatacatctttcagcttctgtaccattctatcgactgcaggttgttttacatttttatcttccatcatttcttttgcttctctcagaacctttttcagctgatagagagagtcatttgtgtattcaccacccagtgcttcttcacccttaacgatgagtgcttccaatgcagttttatccgtttctccaaatccaagtcgattatatctgttcaaaagaaattcagttctggaatctatgacatcctgtgtggcagtctttacttcttttccatctaaaatactttcttcaaacgcccctttcagttcctgtggagcattttcatactcctgtgatgtcctgtctgctgcttcagccagttcaagtatacgttctaactctgatgcatcacctacattatctgtttttccatttactaacaatggtgtcacttcatacaatgaaggctcgcctacaaatccctctttcaatataatttttaaagaatccgttgtcacttccgggaattttgccagacaatatgcatgataccctgcactggaaccatccacatcacctactttatcctctatatcccccattttggcaccctcatacactgtttgatattctccatctgtcagtgcctgaatttcaaatgatccgattccattattttttgatacaaataaatcaaactccaactgattaagcaactctttttcttccaatgtcaatgtaatctccattggctcagaagaatctacatccttagatgcccatcttgttgtcgaatttcggtcaaccattttttcttttgtatagatttctccccaaacactttcatgggataccgtcacatcttgaattggaattgcctgtgtcacatatgtcttcgtatatataggacttactctctgtcctctataaaacagtgccgctctgacaacagaatcctcttccttgcttaactgcagtggctgctcataaagtgaagaactcttccttggaatacttccatccattgtataacgaatgtcataatccgatgcctgttcacttttactcaaagtcagtataagattttctgaatcaataattccagaatctttactaaatataacctctctgttttccatctgttttttcagttgatttacaattactgaaagctgattctcttcatttttataatactcaagatctcctgtattttccaacaaagtccttcgcagcattcttaattgagtatagatttgatcaatctgtacatatgtcagtccttctttatcagtaagataataaaccttttctgcttcttccagataagcgcgatacaaccgatccatctgttttgcttttgtcagaacgcttcccagttcttttgaagactgttcgattgctgcccccaattcttcttttactttaacaagatctggatgaatctgtttcaaaaatgctgttgcctgttcttttaattcatccatatttgtttcaaacatatcaatggtatatgttctgcctgaaactgccttaaaagaaatacgtcctttttcttcatctttctttacagaaatctcttttccatcttcatatacttttgcagatgtaatatttttataagaacctgtaaatgtattgctttcgttttcaccatcataacgtactgtaaatgtctcggctactccgtttgcccatttttctccaatggtaaaattaccacgtgctttcaatccctggatatttccttcttcccatgcatttggaattgccggaagaaactgcgtatagccagactgagactgtaccaacatctctgcaacaccagatgtcaacccaaagtttccatcaatctgccatacaggattcccattcttcatagtttctccaccaccggagccatgagaatcaaacaaattatactgcaaccctgaagaatttccgccgatcagattgtttaaaagcttgtatgctttttctccattttctgttctggcccaaagattgattttgtttgcttttgaccagccagttgaatactccccacgttctgtcagcgattggattgccgcatccatatactccttattttccttattgatcaatgttcccggaaacaatccaacaagatgagaagaatgtctttgttcccctggatgcccaatatcccatccactgtttggtacttcaatttccggcagacttcccgcttttgcatatgaacgattatgtccattcttttgtccaacacgtgtctcttcataccattctttaataccattcgtttcattaatctcaatcggatccaacttctgcatattttcttcccaggattttaataatgcctcgtcttccccgacaattttacccgcctgaatacattctttatataattcccagacaagtgactgatcataagtagtaccaatcgctgtcggtccttgttcctctgaaaaacttggtgctaccactaatcttgcctgtccattatatggagaactctcgtcattgattttctgatactcggatgtccaaagataagaatcccaaaattgtacagcttctttcataatcggatagattgtatttcttaagaaatcttcattttgggtaaattcataatgccaccaaagattttgaattgcccatgctgcccctgtaggattccatccatattcctgtgcatttgtcggtgctgtcataccaaatggattattttctgtatgcactgtaaaaccagtatgattttccactgccccttcaattccatgaactctctctgctgtcagacgccccggctctcttagcttatccatataatcaacaaaggtaactccacattctgccagatttgttgtgtaaaccggccagtagttcatctgcacattgacattaaagtgataatccccggtccaggcagaatcccctactgtccataaaccaactaaattacttggaagtgttcctctggaccccgcaatcgtcagatagcgtccatattggaatgcaagcacttccagataatgagagtaagttccatttcgatattcatctacaagctgatttgtcggaatgttagtgcgctgttcacctaaatctaagctcactcgatcaaacaatttctgatgatctgcaatatgcttttctttcaatttctgatatgattttttggcattgctattgacacggtcatctaccatttttttcagatttttctctttatcacggtaagttggataatcatttttataatccgtctctgccgccattacaatcatgacctggtttgcatcctcaatctgatagacctgatttttctcatctacctctagatctcccccttcgaggacaagtttcattgttgtgtaaaattttaaatcattatctttaacttttccttcaattgtacaggtttgattttccggatcaaatgtagttttcccttctaatccattgttattaagctccatttttacactcaaatcaagctttccactttctgatgctgaaagctttgtaaccatgatctgatctggattacttacaaagtgttcccttttataattcacatcttcataagaaaactctgttgatgcaaccccagtttgaagatccagctctctccgataattttttacattctggtcttgaagttccattttagaaaaatcaagccaaatatctccaaaatcctgataacttcctttgttcagattattttctcccggaaatttgatctgtgctcccataccatatccaccgagactttgatcatcattaaatacttttgttgatttatcatctaaaagttttctgtaattttcaatttcttcatccgtatatgctgttgccttattcccaaactgataccccggacgactcggagaaggacctcctgtccagagcgtcttttcattaaaatgtattcgctctttcgaaattcccccaaaaatcagattacccagatttccatttcccaaaggtaatgactgttgcatccactctccaccattagtttcctgtgtattgatatttgccggtgacgtataccataattttagtgattgactaatcgactccgtcgataccgaattctcctgtttctcttctttcgcaaaaacttcacataccggtcctattggtaacaccagtatagtgcaaatacctgcaaggaattgtctgattctttttttaatcataatgctccttttctcaacttataccgttttaaatttcctctgaaaagtaagatatacgaatccccatatatgaggaatccgtatatcttgtttccgattctgttttgattattttttctttcttctgataatcactactgcgccaacagctgctactgctgccaacagaagtactgcccacatgatcacattggcattgtctcctgtctgcacactctgagagtgtgaaccggatgtacttccattgttatgacttccgccgttgctgcttccgccattgttatcatttccaccgttattatcatttccgttgttaccatcgtccggatctgctttttctcctcttaccagaaccttcacatcagctttggctgttgcttcgtttgtatccgttacctgaatggtcacgatcacatccgtatcgttttccggtgttgttacctttccatccagtccgatgattccttccggattcactgccacgatctcgatcttacttccttccggaacttccggcagaaccagtctttctgttcctgctttcacttctgatggaatcttattgtttgccaggatgtcgtttaagatttcctgtgcacccggaacgtgcgtttcttctgtcagttttgcctgcaccagcatccgtgcatttccttcgtcttctccgacatcacctgctgtgaaataatattccagtgcagaagccggtcctgtatagaatacttttccgctctctttgtcaaatgaagcaatctgactgttttctcccatcagaacttccgttctctgcagctgttgaggtgtcagtacctcatttaaatctgtccagtacttttcaccgtcatatttccgttttaactcgatcgtctgcggagataactgtaaatccagagcctttcctgactctgtccatgccagatgattctctgcacaatacaatgttttcaggtttgaaacatctccaaactgcagcagtgacaggttatttccgtttccataaacactttccggcgcagcactgtccatcttaagactggtaagctggttgttgttaaaatttaagtatgcaatattttcttctgccccgatcagatttgtgatctggttgttttccacactgacctgttttgctgttccgaaacggaactctccggataactgattatttcctgcaagaaccgtttttaatgcagttgcttcatccacgatcagttctgtcagactgttatttgctgcgttaaattcctccaatgctcccagacctgagagtgagatctgctgcaggttgttattctgacaatgaagtgtttttaaatttccaagtccttctacgagaaggctttccattccattactgtctgcctgaagcacttcaagagccgctgccggtcttgcatccagtgtatgcagctgatttccataacagcttaatgcacgcagtgaagtcaggcctgtcagatccagatctgtaagatgattattttcaatccgtacttcttccagacttccaagtcctgtcacatgaagctctgaaaatgtactattttgagcatacagctttttcagactgctgcatcctgtcacatccagcacggaagccggatttccgtttactttcaaaatctgcagagatgacagatcttttaccggtgcaaaatccccaatcgcattttggctgacatccacgcgctgcaaattccggaaattctccacaccttttaaatcggtaattcctgcattcggcattgccagttcttccacttccatgcactctgcttccgacaggcttccatttccatctttgtcgcaggttcctgcaaatgtcagtatcacctgatccggaaactgttctgcagaaagttcaatttctcccgccggtgctgcttccggcacctcttcattctctggttctgtctccggctgttcaggagtttccggtacctgaggtgtctcattttccggtgtcttatcctctgtttcttctattgtttctacagcctgcgctttgatcgtatacagatcgctgctcatcgttcctaaaatcattccggacatcagcaggtacgcagttaatttctttattttcatctttttccctcctactatctactgtgccatagtgacgaattctactgtttctgaacggagagactcaattcctctctcatttactgcagttacataaacctgatatgtagtaagcggggtcagctcctgaatcgtctgattcatttcttttccttcccataccatcttaccatttgcatacacacggtacgtacatcccggttcttccgcagcccagctgatatttgcggaagacgaagatttgctgtcaattctcacgtcgtttggagctttcggtgtttcccagttgtcctggctctgtgttccgatcaggtaataccaggaacctgttccatactctaccccatcttttcttgctgctgcccgcagaattgtatttttctcgactgtaatcggtccttcatattttttagcggactcagaaacttctttatttttctcaaatggctgactgccgtccagagtataataaatctctgctccttcacctgctgtcaatgtcacctgctgtgcagaatcatattgtccggaagcaacatctgcgcttacctgaatatccattgctgtaaaggatacttctgccgcttcagattcattgtcatatctgtccacagcttttacctgaacagtatactcgctgccagcctccaacggttctaaaatcagcgcagtctgtgtaacttcacggaaaccaacctgttctccgcctttactccagcttactttgtatttttcgactcctgtattatctactgacggaaggaaacgaatttctgcttccgatgccttcggagatacgactctcagattgcccggcacagttggtgcttcttcatctttgatcaccacatcccctgtttcgcccattacttctagttctacaacgtggtttgtatttcctgctgtacttccattcatatatacacggatgtatcctgcatcaaaacgttctccttctttcggcaatggtgtttttgtatttggatccaaccaagatacaccttcaccatacactttcatggtttttccgttttcagtttctacatattcttcctgatttccttttggaagcttatgtgtctttcctgcctcaccgttaagagctgccggccattccgtatccgcgttctgatttccgttccacagcaccaacgttttagtcggatcgaaggaactgtccggtgacagaagtacgacggtatcatgatatttacgtgtaccatcccaataccgatacaggttcacttcctcgacatgatgtaccccgccaagatctacctgcagccagtgcgcgcctccagtatttccgcccggatctgagtagttatcacgattcgtcttatttccatctacagcatcgtctcttctggaagcttcacttgcatcttctgaaaagctcacatttttgcctcttgccagattggttctctcagatttgatcggctcatcttctattttctgtgcgtcttcatcatatacaaactccaggcctgtgatagaaagatcaacccatccatttgtctggatcgtgataactgcttttcctgtttcttcgttaaattctacttttggttctgtgtactgcggctgtccgtctgtgtccggctgctgtccctttacaaccttcacttctggttttttcgccagttttgtcagttcaaatgtagtggtacgcagttcattatcttccggagagagctttccttccggtgcgtttaccacattgtactcatccatatatttatacacagataattttccatcaatcgttgtctgtccaggtgaaaagtctcctttccagcttaagccatatatattatcgaaaataatctcatctttatttacccggtagttattcaacgtgatatccatcgctgttccgtctccggattcattcatgatcataaattcgtgaggctccatctctactttcagacgtgcgctttcttcttccccttccagaggtaaaattgcatgctgcttttcatttgtattaactttattgttgtagagataccatgtgccctcccatttgtcagcaaatgcatttcctacatattcgattggatacagatctttgaaatacttttgttttgcctgtccggacagattcttgtctttgacatccaatacatttggcggggttacgcccagtttgtctgcttcctgaatcagtttctctgttacttccgctctggttccccatgccggaataaccggaataatgccataacgtcctgtttcataaatctggaatcctgtcggttttccggataaaccactgtaaaaatcagaacttacatttccatagagcactgctttggtttcttccataatttcctttttggaaggtgccggatgattgacaatgtaacggaacagttctgtcaggacatgggtatttgccggactgttcgtgttgcttgttccatatacgatttccgggaactcaaacgtatagatcacaccaccgcccagataggtgctcatcatttgcattccaagcaatgcttccggttctccacaaagtctctgccaggtgttatagcttccagctccttgccagagttttgagaactgcttgtcccatgcccaggtatcggaaagcattccccagcctccggtatatcctgccagccagcttccctggaagagactgcttgttttcaaatcatccggttgatttgaacttgtgttcttatagatcaaatagaatgcatctccgtgtttttccagtgcctttttcatatttgcattgctgacaatattcgtcactgtagaaccgtgatcctgatctgaccatacaaagaatccaccgaatcggtcagcaatctccagcatcctagcgcttccttcgcatggaggatgaatacctgcccagaagttctctgtattgaacacaccctgcatattcggatacatacggtacatcagatccaaccagccgtaatccatatccgctgtaatattgtactgtgttcctccattttccggagttgcagctgctgtcaatccaagaagcatgataggtgctccctgttcataggcaatctgcagcccatgttcatggaatgcctgcagataagcctgaccgatatgatccggtgcaaactgtctgaggttatttgtatgcagcagcaaaacgttattctttttcaaatcatccggaatcgcattccatcttccgtctactgtattagagccctgtaattctggtccttgttcctgtccgatctgatagacatcgttcgaatacgctgttgcgatcatcatcggatgttcattgtcgatcacacgtcttggaccatcctgtgactgtacatcctgctcattttcatatccataaatacccagttccatgaattttactgcggcaccttttggattctctgtatacactctgatataacgtgcctcttttgttgttccaagctctgtggccccaagtccattcttgtttgcataatccatatagaaccactgtccgcccatcgcttcttcgtatggctttgaaacattctccggctgtttcaccccatccggaagtgtcggatttccttcataataaacgatctgaccgtccgataaatcctcttcatttccaatcacaatggcagtatttttataagaaatcttggttcctttcagacgttttccctgaccactcggatttccatttccgattgtcgcctgtccatcatatacctgacgtttcaggttgatgacttccaacggataggatgcacccagatccacctgcacccacacaccttttttcccttctgcagtgctggtgacttctgttccctgttcctgataattctcccagttgtttccctctttattacctgtagcatcatgctgcagataatatttgtcaccgtcggttaataaatccgcatttttcaaatccatattttccccgactgtgactttgacatccttttcctctgccagattgaccagtggcggtgctttttttgcatctgccgcatctgcacggactcctgttaccccaaatgccgtcagcacaagcgccatgcatgacagtccgagtaatctggctttgctcccttcttttctggttttcatcctcattttcctccttttcttccacatgaaagtaaaaccagaaaatgctttatttttttctggttccttacatgtctgggattttcccgcttgaattctagagtactatactgttccctcctttaatatggaatatatttaccagaaattgtactttctttactatcacaatagattttgctcatttattttgtctattttttacattttacgttttcacatcaaatttttacggtaatttttcaatcatttctgccaatatttcttcatcaaatcctgattttctgtccaacgtagatcatgttcggatctgcaattccattccatgctgccagttccagataagttgttgcaaaacgctttgcaatctctgataaagtatcattttcctgcacaacataatattccgccggagcctcattttgactcaactgcctgtttacttccctttgaacagtatccggatcgtatcccatatcacacagcttctttcttcgttctttaccgtttgcatattttccttgtatcacttccccggcaacttcctcaatacttttggagggccgccctgtcacaccttctgtatacttcggtcttgcatagccgcggatctgaccccagcccacaggaatttgccttctcgccactgcctcattataatttccttccatcactgtgatcatttgtcctgaaacagactccacgtatccaatgtgatcagaatacccgtcatttggctgtgcctgacagtcccagttatacaaaatgatatctccgggcagtggcacgatagttccatcttcgatccagatccccttttctttaaagatttcgatatgcttttcacatccacattctgttccgatcaagtccacacatcccgcctgaatcgccgctgcagaaactgcggtatcacaccactcatcggtatactgcacagcatatccccttgccagcggcaagtaggaattatacagatcaataatctgccggaacttcccgtttgcttcactgtagccaatccacgaacgcatcacgttcaatacatcctgagcgcttcttcccgatgcattttcatcatacttcattaactgatactgctcgatcagttccatatttttctgcacatagacggaactggtcgcatacccatctgcccaaatggtttccagatatcgtccgggttctgtgattcccttcagattctgataacgtggaagctgaagcagttcaaaatatcctttcaccccctcttccatattgtcaaatatccggaaataatcggaaatcaccatcgccgttccggcctcatattcctcccaggttgccagattgacagactttccctgccattttgttccacatttcaatccaaaataattgtgatagtctttcgccagcctggattctccccagccggactccaaaattgcctgtgcaataatcggactgcatactttgatttcatatgcagccgcatatttctttacatatcctgcaattttctgaataaattcctctttcttcatcgctctcccctgctttctgtatatttctctgcttttccattcaaaatatcaattgcctgtctgagtacttctggaatgggcatccccatcaatcccgcgttttccagaatagacaatgcttcatttgcgataaacgcaatgcacacggcatccctcagataatttgtccccatcaaaaggtccagacggactgcgatcaaaacaaacaacagtgtcattccttttcggcacagccctttccagcccgcacgactctccagtctgccattttctgacttcggacttttcttaaaaatcaccggcagaagaatcccgcctgtgatccagtcgattcccataaaaagaaccaatgtctgcagtgcgatatcccatccgccaaataaaagggcaactgcactcccaaacattccaaacaagctcgtcaccatttgcttcatatccttcaccaccttcaattaaaaaagcagaatagacggcattcttttcaaagaatgttctactctgccactcatttttcttttccttttttcattcgatcctcactcaaggatgctcccttgtttctgcataatcgtctaacacatatcttgcatattttgttgcctgacgctccatcccgatcggggttaattccaatgcgttgatccactgaaaataatgtgtcagttcatgccctattgtaagcaagattgccgtcaatgcactgtcctttccccatttgtcacataaatctaaatagtctcctgccgcaacccggatatacggttccactgtataatcatcttccatactccagaatgtcccatataccagatccccgtccattgcccgtattttctttttattctttatgtaggcaacaactctgaggggaaagaaatattcttttctcaaaaatgccgcaaactctttacatgcccttcgtacctccggatctatcccactgtcaaaccgaagcctgaagcccgtccgatgaccctcttccataaaatcaatgttctgttcccagttttctatcgtccaaatgtgatccataatatttatccctttttattttccttcatcaaatacaattttttctcc

SEQ ID NO: 6973 - DNA, 2202 bp, Unknown
  gut microbiota DNA sequence
atacatacaatatatagaaaaaatggattgtaaaaaactatatattgtgctattatattgttgaatatatttttacaaatggaaaaatttgtagttagtatttcattttggcagaagccaaaagcagtattttaaggaatatcctgagaaatagaaagaaagacatgaagaatcgtatggttttttgtgtctttttttgtatgcagaaatggaaaggaggacaaattcagtttttaaaagcagacattatcgttgtatgaaaggagaactattttatgaaaattatttgtaaaaagacagatttagcaaaggcagttcagactgtatcaaaggcagttcctgcaaaagcaaccacctctattttggagtgtcttttgctccgggcagaaaaagaggagattacccttaccgggaataacctggaattggggattgaaacagtaatgccgggaaacattgaagaggaaggcagtattgcaatccaggcaaaagtatttggggagattgtaagaaaacttccagagggagatgtcgtactggaaacaggggaaaaagatcaggcgactgtacgctgtaagaagacgaagtataatctttctgtaaagtcagcagaagagtacacctgtattcccgatatggaacggaagaatcatgtcacgatttcagagtttgacttaaaagaggcaatccggcaaacgattttttcagtagcagatacttcctcaaagaaggcaatgacaggagaactgtgggaaattaatggaaaagaactgaaaattgtagcgctggacggacaccgtatttcacttagaaaaatcaaactgaaaaaagaatatgaaccgcgaaaggtcattgttccaggaaaaacactggcagaaatcatcaagattattggcggagatccggagaaggaaattgcagtttactttacagagaaccatattcagtttgagatagaaaataccagagcaatctcccggttgattgagggagaatatttaaaagtggagcagttattatcaaaagattatggaacaaaaatcaaagttcagaaaaaggaattacaggagtgtattgacagagcaggtttgttattgaaggacgatgcaaaaaagccaattattctaaatattgaagaaaatattttgtcattggaagcagtatcaaacatgggctctatgaatgaaagtatgttcgttgtaaaagagggagagaaattacgaattgggtttaatcccaaattcttattggagatgctacgggtgattgatgatgaggaagtcttcatgtattttacgagtgcaaaaacgccatgtactgtaagagatgaaaaagacagttatgtatatctggttcttccggtcaaccttagtgccgcagcgtaaagtgagagaagagggtgaataagaaggtatggaaattgttcgaaatgggcagaaaattctgttgacagagtgggaattatttcaggcgtatgaagaacagaagtatttgtacttaaaagaaagcgttctggaaaatatggaagactgtcttccaaaagagatgtatagcaaattgaaagcaaatgaagattacaaggaaagaagcatcactttattccaaaaatattatgaggattatcatatggaatatgatgtggcactaaaagaggcaatccgcgattctgcgaaaaagtttcttgatgcagaaaaagcagaacttatagaagaaaaaggaaggaacagtaaaggatgaaaagagaaaactatattattacggtaaaaagcatttatatacgtgatgcggagatgttttgcccggaaagcatgacggaacaggaaattttgaacttagatgatatcgatatttttcagtcctgtgagtttgaaagatactggaaaaatgcagaagtttccgcttacttatgtcagatggcttgtgcagaagaagaattaaaaagggaacttcagaaaattgcagaatatttcaagataccagcctgttttttagaagcaattcctgtaaaaaaagatttggaagatgatatatttcataataatggagagaaggaaaatgaagaaagcactacttaaaaagatacctgttgtggaagccggtattaaggataaacaatatatggaactttgcagacaaaactatctgatgaaggtacaaaaggctacggtagcacataaacggactttaatcctaaatctttat

SEQ ID NO: 6974 - DNA, 33938 bp, Unknown
  gut microbiota DNA sequence
ctcggcaggccatcgcgtagcgattttgttcaatgggaatttatatggatgatgacctgatctccaatcctacagtcaatgccaagataacaggaggaaaagcagagattaccggaatgtcttccaaagaagaggcacagagcctttctgataagattaattcaggctctcttccgttttccatgaagacgaccaactacagtacgatcagcccgacacttggcggaaaagcgttgaatgcaatggcactggcagcggaaatcgcaatggcgctgatctgtttatttatgatcatatggtaccggctgccgggagtgatcagctgtctgacactgacgtttcagattgcacttcagattcttgttatttcagttccgcagtacacgatcacgctgccgggaattgcaggtttgatcttatcagccggtatggcggtagatgcgaatattattatcagtgagagaatcagtgaagaattgaaaaaaggaaattccgtcagaaatgcagttaagaatggatataagcgtgcattctcatctgttttagatggaaatgtcaccactgcggcagtagcggggattttgatgatcttcggatcaggtacaatgctaagttttggatataccctgttgacaggtgttatcatcaatctgcttgcaggagtctggatgtccagatatatgctgaattcagtgatcagatataagctgttcaatcaggaaaagtggtttagaaagaaaaaagataagaagattttgaaatttgcagaggcaaaaaaatatttcttcctgacaagtgttgcactgctccttacaggaacgatatggagttgcgtaaatggaatgaaactggatacgcagtttacgggtggagtaatcttaagatatacatataccggaaaggcggatacaggacagattcaaaaagaggtagaagatattgtggatcgcagtgtcagtgtacagacttctgaaaactctgccacaggagaaaagagtctggtcattacactttcaggcaaaaaagggttgacgcccgaacagcagaaagagattctaaataccatcaatcagggaaataagaatcagtttgagacctcggaaacatcagcggtagaaccatatatcggagcaaaggcattgaagaattcggcaattgcgattgttctctcattcctcttcattgtggtatatatccggcttcgcttttcggcattgggaggtcttgcatccggagtcacagctgtgatcgcgcttgttcatgatattctgatcgtgctctttattttcggaatcttcagaattcctgtcaatgatgcgtttgtagcggtgacgctgacgatcatcggatattcgatcaacgacacgattgttctgtatgacaggatccgtgagcacagaagcaacatgaaaaagaaaagtacactggcagaactggtggatatcagtacgacagaaactttgcagcgttcgatcaatacagcgtttacggttgtgttatgtgcatttatcatttttgttgtctcagtagtttacagaatggaatctatcacaaacttctcactgcctcttttagccggcctcatttcaggatgctactcgtccatttgcattgccggtcctctgtgggtatggtgggaagagcatagagaaaaaattcagaaaagaaagacagggcaaaaaagaaaatgaagaaaataaatatgtttttgagaaatcagccgcccggcagaatgatcgtggcaggatttgcggcagtgattctgttagggatgcttgtgctgcttcttcccatatcggtaaaggatggtgcagaggtcactctgatcgatgcactgtttacctctacaagtgcagtgtgcgtgacagggctgatcgcgattgatacggcggatcattttactgcctttggtcagggcgttgttgcagctttgatacaggtcggcggactgggagtgacttctctgggcgtgggcctgatgcttgtggcaagaaaacgagttggaattaaaagcagaatgatggtaaaagaggcgctgaatattgaaagctataagggaattgtaaaattagtaaaatctgtattattaatgaccttgtgctttgaagcgggaggtgcgctcttaagctttctggttttcagccgggattacagtaccgtgcatgcgatcggaattagtattttccattctattgcagcctttaataactcggggtttgacattttgggaggacttagaaacctgacgccttatcaggatgatgtccttttgaatctgaccacatgtacactgatcatttttggcggattgggatttcttgttattctggatataggaaaacaaaagtgtttcaagaagcttactctgcactccaaggtggtgatcgttaccagtttggttttgcttgttgtcggaacactgacacttaaactgacagagaatgtaacatggctgggggcgttcttccagagcgtttcggcgagaaccgccggattttccacctatccgattgggcagtttacggatgccggcctgtttgtactgtgtatcctgatgtttattggtgcctctccgggatctaccggtggaggtatcaagacgagtacattttttatcatgttccagaaaataagaggaacatgtacgaaaggaacagtgcatgcgttccatagaaatatatcagagcagaatatttcaaaggcatttatgattacgatactttcgggaacagtggtatgtgttgcaacgttctttatgtgtgtactcgaaccggaatatagttttatgcagctgttgtttgaagtagtttctgcgtttggaacggtaggtctttctaccggtatcacaccggcgctcagtgtggcaggaaaggcggtgatcattcttgtcatgtttacaggaagagtcggagcatttactttaatttccatgtgggtgaaccgtacagaaccaagagcaaggtattcagaagaagaagtttcaataggataataaaaagggagaattcaaaaaatgaaaaagaaagtagaaacagcatatggagtcatcgggctggggcgttttggagaagcgctggcaatgatgctggcacagtcagggcatgaggtcatcgcagttgataaggatgaaaaaaaggtaaaagagatgcggcagtatacagactgtgcatttgtggcagacaatctcagctctgatacattaaaagaaattggaatacagaattgtgatgttgtgattatttgtatcggagaaaaagtggacgtcagtgtattgaccaccatgagtgtgatagagatgggagtgccgcgtgtgattgcaaaagcgctgagtccggaacagggagcggtgctgagcaagctcggagcagaggttgtatatccggagagggatatggctctgagacttgggaagaaactgttgtccaataacttcctggagtatgtttctttatgtaaccaggtagagatccgtcagatagaggtcccgaaccatttgatcgggaagagcatagaagagacggagatccgtcagaagtaccggttgaatattattgcaattgaaaacggagatgagacgaatattgaagtgatgccggaatatcgtctgcgtcagggagacatcattgtggtgatcggaaaagtagataacattgatgtgttcgtgaatgaagtttaagggccggaggaaaagagtatggaattgacatttgtaaatttctggcaggatattataagtaacccgatgctgtttatcacagtcctactcactctgggggtaatctttgtaaatggctggaccgacgcaccgaatgcgatcgccacctgtgtggcgaccaggtgtatgccggtgcgtgccgcaatcatgatgagtgcagtgtttaattttctcggcgtttttgtaatgacgcagatcaacagctccgttgcatctacgatcagcaatatggtggattttgggaaccataccgatgaggcgctgatcgcattgtgtgcagcgttgttgtccattgtgatatacagtacagcagcctcatttttcggaattccgaccagcgaaagtcacagtctgattgcagggctttccggagccgcgatcgcaattcagcagggcgtgggcggaatcaactttgatgaatgggtcaaagttctgtatggtcttgtactgagcctgatccttggatttgcaacaggatgggtggtatgtaaactgattaccgtcttttgccgttccatggaccgccgcaagacgaatcgcttttttggaggtgcgcagattgcaggtgcggcagccatgagttttatgcatggagcacaggacggtcagaaattcataggtgttttgtttttgggaatcgcatttgcaggaggacacaattccgtaagcgggatggaaattccggtgtggctgatgcttctgtgcagtattgttatggctgttggaaccagtatcggaggagaaaaaattattaaatcagtgggcatgaacatggtaaagctggagcgttaccagggattttccgcggatcttgccggggcaatctgtcttctgtactccagtctgatgggagttccggtttctacgacacacacaaagacaagtgcgatcatgggagtcggcgcagtaaaaagggtttctgcgatcaattttggagttgtaaaagatatgatgctgacctggatttttacgtttccgggctgcggactgattagtttttgtatggcaaaaatatttatgtacatatttggataacaggaggaataccaatgtcaaaaaaacaggatgattattatttcgataactttatgaaatgtgcagaatactcatgtaaagcagcatatttattaaaggagatactgacagagtttcagccggaagagatttcaaagaagatggaagagattcatgagatcgagcgtcaggcagatacacagagacacgagattacagataagctggcaaaagcatttatcactccaattgaaagagaggatattattgctctcagccatcatattgatgatgtgacggataaaatagaagaagttctgatccgtgtttacatcaacaatgtacaggaaatgtgtcaggaagtatttcttatgctggatgtagtgatcgaatgctgtgaagaacttcagactcttttgaaggagtttaagaatttcaaacattccaaagaactgaagccaagcattatccggatgaatacattagaagaaaaagaagatgaactgtttatttccagtatgagaaaacttcacgtggaagaacaggatgtgagaaatatcattgcatggagagagatttatacttatcttgaaaaatgcgcagatgcatgtgagcatgtggcagatatcgtaggaagcgttgcaatgaaaaacagctaaaaaagagatagagacaggagaaagatattatgatgaaagaacacaaagagggaagtttgcctttgtgcacatttctagttcgaatgcttcaggggatgctcataggccttggagctgtccttccgggaatttcaggtggtgtcctgtgcgtcattttcggaatttacagacctgtaatggagttattgtccaatccgcgaaagtacttttttacccatatccgtaaattacttccggttattttgggcggcgcagtcggtttccttggagttgccaatatattgtcgtttttcctggaaaagtatccggatccatccgtgtgtctttttgtcggattgatcgcaggtatgctgccgtctctgatgcgtgaggcgggaaaagaaggacggaccaacggatcatggatctctatggtggcagcagcagtggtgatctttgccatactgacaacattgaacctgctgtcagtcagccttgtgccgaatgtaggatggtacgttttttgcggcgtgtgtctggcattgagcgtgattgttccgggaatgagtttttctacccttctgatgcctctgggattgtatactccgtttgttgacgggctgggacatctgaatctgagcattatgatcccaagtggaatcggtgcagttgttacggtaatatgtttcgcgaagatgatagatgctcttctggaaaaattttattcctatgtgttccatgccattgtcggaattgtagtagcggcaacggttatgatcataccatttggaagttttacagtatctttaagtgcggcaatcgtaaatgtgatctgcctgggacttggagttctgtgttcacttttattgaatcggattgacaaagatgatcttttagcgtaaaagaaaaaataccgccacatcaacctgaaaatgcaggagatgcggcggtatttttcgtatgtttatttgaggtagtgataacaatttgtcatggtaaaagctcctgtcagttgttttttcttacaattcctgttatcataaactatagagtaagtctatagtcaagaggggaataccaatgaatcaggaaagatatattaaaaccggagaatttgcaaagctggttggagtgacaaagcatacgctgttctattacgataagattggattgttttctccggagatcaagctggagaatggctatcgcttttattcttttgatcagctggatgtgttcgatgtgatccagacattgagagaactggatgtgtctttagaggaaatcaaaggatatatgaatcagagaagtccaaagagactgctgaagttgtttcgaaaagaacagagcataatcaggaaacagatgcagcagctgaaaaagatggaagagtggattgtaaagaagagtgagattattgagaagacaatgcagacagatacggaagcaatcagaatcgaggaagaaccggacagatatatgatccagtcctgtgcaacggatacaaatgaacgggtatgggcagaaaaaatcggagaattatttgagtattgtgcgaggaatgggatcaaaagcgcatattccattggataccgacaaaatacgaaggagattcaaagcggtatttttgatcagtattctgttttttatgagcttttggatgagaaaccgcaaaaagtcaactacagtgtcagacccgcgggaatgtatctgatcgcctatcataaaggaaaatggcagacgctggaggatacctataagaaaattttagaatatgggaaagagaataaaatccagttgggcgcacattgctatgaagacattctgtttgacagcctcaccatgtctgaagaagaggagtatctgacacggattgtctttgagatccagagttcgaaaagtggaaaataatccagaatcttgttggtatcagagtaaaattttggtataattaaaagatagggaatatcaacagaagaaaggaatcagtttcatgaaagaggaaaataaaaacggacagttaccggaaaaagagcagcttttgagcagtctgcgaaatgcagaggagatgtatgtctttatgtctctgtgtacaaagatgccgtatgtcctgtgtgatgaagaaacatttgatgatgaagtgctgttatattatacagaggaggatgcacagagagagggaaagaagctgattgaacagcggattccgatccagatcgcaaagattgaaaagaaacagctgcttggatttttctcaagcctgtatccgatgggcgtcaacgggcttttgatcaataaaaatatggaaagtgaagcaagacttcagttgggagaactggtgatacgaccaaataccgaggaccttccggatggaaaagtatgggtagagaatccgcagcttcatctgaccgctctgtattttatgcaggagatgcgcagacaggaaaagccggaactgacagaagagctgaaaggtctgcaggaagagatactggtcaactatggaagaggcagatttatcgtagccgttcacaaagaaaacggaatgccgatgctcaaacagaagaacggagatgcatatcagccgattttcacagatatcctggagtttcgaaaattcaataaagaggatcagtttaagacaatggctattgaagcaaaaaatgttccgaagatgttggtaaacgaggcaaaaggggttgtgatcaatccgtacggagtcaatcttcagattccgatcgtgagaccggaagagccgcaggagaaaaaatagttgtccgtctttgaaaattgtgctataatcaccacgaaaaatgaaaacaaaagcagagtagaagtatgtgcgttaagtgccggttggacggggagttgccagcaggacgaaaagtgaatgcttgcggtacatatttcgcatcccgctgctgcacatagacagatataccagtttgatataaggataccttctgtgagtagcttgaggattactgcaaaggaggtatttttttatgaaacaattaaaacagcagtttgtagactcctggcatgagttgaggaaaacaaaagttatggcagtggctgccatgttgatcgcgatcggtgtgatattaggccttttctctgttcagcttacggagtttatccggattggtttttccggtattcctaatgagctggcatcgatgctgttcggtccggtggttggcgggatcatgggaggaatcggggatatcctgaagtttctgatcaagccgacgggaccgtatttctttgggtatacactgaatgcgatgctgggacctgttatttacggaatttttttctatcatcgtccgattcaattgggaagagtcgtggcagccaaaattacggttgctttacttgtaaatcttctgctcggtacctggtggctgacgatcctgtatggaaaaggatttctggcaatccttccggcgagatttataaaacaggtagtttccgttccgattgattccgtaatcttttatgtgcttgcaaaaacactggaacgatcaaaagcgatttctatgatcaaaaaataaaagagagcctttcagctccgctgtaaaaagcgaatgctgaaaggctctttctgatgatgtaccagatgtcggatgatgaccacgcaggaaatgaaaaatgtgcccatgctgatcaccgcatcatggaaataaaacaatccggtcagagaaaacagtgtaaacgtaagaatgcttctgtaaagatgcggctttacaacgatcaaaaaagaaaataacagataaaagaagatgagaagcagcaccgggcggtatcgcggcagcagtcccaataatactccaaaagaaactgcgatggcttttccgccacgtttcggataaaacaggggaaacgcatgccctgcaacaggtgcacagagaacaaatgcaaacatccatcttcttgtatccagaatatgtgaagccagccagatcggaagaaatcctttcaaaagctccaatgcaatcacaagaataccaacctgtgtacctgccagtgcaaaagcattgaatgtaccgggattgtgatcgtcactgtctttcatgatatcgatatggcaaatatatttgggaagcagataggcatataaaatacttcccgaaagatatccgactaaaataaagaataactcattcataaagtctccttttttgcagtatcatctgagacggcatacgcagaagaaagctggcagagaagctggtaagtcttctcagcagcatttggtgggatgacagtgtgctgcgctgtacacatggaatgccgcagttcatcgtttgacatcagttttcggccggcaagaatctgtccgtgcagtttttgggaagtcagggacaatccccgttctgtataaaaagccagattttttgtctcacagccgggaattgggcgtgtgtgtacgatcggaatccctttgacagctgcttcggtggtagtcagaccgccgggtttggtgaaaagcacatcggcagcagccataaaatctgcaattttttcagtgtatcccagaatctgaacaccttcttgttttccaaattccgcaaggaggattttttgcaggcgacggttgtttccgcagattacaacaacatattctccgggctttcgggtacggagcagttcggcaacaaagagctgaatctttccaaatcccatactgccgctcatgatcagataaacctgggcatgcgttggaatcccacagcgtacgcgcgctttttgtctgtcagattggtcagaaaatgccggacgaaccggaatcccgtatggtttcagacgttctctgggaattccttttgctgtaaattcgtcgatcagttcatagtgagggatgatgtagtaatcgcagtctgtctcttcccaaaatggaatacaggtataatctgtttctacagccacgactttctgggacaataggttctttttctttatataagtcagtgtctgggcgggaaaaagatggggcgttacgattacatcgtaatggtgtgtatccagatagcgcgttagctttttggcgagaagagcattggcataataaaccggagaatgatgtctggcggaactgacaagtccgcccagtttgtataaacactgaaaaaggcggggagcatgccggacaatattgacatagctgttccccaccagttttgatactctgggactggcaagcatcataatatccagcatatctgcggtatcatgatgcgattcgatacactctttgagtgccctgccggcataattgtgtccttctccggtattgcaggataaaatcagaactttcatagtgaatcaggacaggaaggaagcaacgacttcactgactaactttccgtcggcttttcctttgactttcggcatcagttctttcatgatcttgcctttttcttttgcggtcggcgcatccagaccgagagaggtaagtacttctgaaactactgctttgatttccgcttcatccatcatctttggagcgtattcttcgaggactgcgagacggctgttgcattccgtgaggatatccgtgcggtctgcaggtgtcatctcaatggtttctttgagctgtttaatctcttttaagattacctgtgtttcctcttcttcagtcaggtctgcgcgtttgtcgatcgccttgttcttcaatgcagtgagcagtgcggaaagcgcatcctttctttctttatcttttgctttcatagcagccatcatggcgcttcttacttcatcaatcttactcatcgtattcactccttaaaatttcttaaaattccgttgttttcggaatcttctttgattttaacagaatcagggaggcttttcaatacttgatggaaagactgaactgtgaaggcttatgttaaggttatgctaagaacttgttaaaaaagtgtaaaagaatgttgacctggaaaaatgcggtgtgctagaatcaaaattgtaaaatttgccagaaaacgagactgctgtgataccatttgcggcagtctcgtttcgagcgaaaaaataaaatacaaaaagagaagaaaaaaggagaaagatacaatggggataacagatatactttccttgctggggggacttgcactgtttctgtacggaatgcatatgatgagcaacggcctggaagctgctgccggaaacagaatgaagtcgattttggagaagctgacttccaaccgtattaaaggagttctggttggagctgtgatcacagccgtgattcagtcttcttccgcaaccacagttatgctggttggatttgtaaattccggtctgatgacattaagtcaggcagtctgggtaatcatgggtgcaaatatcggtacaacgatcacaggtcagttgatcgcactggatatctcggcaatcgctccgatttttgcaatcggcggtgtagctgcgatgatgttcattaaaaatgaaaaggtacatcatatcagcgggattttttccggacttggaattttatttatgggaatggcaatgatgggagatgccatggttccgcttcaggattcacagacatttatcaactttatgacaacagttgagaatccgctggtaggtattctgatcggtgcgatttttacggcgatcattcagtcatcatctgcatctgtcggaatcctgcaggcgcttgcggcaactggaatggtgccgctctccagcgcagtatacattttgtttggacagaacatcggtacctgtattactgcagttttagcatcgattggaatgaaagtcaatgcaaagcgtacaaccgtgatccatctgatgttcaatattttcggatcgatcctgtttacggtcatctgtatgacaactccgtttgtctcctggatggaagcactcacacctggaaatccggtggcacagattgccaatgtgcatacaacatttaatattgtaacaacattgatcctgcttccatttggcaatgtcatggcaagaatcgcaacccagatcctgccggacagcaagaaagaagacgatggagattacagactcaagtacatcacacggtttgaatccaactatgcgatcggctccagtgcggtagcactttcacaggttcgggatgaaatcgagagaatgcgcgatatggtatcgaagaatattgcaaaagcatatgatgttctgattcagtataatgaaaaagatatggagaagatttcagaaagagagacctatatcgattatttaaaccgtgagatttcagagtatatcgtatctctgatctccaatgagaaatcgacagaggattccaagatcattaatggatattatgccgtgatcggcaacttggagcgtatcggggatcatgccatgaatctggcgggatatgcaaaagatctcaaagagtggaatctgtcattttctgatgtagcattggaagaaatcgaagagatgaaaaaacagtgtctgacagcgcttgatatcgtgaaaaatgaagagggcagcgatatgacgcaggttctttttgaagccagtgcggcagagcagaagatcgatgatctgagagataagtactttaagaaacagatgcagcgtatgaaaaaaggaaaatgtaaacctcagagcggaatcatttttacagagatgctgacagattttgaaagaatgggagaccatgtgaaaaatatcgcacagcagtataagcagatgagcgaataaaaatagaaaacccttcatttacaaattttattttcaagcgggaaaaggattgtaaatgaggggttttgtcttttaaatatcttctggaagactggcaaactattgcagatgatgaaatgataaaatttttagagaatgatattgttagtcagctgatgcatatcattgacacaccgctacatgagttgggaaaagagacaatgataggggaacattgtgagtgtgacagacaacaatgtgttgcctgctggatacagaaaaaaagctgataccaatggaacgatggacataaaacgcttttcggactcatacagtgtattagctgtaaatgagccgggaggagagcgtatatggaaaagaaagcaaatgttgaaaattcaatgcagaaaaaaggactttggattttaaaatccctgttgtgtgcataccttgtaacaggtgtgctccttttgattttgacagtactgctttacaaatgtggactggaggaaaaacatgtttcagcagggattttgaccgtgtatattttgtctacactggcaggtggttttgtagcagggaaaatggcaagggtcaggaaatttgtctgggggcttggaatcggtgtgctgtattttctgcttcttgtattgatttcctttggtatttaccacagcattcaggagccgtttcctcagcttttgatcgtgtgtattctttgcacaggaggtggaatgatcggcggtatgatttcgtgaggaagtaaacgtacagagagaacgatagaaaatctcttgtagttactcttttcggaaaaaatacatccctcatgaattcttataaaactggtaaaataactcataatttctaaaaaatgagcgatactaatagcagattgttatcgataaaaaccagatataaggagaagataagatgaaagcgacaggaattgtacgaagaattgatgaccttggcagggtggtgattccaaaagaaattcgaaggacacttcgtattcgggaaggagatccactggaaatttttaccgagagagaaggcagtgtgattttaagaaagtattctccgatcggagaaatcggtgctgttgccggactgtacgcagaaagccttgcacataccatgaactgtattgtgtgtcttactgatatggatcagattgtagcagcatcgggaaatgggagcaaggagctgctgaaccgttatatcagtaaagaactggagtatgcaatacaggctcgaaagcagatccgtacagaaaaaaggaaagcggactatattccgatattcgccgggggtgaggaatattctcaggaaattatttgtccgattatcagtggcggggacgtgatgggaacagtggtgtttttacacaaagaagaacacaaaaaattcagtgaagtggaagaaaaaatggcagctgtggcagcagaatttctgggcagacagatggaacagtaaaaaaatactttaaaaagtgatcaggatgtgttataattctaagaaaactagatgcttatgcatacacattaggaggaatagaaatgaaacatatcaaaacattaaatactcagacattgaatcatacagtgaaaaaaggtggatgcggagaatgtcagacatcttgtcagtcagcatgtaagacatcctgtacagtaggaaatcaggtttgtgaacacaaaaaataagaaactgaatatcagacatgagggcagcggccgtggtcgctgccttacgtgtgttatgcaaaaatataaaatttaaatgaaagaggggtaactgttgtgattcatcagtaccagaataatggatatcatattgtcctggatgtgaacagcggatctgtgcatgtcgtggacaagattgcgtatgatgtgatcggctgtctggaggccatgaaccctgcccatacgccggaaacgttaaaagaagagaagacggcagaatatctgctcgaaaagcttggcgatatttatgcagaagaagatttgagagatcttctggaggcagtggcagagctgacagcggcaggtcagttgtttacacaggatgtttatgagagctatatcggagaggtaaaagaaagaaagacagttgttaaggcactttgcctgcacattgcgcatgattgtaatcttgcctgcaaatactgctttgcggaagagggtgagtatcatggacgccgtgcgctgatgtctttggaagtcggaaagaaagcgctggatttccttgtggcaaattcaggaaagagaagaaatctcgaggttgatttctttggcggagagccgttgatgaactggcaggtagtgaaagatctggttgcctatggaagagagctggagaaaacaaacgacaagcatttccgttttacattgacaacaaatggggttctgctcaatgatgaagtgcaggaatttgtcaataaagagatggacaatgtggtgctcagtctggatggaagaaaagaagtcaacgacagaatgcgtccgtttaggaatggaaaaggaagttatgatctgatcgttccgaaattccaaaaactggcagagagcagaaatcaggaaaagtattatatacgaggaacatttacaagagaaaatctggacttttcagaggacgtcctgcattttgcagatctgggatttgagcagatttcaattgagcctgtagtcggggaagatacagatccgtatgcgattcaaaaagaagatcttccgaagatttttgcagagtatgataagctggcaaaaatcatggtagacagagaacgggaaggcagagggtttacgttcttccactttatgctggatttagaaggcggtccttgcgtggcaaaacgtctgtccggatgtggttccggaacagaatatctggcagttacgccttggggagatctgtatccgtgtcatcagttcgttggtcaggaagaattcctgctgggaaatgtagaggaaggaattacaaagccggagattccggaagaattcagaggatgcagtgtgtattccaaagacagttgcagaaactgctttgcaagattttactgcagcggcggatgtatggcgaattcttataaattccatcatacgatcaatgatacatacgaggtaagttgtgagatggagcgcaggcgtgtggaatgtgcgattatgatcaaggcggcactggctgatcaggagaggatggcagatcatgaagaagagtaaagggattatcagtctgattctgaccgtggtgctgattgcacttcttggatttacaacggtggtcggatttggaaaaggacagacgggggcagcaaagaatatcaagcttggacttgacctggaaggcggagtcagtattacctatcaggtaaaaggggatactccttccaaggaggatatgagtgatacaatctacaagcttcagaagcgtgtagaacagtacagtacagaagcaacggtttatcaggaaggggataaccggatcagtatcgaaatccctggtgtgacagaagcgaatgaaatcttaagtgagctggggcagccgggatccctgtattttatcaaagagaaggacagtgacggaaatccgaattatggactggatacctcaggacactatgtgcttgcaaaaagtatggatgagttaaaggaagaaggatctgtcgttttgaccggaacagatatcaagagtgcaaagtccggttcttatcaggattccacaacaggagcaaatgaaaatgttgttcagctttctatgacaaaggaaggtactgaaaagtttgcagaagcaaccaaagcggcaaaagaggcggaagaaacgatcgcaatctattatgatggtgaattgatcagtgtcccaagagtaaatgcagaaattacagatggtcaggcaatcattgaaggatccatggaatatgaagaggcagagcagctggcttctacgatccgtatcggtggcctgagtgtagaattggaagaaatccgttctaatgtagttggagcgcagcttggtgaagaagcaatcagtaccagtctgatggcaggtgcgatcggacttgcgattgtatttgtatttatgtgcatggtatatctgctgccgggacttgcatccagtcttgcactggtaatctacactggattgatcctggtgttgctcaatgcatttgatatcacactgacgttgccgggtatcgcgggtatcattcttggtatcggtatggcggtcgatgcgaatgtaattatctttgcgcgtgtaaaagaggagctgacggctggaaaatctgtaaaatctgcgcttaatgcaggttttcataaagcaatgtctgcgattttagatggaaatatcacaacactgatcgcggcagcagtgctctggctgaaaggaagcggtacagtcaaaggatttgcacagacactggcacttggtattgtcgtatccatgtttactgcacttgtgatcacccggatgatcgtgtatgcgttctatgcagttggaattcgtaatacaaaactttacggacggattaaagaagagagtgcgccgatcgatttccttggaaaacgtaagattttctttgcggtatcggtcgtagtgatcctgattggatttgtgtttatgggagtgaatgcaggaacaggaaaaggcgtcctcaattacagtctggaatttaagggcggtacatctacaaatgtaacatttgacaaagcatatacgttgaaagagattgatgaaacaatgattccggatctggagaaggtgacagatgatccaaacatccaggtacagaccgttgcaaacagtaatcaggtcattttcaagacacagacgctggatctggaaaaacgagaagcatttgcgaaatatatggcagataaattcggagtagaagaaaaggatattacgactgaaaacatcagttctaccgtaagctccgagatgcgtgtggatgcgatcattgcggttgccattgcgacagtctttatgctgctttatatctggctgcggtttaaagatattcggtttgcgacaagtgcagtagttgcactgattcatgatgtactggtggtgcttgctttctatgtgatcgcaagaatttcagtaggaaatacatttattgcatgtatgctgacgatcgttggatattctatcaatgcaacaatcgtaatctttgacagaatccgtgaggagatgaagacaaagaaacgtacagaagagctggatacgctggtaaacagatgtatcacaagaactctgacaagaagtatttatacctctctgacaacatttgtcatggtggcagttctgtttgttatgggagtaagctccatcaaagaatttgcacttcctttgatggtaggtattatctgcggagcatattcttctgtatgtattacaggtgcgctgtggtatgtgatgaagactaaaatcgtgaagaaagcagaatctgcgaaagctggaacatcgaaaaagaaaaaataacaaaaaatagtgaaagagactcttgaaacatgtgaaaaattaccacctggttcaagagtctttttgggattgtggtaaaaatgattaaaaaattacagaaaagtggaaaaatttaacctaaaattggaaaatagtaaattgataaaacggatttgaacatgtataatgcgtacatatctgataaaaatggtatgtcagaaaggagaaaaaaggtgaagaaaaaggctttgtacaaaaagtggatgtcaatgctgcttgcaggagtagtgacaacgaccgggttcatggggggaacggtaacactaagagcagcagaaacaacgaattgggttggagatgaaggactgagcggaacagcggacgctccaaaaccggacgatgtagtgccggatgcaaaccaatttaggtatcagaaagaggaacttgcagcattctgtcattttggaccgaatacattcaatgagattgaatggggtgagcactacggaaataaagcaccaagcgagatctttacattaaaaaatgattttgatgcagaaactttagtaaagactttgaaggatgccggatttaaaaagctgatcgtaacagcaaagcatcatgatggattctgtatttgggatagtaaatatacagagtatgatgtagcagcgtctggatataaagataaaaatggagaatcagatattctggcagagatatccaaagcatgtacagatcagaatatggatatgggattatatctgtctccgtgggatattcatgaaccgagttatggctacaaagatgagaatgggcagccgacaacaccagaaaatgataaaaaggattataatgagttttataacaaccaactggaagagattcttgggaatccaaagtatggaaataacgggaagtttgtagaagtttggatggatggagccaaaggaagtggagccaatgcgcaagagtataatttccaaaaatggtttgatacaattcagaaatacgaaggtaaaggtgtagacggacgagatgcagactgtatgctatttggggcagaagcatacactacggttcgttggattggaaatgagttgggaatcgctggaaaagatacatggtcaaagtcgaaagtagataaaaatgcaaatacgattaacagcaataagcagggaaatgcgacagttggttttgaagatggaaaccagtggaccgttccggaagcagatgctcgtattacttctggttggttctggggaacacagaaaaacactccaaaaacgatggaagaactgagcgatatgtatttcaattctgtcggacataatgcaacattactgttgaatgtgccaccaaataatcagggaacagtagatgaagcgattctgaaacgtgtagaagagtttggtaagaatgtcaaagaatcatttgatgaaaacctggcaaaagcagagggggcatctgtaaaggtatcttctgtcagagggaatgctcaaacctacaaaccaagcaatatgattgatgagaatgacgatacatattggacgacagatgatggaacaaagtcaggtgaaattttaatagacttaggaaaagaaacgaagtttgatgttgtatcagttgaggaggcaattcagaacggtcagagaatcaataattacaaggtagagtatcgcaatggagacagtggtgcatggactctgttggaagaaggaaaaactattggtgcgaaacgcctttgtagaacaagcgagacaacagcgcgtcagattaaaatcacagtagggacaacagatggaaaggttccaatgattagtgaagttggagtgtataaaactacagaaggtatggaaaaagccaatccaattccaaagggtatggaagtgattgatgtaacagataaaaatgtggaagatggaaaaggatttacttttaagggaacatggcatgatgaaaatcaaccacaatacatcaatggtacaaatacatgggcaaataaagatgcagaatttgaattgaaattccatggaacgaaagcatatctctttggaacagtggatccaggacatggaacagttgaaattacagtggatgatggtaaaccagttacggttgatacaaaagcatcaaaacgtgctgttggacaaaaatggtttgagacacctgatctggaagatggagatcatacgattaaattaaaggttacaggaaaagccgctggaattgaggctgcagctgttatcaacaatggcggaaaaggtatgatcgagctggagtctgattcatatacgatgaatgaagatgaaacaaaatctttaaaggtaaaacgtgttggtggaacaaaaggtaaaataacagcaaaattacagccaaatccggggacagcaattcaggatgattatgatacgacattgattccggaaattgtgttagaggaaggtcagacagaaacaactgcagacgttaaaacaagacgtaataagaacaaaacaggtgatcagtatttcacagctgaaattacagatgtgagcgaaggagcaatccttggatttaacaaaaaggcaaaaattaacatcaaagatatggagagcagcgaaggctcattggctgcacttgtaaaggaatgtgaatcgtataagaaagactggtttacttctggatgggatgaatttgattcagctctgaaacaggcaaagattgttttagaagataaaaatgcaactccggaaaagagaaatgaagcagaaacagctctgaaaaaagcgaaagatggattagtaaaacgtgaaaaatacacagcagaagatccgtttgtattcccatggagagaaaaagccaatgcaacattggaagctgaatttgcggaattacataacactggtgcagcagacgaaaaatggaagttgtcagtatcagatggtgactgggcaagtaataagaaatttatcaattgcttgaatggagatgatacgattgcaattccgtataaggtagaaaaaccagggacatatcatgttaaactgacttatagaagcggatctgcagacaatagtttggcatggaaagatgatgcgggaaatatcaaagccggatctgttgtagcaggaaatacaaatgcgaatgaaaccaaaacagtagattttgatattgtggcaacaaaagcaggatcaggtattttgacattagaaggagacacaaaagatgctccacagctcgatatgtttgaaatcacacctggggatgatattcagagagcagagtttactgtgaatgcttccgtagaaggagacggtggtacaattacaccagatggagctacaacagttacagaaggaaatgatgttacattcaagatcacaccagacaagacacataaggtagcggatgttctggtaaatggtgaatctgtaggagctgtcacatcttatacattaaaagatgtgaaggaaaatgcaacggttgttgctaaatttgctccggcagcatatacagaagaaaaccgtttcaatttcccgacagaagtaaatggaacagcaatcacagcagaggcagagcattttgcattaaagaatgtaggaacaggtgaagcatggccattacaggtgtctgcagccgattgggcaagcaatggatactttgtaaatgcaatgaatagtggtgatcagattactttacactatcatgcagaaaaaccggggaaatataaagcaactgtacagttccgtagcggtgatacaaataatggattgacttggtctgaggctgataataaaattgcggctcagacagaagttatgaaaataggagctggagatcaggcaaaagcaacacacacacaagatatcgagtttgtagtaaatgaagcaggtgatggaacactggtatttacagcaccagaaaagaatgcgccacagcttgataaatttgacattactctggtagaagaaaaagcgccagttgtagtgaacaaagatgcattgaaagcagcaatcgatgcagccaaagaagcgctgaaagaagaggacaagtatacagaagagtccgtgaaagcgctgaaagatgcagtagcagaagcagaaaaagtagcagcagatgaaaacgcaacacaggaaagtgtagatgcagctacaaaagcagtagaagaagcaacaaaaggtctggcagaaaaaccggctgtaccagaagcagataagacagccctgaaagcagttcttgcagatgcggctcagaaacttgcgggagcagatgcttacacagaagaatctgtaaaagcgctgaaagacgcagtagatcttgcgcagaatgtatttgataattcggatgcgagccagacagaggttgatgcagctgtgacagctgtacgagatgcaattgaaaaattgcaggaaaaaccaccggtacagaaagaatttacgatcacagcagttgcacatggcggtggaaccattgatccaagcggtgcagtgaaagtagaagaaggaaaagatcaggtatttacaatccaaccatatgaaggatttgaagtaaaagaagtatttgtaaatggagaatccgttggagctgttacagagtacaaatttgaggcagttcgtgcagatgcaagcattgaagtattcttcgcagaaaaagaagcagtacaggctgacaagacaaaactcaacgagtccattgcagcagcagaagaacttctgaaacatgcagaggactatgttccggaagatgttcagaatctgatggaagtactggatgcagcgaaagcggtagcagcagatccggcagcgacacaggaaacagtagatgcggcacagaatgcactggatgcagcaatgaatattgcaccgatccagaaagagtttgcaattatggcagcagcaggagagggcggaagcatcactccatgcggtactgtaaaagtagaacgcggtatgagccagacatttgtgatccagccggaagaaggatatgtgatcagtgatgtactggtaaatggacagtctgttggtgcagtggcagagtatacattctgtgatgtcaatgcagatgccaatattacagcactcttccagaaagcagctgtttctacagataaatcacagcttacagctgttataaaagaagcagaggaacgtctggagcaggcagataagtacacagaagagactgtaaaagcgcttcagaaagaagtggaggcggcgcagtttattcttgcagacaaagaggcatctcaggcagacattgatacagcagtacagaaagtaagaactgcgatcgatgcactggaggaaaaaacgcagactgaaaaaccagaaaatccagacaataataaaccggataacaacaaaccgggaaatggaaacaatggcggacaaaacaataacggaaacagcaatcagtctacaacacagaaaccgtcaactggtactccaaacaaagcagtgaagacaggagatgccactccgattgccggagcagtatccggacttcttgcaggaggagcagcacttctggcattcctgaaaagacgcaaataaataaaaataaaaaattcttcctaaacatgagcagtgctctgtgccgaaaggcatggggcactgttttatggtacgggaaatttggctttggcggaagatgtttgaataaaatattcgctggcagaacagttcttgttaccgttcacaccattccccacctatccatgcgcaatcgtcgtgcttgcgcactccagttctggacagatttacagaaaatttttagtatgctacaataaaaattaacagctagaaaaacaagaaagatacttgggaggaactgacatggaaaagtggtttgtgtccatgaagaaagcggattttacgcagattgcggaaaaatatcatatttccccgatcatcgcgcgcctgatccgaaacagggatattttaggcgatcagaatattgactattatttaaatggaacgattgcagatctgcacgatgggatgctgatgaaaaatatggatacggcagtggagattctggaggaaaaaatccgggaaggcgaaaaaatccgtgtgatcggagattatgatatcgacggagtcaatgcgacgtatattttgaaaacaggattagaaagtctgggagctttggtggatacggatattccggatcggatgaaggatggatacggcctcaatcagatgctcattgacagggcattggaggacggtgtagatacgatcattacctgtgacaatgggatcgcagccgcttcagagattgcttacgggaaagcgcaggggatgacgatcattgtgacagatcaccatgaagtaccttatctagaagcaggaggagagaaagaatatctgattcccgatgcagatgcagtggtcaacccgcatttaccgggagatccttatccgtttaaaggtctgtgcggtgcggcagttgtgtataaagtggtggaagcgttatataatgtcatggggcaggatgcagatgatgtagattttctgatggaaaatgtggcgattgcgaccgtgggggatgtgatggatctggtggatgagaaccggatttttgtaaaacaggggctggaaatgctgaaacgcacgcaaaatgaaggtctgaaagcattgatggaatgcacgcaggtaccgatagagagattgtctgcctatcacatcggatttgtcatcggaccatgtatcaatgcgagcgggcgactggatacggcaaagcgggcattggagctccttgaggtgaagaacagaagagaagctgtcatgatggcagaagatttaaaagcattgaatgacagccgtaaggaaatgacagaaaaaggggtagagcaggcagttgaacagatcgagacaacggatttgaaagaggatcaagtactggtcgtgtatctgcaggactgtcatgagagtattgcggggatcattgccggaagactgaaagaaaaatattataagccggtgtttgttctgacgcagggagaacatggcgtcaaagggtcggggcgttccattgaaagctaccatatgtttgaggaaatgtgcaaatgcagggcgttattcacaaaattcggaggccataagctggcggcagggctatctctggaagaggagaatgtggaacgtttccgcagaacgatcaatgaactctgtgagctgaccagtcaggatctgatgccgaaggtatccattgacatgcagcttcctcttgcgtatgtaacagaagagctgattgaagaactggaacttctggagcctttcgggaaaggaaatacaaagccgttgtttgcggaaaaaaacttaaaagtacagaatctccgtgtgatcgggaagaatcagaatgtcctgaaatttcaggttctggatcgaaatggacggaaaatggaggcgatctatttcggagaggtacaggagtgtatggagtatctgcagggaaaagaagaggtggcgctgacattttatccgtcggtcaatgaatacagaggaaacaaaagcatacagattacagtggtaaattatcaataatgatgatatactaatccatatggaattttacgataaaaagaaaagggggatttgatatggcaggtacgctggaatatgaacttctgaataaaaatctggaaatggtggatggccatgccgtgaaagcacctgaagattatcaaaaccctgagcagttatatgaagcgttgattgcaagggtaagaaagtatcatccatccgcagatatttctctcatcgagaaggcgtataagctttccagagaggcacataaagagcaggtccgcaagtccggagagccttatatcattcatccgctctgggtggggatcattctggcggatctggagatggataaggagacgatcgtggcaggaatgctccatgatacggttgaagatacagagatgacagtggaggatattacaagagagtttggcgaagaggtagcgctgcttgtagatggagtcacaaagctgggccagttgtcttattctaaggataaattggaagtgcaggcagaaaacctgcgcaagatgtttcttgccatggcaaaagatatccgtgtgatcattatcaagctggcagaccgcctgcacaatatgagaacgctggagtttatggttccggcaaaacagaaggaaaaagccagagagacgatggatatctacgctccgatcgcgcagaggctgggtatttccaaaatcaagacagagctggatgatctttctttaaaatattatcagccggaagtgtatttccagctggtaaaggatttaaatgagagaaagacagagcgggaagagtttgtgcagcagatcgtggcagaggtctctcaccatatggagaatgcccatattcaggcaaaggtatatggaagagtgaagcatttcttcagtatttacaaaaagatggtcaatcagaataagactctggatcaggtgtatgatctgtttgccgtgcgcattatcgtagattcggtcaaagactgttatgcggcgttgggtgtgatccatgagatgtatacaccgattccggggcgattcaaagactatatcgccatgccgaaagcgaatatgtaccagtctttgcatacgactctgatggggccggcaggacagccgtttgaaattcagatccgtacagaggagatgcacaagacggcagagtacggtattgcggcccattggaaatataaggagagcggcggttcggctaagaataataagagccgtgaggaagaaaagttaagctggcttcggcagattctggagtggcagagggatatgtcggacaacagagagtttttgagtctcttaaaaggcgatctggatctgtttgcagaagatgtgtactgtttcactccgaacggagatgtgaagaacctgccgaacggttctactccggtggattttgcctatgcaatccacagtgcagtgggcaacaagatggtaggtgcacgtgtcaacggcaagctggtcaatattgattacaaaatccagaacggagaccgtattgagattctgacatctcagaattccaaaggtccgagccgggactggctgagcatcgtaaagagcacacaggcaaagaataagatcaatcagtggtttaagcatgagtttaaagaagagaatattattcgaggaaaagagctgattgccgcatactttaaatccaagtcgatcgcacaggcggatatcatgaagccaaaatatctgcagatcgtccagagaaagtatggattccgggattgggatgcagttctggcagcaatcggacacggtggactaaaggaaggtcaggtagtcaaccgtctggtagaagagtatggaaaagatcacaaaaaagagattacggatgcgacgatcctggagaagatttctgaggcaaacaatcagaaggtgcatattgcaaaatcaaagagcgggatcgtggttaagggaatcgatgacatggcggtgcgcttctccaagtgctgcaatccggttccgggtgatgaaatcgtaggatttgtgaccagaggaagaggtatgacgatccaccgtacagattgtgtgaatatgctgcatctgtctgctgtggagcgggagcgtctgatcgatgcagagtgggagaataatgcagagacggaaggcggaggtcagtatctggcagagctgaagatgtatgcaaacgacaggcagggactgcttctggatgtaacaaaggtatttacagaagaaaagatcgatgtcagatctatgaatacacgaaccagcaaaaaaggaaccgctacactggaaatgggatttattgtaaagggcagagaacagctgaatcttatcataaaaaaactgcgcaatgtagaaggagttctggatattgaacggacagcggggtagagaaaaatgagaatcaaaaaatttgtgatcggaatggtcggcaccaactgttatgtggtgtacaatgaaaatacaaaagaatgttttgttgtggatccggcggcaccatctgcgccgcttgtcgaatttatccagacagaaggtcttcagttgcagggaatcctcctgacacatggtcattttgatcatattatgggaattgacacactgcgcagagaatggtcagttcctgtctatgccagtgcactggagcagaaggttctgacagatgccaatgtgaatctgtctgttgcatatggagcgggttatgtgtttgcggacgccaagtttctggaagatggggcatctctcgcacttgcaggatatcagatccgtatgatctccactccggggcatacggcgggaggatgctgttattatatagaagaagaggaggttcttttcagcggagatacactgtttgcaggctctgttggaagaacagattttccgacaggcagtatgagtacactggtgcgttcggtaaaagagcgattgctgagccttccggaagatacacaggtgtatccgggacatatggaggcaacaacgatcggatttgaaaaggagaataatccgtttttgtaagaaaacggaagagaaatatgatgatacagatcagcagtaaagatacgttatatatgtataatttatatcatattgtgaaggcttttttcccgaatgaggagatcagccagaatctggacgaaaagcaggaatctctggtttcagtgaaactggaagagaattcttgcttttatgttcctgtttcagaaattgcagactgtccggaccgccaggatggaaagaagaaggtgacaaagattgtctatgactggctgtcaaaagtgaccggacggatacttgcctgggggatgctgacaggtgtcagaccgacaaagctggctatgcagaaactggaagccggtatgagccgaaaagaagtctgcacatttttagagcaggagtacggagtcagtcaccagaaggcagaacttggcattgcgattgcagagcgggaaaaagagctgcttggcagactggactatgagcagggattcagtctctatgtagggattccgttttgtccaagcatctgttcgtactgttctttcagttcgtcccctctggcggagtggaaagaccgggtagatgattatttaaaggcgctctgtcaggaaatccgggcactgggagagcgggcagaagaaagaaagcttaatacgatctatatcggaggagggactccgacaacactggaggcagagcagctttttgagcttttggatacgatacagaagtcgttttcatttgagtatctgcaggagtttacgatcgaggcgggaagaccggacagcattacaagagaaaagctggaagtgatgcgaagatttccggtgaccaggatttctgtcaatccccagaccatgcagcagaaaacgctggatctggtgggaagaaagcataccgttcaggatgtaaaagacattttccatgcagccagagagcttggatttgacaatatcaacatggatctgatcgcaggacttccgggagagacggcggaggatatgagggatacgctttgtcagattgaagagctttcgccggacagtctgacggttcatgcgctggcgatcaagcgggcggcgaagttcggccaggagcagcgcaagattgatctgcattctgagatcgaacagatggtagaagagagtgccagggcggcagaacgcatgggacttgtgccgtattatctgtaccggcagaaaaatattgcgggaaattttgaaaatgttggatatgcaaaggttgacaaagccggaatatacaatatacttattatggaagaaaaacagacgatccttgcagccggggcaggtgcctccacaaagatcgtgcttccggagaagatccgtctggacaatggacgggagacgaatctgatccgcatagaaaatgtgaaaaatattacggagtatgaaagccgtattgatgagatgatagagagaaaaggagaatggttatggcgctgaaaaagaaaccggtaaccggaatgaaagatatgatgccggcggagatggagatccgcgattatgtgatcggacagatcaaagagacataccgcgcatttgggttctcatccattgagactccatgtgtagagcacattgaaaatctctgcagcaaacagggcggagacaatgaaaaactgatcttcaagattttaaaaagaggagaaaagctgaagatcgaagaagcaaaagaagaaaaagatgttgtggacggaggacttcgttacgatctgacagtaccgctgtccagatactatgcgaacaatgcaaatgaactgccgtctccgtttaaagcacttcagatgggaaatgtctggagagcggacagaccgcagagaggacgattccgtcagtttatgcagtgtgatatcgatattctgggagagccaggtaatctggcagagatcgagctgatcctggcaacgacgacgctgcttggaaaactggattttaaaaactttacgatccgtatcaatgacagaagaatcttaaaagcaatggcagcatacagcggatttgcagagagtgattatgaaaatgtattcatcatcctggacaagatggacaagatcggtctggatggtgtggcagcagaattagaggaaaacggatatgcaaaagggtctgtggaaaaatatttgcagttattcaaagagattacgaatgacgtggaaggcgtacgttactgtaaagaaaaactggaaggctttcttgcggatgacgcggcggcttcgctcgagatgattattacaagtgtggaaagtgcaaaggaagcggatttttgcatgaaatttgatccgacactggttcggggaatgtcttactatacagggacgatctttgagatttctatggacgagttcggcggttcggtaggcggcggtggacgttatgatgaaatgatcggaaaattcaccggacagaatacaccggcagtcggattttccatcggatttgaacggattgtcatgctgcttttagaacgaggatatcaggtaccgacagccgcacagaagaaagcatttctgatcgacaagaagatgccgaaggaaggcatgctcaagatcctaaatctggcaaaagcagagcgcgcacttggaaaacaggtgatgatcgtcaacatgaagaaaaataaaaagttccagaaagaacagctgatggaacagggatatacagagattgtagactgctatgctgacaatgtggagcagttgtagagaagaagggagaaacagagaaatggcagaatcaatgcagggactcaaaagaacacaccgatgcggggaactgtccagtgcaaacattggagagaaagtaaccgtcatgggatgggtacagaagaacagaaataaaggcggaatcgtatttatggatctgcgtgaccgctccggaatccttcagatcgtatttgagggagaagaacaggcagagctgatggaaaaagcttcaaaattaagaagtgagtttgtagttgcagttgtaggaaatgtggagaagagaagcggtgcagtcaatgaaaacctggcaacaggagagattgaggtgcgtgcagaagagcttcgtattctctcagaatccgaggtaccgccgttccaggtggaagaaaacagcaagacaaaggaagagcttcgtctgaaatatcgttatctggatttgagaagaccggatcttcagagaaacctgcgtatgagaagtcaggtcacaacactggcacgtcagtttttcgcagaagaaggcttccttgagatcgagaccccgatcctcggaaagacaacaccggaaggggcaagagattatctggtgcctagccgtgtacatccgggaagtttttacggacttccacagtcaccacagctttacaaacagcttctgatgtgttccggatgtgaccgctatatccagatcgcaaaatgtttccgtgacgaggatcttcgtgcagacagacagccggagtttacccagatcgatatggagctttcctttgtggatgtagatgacgtgatcgaagtcaacgagcgtttccttgcaaaactgttcaaggaagttctggatgtggatgtacagcttccgatccagagaatgacatggcaggaagcgatggaccgctacggttctgacaaaccggatacccgtttcggtatggaactggtgaatgtgacagagactgtgaaagacagtgaatttgttgtgttcaaaggggcgattgagaacggaggaacagtccgtggtatcaacgcaaaaggacagggagcaatgccgcgtaagaagattgacaagctggtggcatttgcaaaagatttcggtgccaagggacttgcttatattgcaattcaggaagatggaaccgtgaaatcctctttctccaaatttatgacagaagaagagatgaacaatctgattgcagcaatgaacggagaagcaggagatttactgctctttgcggcagacaagaacaaagttgtatgggatgttcttggaaatttacgtctggaactggcaaaacagatggaacttctggacaagaatcagtacaatttcctgtgggttacagaattcccgctgcttgagtggagcgatgagcagaatcgttatctggcaatgcatcacccattcacgatgccgatggaagaagatctgcagtatattgattccgagccgggcagagtccgtgcaaaagcgtacgatatcgtcttaaatggaaatgagatcggtggaggaagtgtaagaatcttccagaacgacgtacaggagaagatgtttgaggtgcttggatttacaaaagagcaggcatatgagcagtttggcttccttctggatgcattcaaatacggagtaccgcctcacgcaggactggcatatggtctggacagaatggtcatgctgatggcaaaagaagacagtatccgtgatgtgatggcattcccgaagatcaaagacgcatcctgcctgatgacacaggctccaagtatggcagacaataaacagttggaagaactgggactgaagttggatgcaaaagatgtaaaaacagaagaataatgtgaagaagtgtgcattttttgaaaaatggtgcatacagaacgtgaattatggagagctctcaactacacaagtagtaagagctctttttgtattgcttttgatttatcaaaggaaacggagagggaactcaagcagggattgaactggaagtggaagaaatgccgggttttgaaaatataaaaaagactgtaaatctttcaatctacagtctcttaagagcgatagacggggttcgaacccgcgaccccgaccttggcaaggtcgtactctaccagctgagccactatcgcgtttgttttgtgttcccctcggaacaatatatactatactacaggagttcttatctgtcaacaacttttttgaaaaaa

SEQ ID NO: 6975 - DNA, 115320 bp, Unknown
  gut microbiota DNA sequence
gctatgatgtgttaaaatcgaaaagaatcattcttcagtccaaaagaggagaatgaaatagagatcaaaagggataagggagctaaggaacaggaggaaaaggtatgatggcagcagcgataggaatgataattgtagcattggcgcttctgattttttgtgttgcggtaatgtggaaagtattttgtaaagcaggagaacccggatgggcgtcattgatcccgttttataatttgtatgtaatgaccaggataacctgggggagaggatggctgtttatttttggattcctgccgctggggaatctgatatttgcaatttttacaatgataaaactggcaaaagtatttggaaagaagggtggatttgcctgtgggctgattttcttaagtattgtctttcttccaatccttgcgtttggaaaggcagagtatacaggtccggatcgggagaaaagtacaggagcgatcatagccagtgcgatcactggcggaatcggtatcattctgttggtacttgaagtgatagcagttgtcgcactgggcctgtttgcagtttcagatcagacagtacaacagacacaggatgcggtgatttcacaagaagttccggaggaaacacaggaagaaccagatgtgaaagaagaggagggcgttcagagagaatatgagggcactccgattgaaggatatgaggattttgagacagtatccctggatggttatcaatgggttacggatgtcacattgttcaaggctggggagaatacagttacggagtccacagcaacttccgcaaaagatggaattgagctgaaagcaggttttacacttctggctgcggatgaaacgattgagcagagaatttcggcagaagtggaaaatatccgaaagacattggaaagtcaggcgggaatctatacggatattactgtaggtgagatggtagcagaagacggattcgtgatgcagcagctgatctgcaatcagatcggggcagatggagtggcttatccgtgtactgagatcatacaggttcagttgatggaggaccgggaaattctggtgagcagtgtatctttgaatacttctcaggcaacagaaaacacagagcgattgtttacacaggcctgtgaattatatggtattgcctttcaataaggtcagctatagatagaagcggacagaagaatgtccgctttacttttcgaaaagattttgttactctatagaaacagaagtctgtagatggagcaaagaaaaacagtggattcaaaaacagaggtgaagagtatggaaaataaaaagatcaaagtggcattgctgggacttggaacagttggaggcggagtgtacaaattgatccagaggagatcagaaagtatgatacacacagttggcgccgagctggaagtggaaaagatcctggtacacagtctgcataaaaaaagagaaggtgtggatacagagcttctcacaacggactggaaatcgattgtaaacgatccggagattcagattgtgatcgaagtgatgggcgggatcgaaccggcaaagtccatgatcgaggaagcacttggagccggaaagcatgtggtgacagccaataaagatctgatggcagaacacggaggagagcttttggaccttgcggcggcacatggctgtgatctgctgtttgaggcatcggtggcaggcgccattccgatcatccgtccgctcaaacagtgtcttgccggaaatgagatctcagaagtgatggggatcgtgaacggaacgacaaactatattttaaccaagatgtttgaagaaaacatgagttttgaagctgcacttgcaaaagcaacagagctgggatatgcagaggcagatccaacagcggatgtggaaggactggatgccggaagaaaggccgcgatcctttcctccattgcctttcattccagagtacagtttaaagatgtttatacagaaggaatcacaaagatcacagcagaagatattgcctatgcaaaagagtttgactgtgtgatcaagctgcttgcagttgcgcacaatacggacaaagggattgaagtgggagtgtatccggtgctgcttggaaaagagcatcccctgtcgtccgtgcgggattcgttcaatgctgtttttgtgcacggagatgctgtggatgatgcgatgttttacggaagaggtgccggggagatgccgacggcaagtgctgttgtcggtgatgtgattgatgttgccagaaacctgcagtttggatgcaacggaagaatcagctgtacctgctatcaggatctgccggtgaagccgtttgatgaagtgaaaaataaatttttcctcagaatgcaggtgaaaaacgaaccgggagttctggcgaaagtggcaagtgtatttggcggtcataaggtaagtatccgcagagttgtgcagaagcatgtacaggaagaagcggctgaactggtcatcagtacagaaaaagtgaaagagtatcatattaaggatgcgctgagagagctgcagaaaatggacagcatttctgaaatcagcagtatgatcagagaatattagaaggagaagataagattgagttacgcagataaagtatttatagagatgtgcagagacattattgacaacggaacgagtacagagggagaaaaggtacgcccggtatgggaggatggaacctctgcgtacaccatcaaaaaatttggcgttgtgaaccgttatgacctctcaaaagagtttccggcactgactctgcgaaggacagggatcaagagctgtgtggatgagatgctgtggatctggcagaaaaagtccaacaacattcatgacttaaacagtcacatctgggacagttgggcagatgaggacggttccatcggaaaagcctacggctatcagatgcaggtaaagcatcagtataaagagggaatgatggatcaggtcgatcgtgtgatctatgatctgaagaacaatccttacagccgccggatcatgacgaatatctatgtgcatcaggatcttcatgagatgaatctgtatccgtgtgcatacagcatgacatttaatgtgacaaaagaaaaggacagtgacaaactgacattaaatggaatcctgaatcaacgttctcaggatgtactggcagcaaataactggaatgtgtgtcagtatgcggtgctgcttcatatgctggcacaggtgtgtgatatgaaggtcggagagtttgttcatgtgatcgcagatgcgcatatttatgacagacatatcccgatgatcgaggaactgatcaaaagagaaccgcttccggcaccgaaattctggctgaatccagaggtaaaggatttctatgaatttacaccggatgatgtacggctggatggatatgagacacatcctcagatcaagaatattccaatcgcggtataggagttgtgcaaaaaaaggaggaaatgaatatgaacgcaattgtagcagccgataaaaactgggcaatcggatataaaaacaaacttctggtcagcattccggcagatatgaagtttttccgtcagatgacaggtggaaaggtagttgtgatgggaagaaagacgctggaaagctttccgaacggtctgccgctgaagaaccgcaccaatattgtgctgacagggaatcccaattatcatgtgaaagatgcagtgatcgtgcatacaacagaagaattgctggaagaactgaaaaaatacgatgaggaagaaatctttgtgatcggcggagaaagtatttaccggatgatgcttccttattgcagcaaagtatatgtaacaaagatcgaccatgcatatcaggcagatacgtatttcccgaatctggatcagctggaagactgggaaatgacagaagtcagtgaagagcatacttgttttgatctggagtatgtattttcgacttacgagcgccgacagtgaaggcaggcatatcatgaaatttagaaaaacatacaagagaaaacaggcggcagtgctgctgagtgtgtttcttttggtgacaagtgtggccggatgtcagagagtgggggctgtgaaagagaccggcgaagagaaagtaaatgtcgtgacaaccatttttccacagtatgattttgtacgtcagatcgcaggggataatgtagaagtatcgatgcttttaaagccgggagaagagacacactcctatgagccgacaccgcaggacattctgaagattcagaattgtgatctgtttatttatgtgggcggtgagaacgatgaatgggtggaggatattctggactccatcgatacagaacatatcagactgcttcgcctgatcgactgcgtggatacggtaaatgaagaacacgtagaagggatgaaagaagaacgtggtcatgaacatgaagaagaggaagagcacgagcatgagcacggggaagaggagcacgaaacacatgagacgctgaccccggatgaacatgtatggacgtctccaaagaatgccattgcaattgtggagcagattgcagatgttctgggtgagctggatccggagcagacggcagtttatgaagagaacgaaaaagcgtatgtgagtcttttagaagagctggatgatgagtttcgtgaggtggtaagttcggccaaacgcgatgtgctgctttttggagaccgttttccgttccggtattttgcagatgaatacggtctgaaatactatgcggcatttccgggctgcgcatccgatacggagccaagtgcggcaacgatggcatttctgatcaacaaagcaaaggaagaacagattccggtgatcttaaagatggagctgagtaatgagaatattgcaaatgccattgccgagacgacacatgcgaaagtgaagacgttttacagttgtcataatctgactgcaaaggaatttgcagacggggagacttatctgagcatgttgaaaaagaatgtagaaacattaaaggaggctttgaactgatggcattgataaaatgtgatggaatttcgatcgcatatgagggacagacggttgttcgggatctgtctttttggatcgagcagggagattatctctgcattgtgggagagaatggttccggaaagagtacgctggtaaaaagtcttcttggattaaaaccgccctttaaagggcagattctgctgggagacggattgaagcaagacgaaatcgggtatcttccccagcagacggtcgtgcagaaagattttccggcaagcgtctatgaggtggtactttccggcagactcaacagcagaggctggcggccgttttacagtgcagcggataagaaggcagccagagagaatatggagcttttaggaatccgggaaatggaacaccagtgcttccgggatctttccggcggacagaaacagagggtgctgctggcgagagcgctgtgtgccacaaagaagctcctgttgttagacgagcccgtgacaggactggatccgctggtgactgcagagttttaccagttgattgaaaaaatcaataaggaggctaaaattgcagttgtcatggtgtctcatgatatcgaaagtacgatacagtatgcaagccatatcctgcatttgcaggagagcgccctgttttacggaactgcgcaggaatatcaaaacagtgcagtcggcaagagatttctgggaggtgagggaaatgcttgatacatttatggaaatgatgtcctatccatttatggtacgggcgtttctggtgggttccctggtggcattgtgttcggcacttctgggagtcagtctggtactgaaacgctattcgatgatcggagacgggctttctcatgttggattcggggcactggccatcgcggctgcgctgaacatggcgcctttggcggttgcaattccggtggtcgtggtggctgcggttctgcttcttcgcatcagcggcagcagcaagatcaaaggagatgcggcaattgcactgatttctacgggagcactggcgatcgggattatggtgatttcgatgacgacaggaatgaacactgatgtttataactatatgttcggaagtatccttgccatgagtggtgaggatgtgcagttcagtattcttctgtcggttgcggtgctgatcttatatctgtttttctataataagatttttgcgatcacctttgatgagactttcgcccgggcaacaggagtccgtgcaaatctgtataatactctgattgcggtgttgacggcagttacgatcgtgttgggaatgcggatgatgggagcacttctgatctccagtctgattatttttccggcgctgacttccatgcgggtgtttaagacctttaagggtgtgattctgaattcagcgattctatcggttgtatgcctgattctgggagtgacgatttcctatgtgtatgcaacaccggcaggtgcgagtgtagttgtggtcaatatggcaatgctggctgtctacagtgtgatcggagccctgaaaaacagaaacaacgggaagtaaatgcgaattggattaaaaaagatcaagaaaaggaaattgacaaagataaaaatacaccgtataatgaggataaatttcagcagcgaaagcctctgaaattcagtgtatgaggaattttattcgccctgagctttttgacagcttggggcgttttgcataaggagggtgtgaaaggtgaggcagatttcaggaaacaaattatttgtaaaagcattaaaagaagaagacgtagaagtattgttcggatatccgggcgcgtgtacgatcgatatcagcgatgagctgtataagcagagcgggattgatgtgatccttccgagacacgagcaggcactggtgcatgaagcggatgcgtatgcgaggacaacggggaaagtcggcgtctgtctggtgaccagcggaccgggagcgaccaatctggtgacaggacttgcgactgccaattatgacagtgttccgctggtctgttttaccggacaggtggcgagacatctgatcggaaatgatgcatttcaggaagtggatattgtggggatcacacggagcatcaccaagtatggtgtgacggtcacgaagcgggaagatcttggacggatcatcaaggaggcattttatatcgcaagaacgggaaggccgggaccggttctgatcgatcttccgaaagatgtgatggcggagcttggcagtgcacagtatccgaaagaggtgaatatcagaggatataagccgaataccagtgtacatatcggacagctgaaaagagcgatcaagatgcttcacaaggcaaaacgaccgctgtttctggcaggcggaggggtgaatattgcgcgcgccagtgcattgtttacagaagtggtggaaaaaacacaggtgccggtagtgacaacgatcatggggcgaggcgccattgcgacaaatcatccgctgtttatcggaaatctggggatgcacggcgcttatgcagccaatatggcagtcagcggctgtgatctgctgttttccatcgggacgcgctttaatgaccggatcacgggaaaactgcatgaatttgcgcctcatgcacaaattgtccatattgatatcgatacggcatcgatttccagaaatattcatgtggatattccaatcgtagcagatgccaaagaagcgcttacgaagatgacggagtatgtggaagagtgcgagacaaaaaaatggcttgcgcagatcgcggcatggaaagaggagcatccgcttcggatgaaacggcatgcattgatgagccctctggatattattgaagagatgaaccgtcagtttgacgatgcaatcatcacgacagatgtcggtcagcatatgatgctggtgtctcagtatgcggagattacagaaaagaagcagcttgtcatgtccggaggactggggacgatgggatatggattcccggcggcgatcggagcacagatcggtaatccggagaaacgagtgatcgcagtttccggggatggcggtatgcagatgaatattcaggagtttgcaacggcagttctggaggagacaccggtcatcgcctgtgtatttaacaatacatatctggggatggtgcgtcagtggcagaagctgttttacggaaaacgctatgggatgaccaatctgcgcgcaggagcgctttcgagacggacagatggagccgaatttccggagtatacgccggattttgtaaaactggcagaaagctatggggcaaaaggaatccgtgtgacaaaaacagaagagatctcggcagcatttgaagaggcaaagaaaaatacaaaaactccgaccctgattgaatttatcattgatccggaagagatggtatatccgatgatcaagccgggcggaacactggaagatatgattatggattgttaggaggaagacggacgatggcagataaaagtatgaaaaaaagatggatttctctgtatgtggaaaatcaggtgggagtgctttctaagatttccggtctgttttccggaaaatcctacaacttggacagtctgacagtaggaaccacagaagatccgacggtatcccgaatgacaatcgccacagtcagtgatgatgagacatttgagcagatcaaaaagcagctcaatcgaatggtagaagtgatcaaggtcatcgattttacagatatttttgtgcggatgaaagaaatcctttatatcaaagtccggaagtgtacactggatcagaaagtggagctgcatcagatcgcagagacatttaaaggaaaagtgatcgactgtgacagagacagcttgcttctggaatttgtacagaccgggacgaaaaacgacgcagtggtgaagctgataaaagaagaattcaaaagtattgaagtcgtcagaggcggaagtgtcgggattgaatccatcagtatgatggaacgataaaaaaacagagcgcactcttgatttttgagcgtgagagtattataattgcaacaaacaagttgcaaatacgttcgattgaggaatggaggagtttttgatggagaagaaacagatcgattgggagaatctcggatttggttatgtacagactgaacagagatatgtttccaattataaagacggaaaatgggatgagggaggactgacagaagacgccggtgtggtactcaatgaatgtgccggagtcctgcagtatgcacagactgtatttgaaggaatgaaagcttatacgacagaagacggtaagatcgttgtattcagaccggatctcaatgctgcccggatggcagattctgcgagacgtttggagatgccggtatttccggaagaacgttttctggaggcagtcaaagaagtggtaaaagccaatgcagcgtatgtgcctccgtatggttccggggcaacactttatattcgcccatacatgtttggaagcaatccggtcatcggagtcaagccggcagatgagtatcagttccgggtgtttgtgacacctgtcggaccgtactttaaaggcggagtaaaaccattgacgttatgtgtatctgattttgaccgtgcggcgccgcatggaacaggacatatcaaagccggactgaattatgcaatgagtcttcatgcgatcgtgacagcacatgcgaacggctatgatgaaaacatgtatttagattcggcaacaagaacgaaagttgaggagacaggcggggcaaactttattttcgtgacaaaagacaataaagtggtgacaccgcattctgatacgattctgccgtctatcacaagacgttctctgttatatgtggcagagcattatcttggtctggaagtggaagagcgggatgtgtatctggatgaagtgaaagagtttgcagagtgcggactgtgtggaacagcggcggtcatctctccggtcggaaagatcgtggatcacggaaaagagatctgcttcccgagcggaatggaaaagatgggaccgaccattcagaaattgtatgacacactgacaggaatccagatggggcagattgaagcacccaaaggatggattcaggtgatcgagtaaggcagtataaaatacgtcttttacagtaaaactgtaagagacgtattttttgagtttgttgatggtttcttttcttatcagatgttggaagaagatctccattgcgattatgaaggaaaagggctataattgaatttatgcagagaagggaggctagggtatggcacgaagagtatcaattggatatcaggaatttgaggatattattataaacgatttgttttatgtagataaaacacaatttataaaagcgtggtgggagagaagaaatcgtgttactttaattacccggccgcgccgcttcggaaaaacactgacaatgaattagatgaatacgatacgccaatgcaggaagcatggttttgctttttgcggaaagcaggttctgatagggagataacgaaaagatgctttaaaaacaggcggaagaatttctcaaatttctgaacttaagttgatatccgaccgaaaatagtggtaagatagagttaaaatcaaaagaggaggttttgaatcatgtcagaaaacaaatatgcaggaacacagacagagaaaaacttagaggcagcttttgcaggagaatcacaggcaagaaacaagtatacatattttgcttctgttgccaaaaaggaaggatatgagcagattgcagatctgtttctgaagacggcaaacaatgagaaagaacatgcaaaaatgtggtttaaagaacttcagggaatcggcgatacggcacagaatctggcagcggcagcagatggagagaattacgagtggacagatatgtatgacggatttgcaaaaacagcagaggaagaaggatttccggagctggctgcaagatttcgtctggtagcagcgattgagagacatcatgaggaacggtatcgtgcactcttaaagaatgtggagacggcagaagtatttgccaaaagtgaagtaaaggtatgggaatgccgcaattgtggccacattgtagtcggaacaaaagcaccggaaatttgtccgacctgcaatcacccgcagagctattttgaggttcacgcagaaaactactaaaatgaaaaacgtacatccagaaggagagttatccttacaggatgtacgttttttatgctcttaaatagtgcgcataaattccgtttttttcgatcagttcttcgtgagtcccccgctctgcgattccattgtcagcaatgacaagaatctcgtctgctccctggatcgtggagagtcggtgtgcgatcgtgatggttgttctgtttttagcgagaacttccagactctgctgaatccagcgttcactttcgttgtccagtgcgctggtggcctcatcaaggatcaggatcggcggatttttcaggaacacgcgggcaatggagatccgctgtttctgaccgccggaaagacgggttccgcgttctcccacaaaggtgtcatagccatccggcagactttcgatgaaatcgtgaatatttgcttttctggcagcatcgacgatctcatccatagaggcattcggttttccgtaggcgatattttccttgattgtgccgcagaataaatagacatcctgctgtacgattccaatctggtttcgcaggctctctaatgtcagatcacggatatctttgccgtcgatcgtaatgcgtccgctgctcacatcataaaatcttggcagaagggagcagattgtagtttttccgcttcctgacggaccggcaagggcaatggattttcctgccggaatctggaaggaaacgttggataataccagggtatcgtcatcactgtagtggaaggatacatcctcgaaggaaaccagtccgcggacgtctttgagtggctttgcatccggggaatcctggatttccggctctgtctccatcacggcaaggaaccgtttgaatccggagaagcctttctgaatcatttccgtaagctccaccagaatctgaatcgggctgatgaaaattccgatatacagtgcatacatggcaagatctgtcgcctgcatttctccttttgcgatcaggtagccgccgaataccagtgtgacaagatacatcattccctggaaaaacaggttatagcccataaaactgcccatgcatttgtagttggcatccttggagagcagaaaattgtgattgctcttgcggaatttttctttttccacatcctcgtttgcgaaagactgaaccacgcggattccggcgagggtgtcctgcagacgggaattgacatctccgattttcttccggttttccataaaggtagactgcattcggcggttctggctcatagaaaatgcaaacatgcaaaacaccagaaacagaagtggaattgccagcttccagttgatcaggaagaggaagatgaacgatccgatgatcttgatcacggaaataaacagattctccggtccatgatgcgcaaattctgcaatatcaaacaagtcagagacaagtttgctcatcatctgtccggagttgttctgatcataataagaaaaagaaagtttttcatagtggtcaaaaagctgctgacgcatatccctttccatataagcacccatcatatgcccctgatagctgacataatatttgcacaggctctggatcaggtacatgatcagaagaccggctgcaatgggaagcagtgcgcttaaaatagaggaactgctttttgtaaacaaggtattggtacaggtacgcaggatctgaggatatgccagatcgaccagactgatgatcgtagcacagatcaggtccagaaagaaaacggctttatatggaccgtagtaatggataaattttttcagtgtgtgcataaatgtcccctctttctatctgtatgctgatggaccgcttcgatgtccatacaaaatcatagtatcataattaaaaatgagacacaagccgtatcctggaaaaagcaattgacagaaagaaaaagatatgctatgctgtcaaagctaaaaaaataggtcatgtacaaagccatgtggtttttctgtttcagaataaacagaaacacatggctttttttgaggaatggagggtattatggaaacaaacaagatggagacaagggacatttttccgcttttgatgagcatgtctctgccgatggtattgtccatgctggtgcagtctctttataacattattgacagtatttatgtatcgtatctgggaacaggggctctcacggcagtgtcactggcattcccgctgcagaatatcgtgctgtctgtggcagtcggaattggtgtcgggattgcttccgtcttatcgatcagtctgggaaaaaaggatcagaaacgggcaaatgaggctgctacaatggggatggcacttacgctgatccattgtgtactgtttgtgatcctgggccttgtgatcacagaaccatttatcggattatttacaaaggaacccgaggtcatgaaacaggcatgtgactatacgtatattgttctttgcttttcgtttggttctctgcttcagatcgcgatggaaaaaatctatcagggcatcggagcaatgaaaacgacaatgatacttctgggagcaggcgcaatgattaatattatcctggatccgatcctgatcttcggccttcttggatttcctgaaatgggagtaaaaggggcggcagtggcaactgtgatcgggcagatcagcgcatttcttctatatattgttgtttatctgcgaaaaaatccgggtgttacgattcatcccaaatatctgcatctggactggcggctgatccgtcagatatattcggtcggaatcccgtcttctctgatgatgacgatgccgtctgttctggtgggcggattaaatggaatcctggctgcattttcggatacgtatgtagcagtacttggaatttatttcaaacttcagacatttatttatatgccggcgaatggaattgtacagggaatgcggccgattatcggatataactacggagccggatcaaagaaacgggtgcgggatacgatacgctacagtctgatttctgcggcagtactgatgctggtgggaacggttgtttctctggcaattccggacatcattctgagtatgttccaggcagatgcagagctgatgcgtgcaggaatggaggcactgcgattgatttcgcttggatttttggtgtcgtcagcaggtgtgatcttttccggtgtgtttgaagcgctgggacggggtggagattctctgatcatttcacttttgcgccagctggtcattatccttccgcttggatatcttttgtcacgaacaatgggagcggcgggaatctggatcagttttccggtggcggaactggtttcagccgtgattgcctgcctgttgttaaaaagaatggaaggtggaatatactttccgtttgataaaaaagagataatcaacagaaaataagtggcttgttgttaaaaatgagtaaaatttctgaccaaaattcatctttttttgcaatagcccaaatggttctttttatgatacaatacactactatggacagagtgtttattaaaggaggctgaagatgaagcgcgcatttcagattttaaaaagggatatgagacggctggctcacaatccaatcgcaatgatcgttgtggccggcgtctgtctgctcccatcgctgtacgcatggtttaatattgctgcgaatatggatccctatggaaatacgggagcagttcagatcgcggtggcgaatctggataaaggaacagaaaatgaacttaccggttcgctcaatgcaggtgaggagattgtagatcagttgaaggagaatcatgatctgggctggaagtttgtgaaaaaagaagaggctgtagacggggtgaaatccggcaagtattatgctgcgatcgtgattccggaagatttcagtgaatccctgaccagtgtactgacgggaacgattgaacagcctaaatttacttattatctgaatgagaagaaaaatgcgatcgcaccgaaaattacggacagtggggcgacagcggtgcagagtcaggtcaatgaggcatttgtatctgctgcatcagaagcagtttcagaaatttttaaagattcgattgcagatgcagcgggcaatctggattcgctgcaggaaaatgtagtttcagatattcagaaggtatctgacaatatcgcaagttatcagcagatactgtctgagttccaggcaacctttcaggacagtgatgcgcagatcaaagaggtgcagtctgccatggatcaggtgaaaagcgctgcttcctcaggggctgctgctctggatgcaggggcttttgcacttcaggcaggaagaaacagtgtctcatcattttcttctgcactatctggaacgctgacggatggggagaatcttctgtccgacatcgggaattccgcaggggcagatttgggaagtctgaatgaaaagattcagtcagtcaatggaaaagtggacagtgccatgtcttccatcaacagtgtgatccagctgaatgaaaagatcattgatctgctttcacagctggacagtgccataccaggcagtccggcatcagatctgatcgcacagctgcaggcagagaaccagagacatcaggagcttttgaatagtctgcaggcaggaaatgcgggaatcggcaatgcggctcagacggcaacggatacagcacagcagattggcagtctggtaaaggaaaatcagcagcagcttcgtggaatcaaaggcagctttgagcagaatgtacttccagggctgaacacatctctggattctttcggacagctttccggaaaactctccggtgtgttaagcggagtggatccactggtggatcagacgaaaggaattcttgacaatctcaatacaagcctgaatgactccaagacggcacttgagagtacaggaaatgcgcttcagaaagtacaggaaaaactgaattcagtaacagcagatctgaatgcgctcagaagttcccagtcctatcaggattttctgaatctgacaggattggattcggaagcagtttcggagtttatgtctgcaccggtagctctgaaaacagagtccttttatccggtgaaaaattatggaagcgccatgactccgttctatacaaaccttgccatctgggtaggggggattgtgttgatcgcaattttcaaactggagtctgataaagatgaagtcgtgccgaagtttacagcagttcagtcttatttcggaagatggatgctatatgtggtgatgggactgatacagtcgctgatcatctgtgtgggagatctgctattgttaggagtccagtgcaagtcacctgcggcatttatttttgcaggattgttcacttcctttgtatatgtgaatattatttatgcgctttctattacattcaaacacattggaaaggcagtcagtgtaattctggtcatcattcagattccgggttctgcaggaacctatccgatcgagatgacaccggcgtttttccagaagctgcatccgctgcttccttttacatacggaatcaatgcgatgagagaagcggtagcaggaatatatggattccattatgcagagaatttgttgtgtcttgcagtgtatgttccgattgcgcttttgatcggagttgtcgtacgtccatggcttttgaatctgaaccatatgtttgaccagaaactgggagagactgagctgatgatctgtgaggaggaaggtctgacaaaagagagattccgtatgacagcagttgtgagtgcgctggcagacaagaaaacattccgggaagagatgtaccagagggcagaacggtttgagagaaattataagaaacggatccgcagaggatttgcggcgatcttgatcattccgctgatctttttgatcctgatgttcagtatcagttccaaaatggtatttctggtgttgtggatcacatcgatcattgtgatcgcgctttatctgatctgcgtggaatatctccatgaaagtctgaaacggagactgaaggtgagtcggatgtctcaggaggaattgttagagacactgagaaaacggaaagaacaagaggaggaagaagcatgaagaagatagggcaagtttttctttatgatatttcacatatcaaaaaaaatgtgatcgcaatgatcgtagtgctcggcttgtgcgttgttccgtctctttatgcatggttcaatattgctgcaagctgggatccatattccaatacaaatggtctgaaggtggcggttgcaaatacggatgaagggtatgaaggagaaatccttcctctccagatcaatatcggagatactgtaatctcaagtctcagagaaaatgaccagctggactggacgtttacagggaaaaaggatgcagtagaaggtgtcaaatcgggaaaatactatgccgcgatcgtaattccgaaaagtttcagtcaggatatgatgagcctgttttcggaggagatgacacattccgatattatatattatatcaatgaaaaagaaaatgccattgctccaaaagtgactgacaagggagcaagtgccgtacagcagcagatcgatgagatttttgtaaaaacagcggcgcaggtgggactggatcttctggatacaatctcagaagtgaccagcagtgacggcgcacaggcagcagcacagaatctgacagaaaatatccggaagatcggagcggatctggattcaacagccggtacggtgaaggcgttttcgaacctgacggtttccatgcagcagatgctggatgccactgcagatattttaaataaagcggggcagaatacggaaacaaatctgtcacttctgaatgagaccggaaattctgttgactcattaagaagcgcagtgtcgggaacaacagagagtgtcaatcaggtactggcacagggaagtcagtgctatgatgccatatccggacagatcaacaatgcattttcttcgatatccacgggtgcgggagcaacagcaggggcactcaacagcgtggcatccgaagtacaggttatgattgaccgctatacgggatttcgagacagtgtgcagcagcttgcagattcctttccgcttgcttcggatctgctccagccgatcatcggaaacctgaatgaatccattgcccaccaggaagcggtaagggataaattgaatgaagcggcggcaaagattacggagactgcaagtgatgcgggaaactatcaggtacagctggatcagctggtgaagcagggttctcagcagatctcggggatccgttcggattatgaaaacaacgtaaaaacacagatcaataccatgtttggcacactgggggataccagcagtgcagtgcagtctttgttcaccagtatggacaatggagtcgaagatatggaaaaactggcgaaggatgcaggatccggtctggagaagatgaaaacaacactggatacatctgcttcccttttgacagagacggcagaaaaggtaaaccaggcagcagaaaagctggatacggcagcacaggacggaaatgtggagacattaaaaaatgtgcttggaagcagcccggaagtaatcagcagctttgtgtctgcgccggtaagaatgcagacaaaagccttgtatccggtagaaaattatggatcagccatggcgccgttctattctacactctctatctgggtaggcgggatcatcctggtagcaatgatgaaagtgacagcttcggaaaatttaaaaagagcgcttgcgccattgaagccgcatcagatctatctgggcagatacctgctgttcctcgtgctgggactgatccagagcggcctgatctgtctgggagatctgtatttccttggaatccagtgtgagcatccgtttttgttccttctggcaggctgggtaagcagtgtggtatatgtgaatattatttatacgttcacggtatcatttggagatgtaggaaaagcaatctgtgtggttcttctggttatgcaggtggcaggatcaggcggtacgttcccgatcgaagtggcgccggaaatcttccagaagatttatccgtttcttccatttacgcacagtatgacagctatgcgggaatgtgttgccggattctatcagtatacgtactgggtagaattgggaatcatgtgtctgttccttctggcatccctgtttttgggactggtgcttcgaaaaccggtgattcgcctgaacgaattgtttatagaaaaactggaagatacaaaattgatgtaatattgtcaaaatgaagcggactcttcggagtccgttttttgacagatgggtgtcaaataaaagaatatatgctataatggagcgaaacaaaaaagaatcaggagaatgttgtggaaaaattttattttgcaccgctggaaggaatcagcggatatgtgtatagaaaggcttatgaacactattttggaggaattgacaaatattttattccgtttattaaaccgaatcagaaaggaaagctcagttccagggaaaagaacgatatcttacccatgcacaatcaggggatgtgtgcgattcctcagattttgaccaattcggcggaggattttataaagacggcagaaaggctgggggaatacgggtatgaggaagtcaatctgaatctgggatgtccgtcaaaaaccgtggtgagcaaaggaagaggggctggatttctggcagagccggacagattgaatgcattcttagaagagctttttgaaaagacaccgatccgtatttcggttaagacacggattggcaaggagagcccggaagaatggatccggcttctggaaatttacaatcagtatccaatggaggagttgatcattcatccgcggatccagacagatttctataagaacactccgaatctggaaatgtttgaatatgcggtcaaaaacagtaaaaatccactctgttacaatggggatatttgcacaaaagaggaatatgaaataatctgtaaccgtttccaggaggtaccatctgtgatgatcggaagaggaatcctgaaaaatccggggctggttcggaagatcagacaaggcataccggttgaaaaagacaggatccgggcatttcatgatgaactttaccgggaatatcaggaagttctttttggggagaaaacggtactcttcaagatgaaagagctgtggttttatatggcgccgttgtttacgcagtatgagaagtatgccaagaaaattaaaaaagcagaaaagttgaaactgtatgaagcagttgtggatgcgttatttgaagaacaggatttggtataggagaaggagaggtgaatggaagcaattttacaatgggatggacaggcgttgttgtttattcaggagcatatcagacaggtgtggatggacggattctggaagacgatcacacatctgggggatgcaggatggttctggattatcttgggaatcgtacttctgattccgaaaaagacaagaaaagcaggaattgccgctttggcggcactggcgatcggagcattgatcacaaatgtggcactcaaaaacatcattgcaagaatccgcccgtatgaagtggtggaaggactgaagcttttgatcgagccgcagtcagatttttcatttccttccggacatacctgtgcctctattggagcagcgttggcgatgtatccgtttttggagagaaagtgggggattccgcttgtaattctggcagtgctgatctctctttccaggttgtatgtgggcgtgcattatccgacggatgtgctcggtggagctgttgtgggggcgtttgctgcatggggagcagtgaggattgtgaagcatgggcttgtgagaaaggctaaaaaagcagaaaagtaaaatggaagatagaaagaagcgctgcgaggcagatggaagaatctgcttcgtggcgctttttgaaatttcatgaaagttaaagaatcatttctcttatggaaaacatgatttatattatgatccaaatcaaagcagtccataaaaaacaaatatgatcatgtttttgaagagaatatgaaggtggaataaaaagttgacattagtatgaactgctccccgatgagtatacccatctggatacatattgatagtgaaaggagtcgccctattatgcaaaatatgatttttgtactgtatccgttattttgtattctgctgccatgtatgctgtatgtcctgattcaaacgaaaggatttcatcggagaactaattttatacatatgatctgggtttttatttttctgtattatgtgtaccttgttctggaaacaacaggaatcggaaccatttgggaaatcgggttgtatcctggtatgaaacttcaggaagagatcagtctgtatatattagtgtttgttaagtgccgccgcagcttccacaaatcctttgaacagtggatgtggtttgttcgggcgggattttaattccggatgcgcctgtgttgcgataaaccacggatgatctttgatctctgccatttcaacgatcttgccgtccggagaaaggccacacagattcatgccgttttcggtcagaacttcacggtaatcattgttgacttcatagcgatgtctgtggcgttcctgaatttcttctttctggtagacctcatatgctttggaagttttgtccagaatacatggataagcacccaggcgaagtgttccgccgatatcttcgataccgatctgatcctgcatgatgtggatcaccggatgtgtagtggatggatttagttccagactgtgtgcatcgtggaaaccgatcacattgcgggcaaattctacgatcgcaagctgcattccaagacagataccgaggaacggaattttgtgtgtgcgggcgtagcggatggcttcgatcttgccttccacaccgcggtgaccaaatccgccgggaaccaggattcctgttacatccttaaaaatctcatctgcggtttcaggagtcactgtctcggcatccacccatttgatctcaacagtcgtgtggctgtagattccgccgtgttttaaagcttctaccacgctgatataggcatcgtgcagctgaacatattttccgaccagtgcgatgcggactttggaaaccgggtgtcttagattgtctaccatagtttcccagtcacttaaatccggttttggacagtccagatggagacattcgcatacaacctgtgcaagatgttctttttccattgccagaggtgcttcgtataaataatccacatccaggttttgaagaacgtgatctgccggaaggttacaaaacagggaaatcttgtctttgattccgttatccagcggatgttcggaacggcatacgataatatccggctggattcccatgccctgaagttctttgacactggcctgtgtaggttttgttttcatttcctgagaggctctcaggtatggaattaaggttacatggatcaaaatgacgttatcacgtcctttttcatgctgaaactgacgaatggattccaggaaaggctggctttcgatatcaccgacagttccgcccacttcaatgatcgcgatttctgtattttcagcagaaggatttcggtaaaatctgcttttgatctcattggtgatgtgtgggataacctgcacggttccgccgccgaaatcacctcttcgttccttctgtaagacagaccaataaatctttccggttgtgacattggaattttttgtcagattttcatcgataaaacgttcataatgtcccaggtccagatccgtttcggctccgtcatcggttacgaatacttctccgtgctgtaccggattcatggttcccggatcaatattgatgtaagggtcgaatttctgcatagtcaccgtatatccgcgggctttcaaaagcctgccgagtgatgcggctgtaatcccttttcctagtcctgaaacaactccaccggtcacaaatacatattttactgccatagtgatcctcctcatatgatgtgaataaaaatattaaaaaaagagtatactctctttttgcgaaaaaatacaagtacttttttatgaacaataaatatttcctcttttattaaaaaaatcctctcccatcaggagaggatcgcttttaatggtaattatatccggtctcatagacagcttcacatgtaagctggacgccgagacgtttgaaggtgcggatatcaacatcggacagcataacggaagtatgagcctgacatccgtttaattttgaaagctgctgaagtgcaagtctggcatccgggttggtggcagcgcttgcagaaagtgcgataagtacttcatcagtatgaagtctcgggtttttgcttttcagatagtccactttcagtttctgaatcggctcgatcgattccggtgaaataatatgcagctcgtgtttcaacccggccagttctttgatcacattcagaagaagggcagcggaggcaccgagaagattcgtggtctttccggtgatgatacggccgtcatccagttccagagcagcagcaggcgtatgtgtctcttccgcacgttttaaggcagctgcaacaacgtggcggtcttcgatcgtcacattggcctgattcatcagcagctcgattttttgtgcttcttcttccggactgtttcctttcagaagagagttgagggaatcatagtaacggcgaacgatctcctggcgggatgcttcacagcatacagcatcgtcacagatacagtttccagccatatttacacccatatcggttggagatttgtatgggctctttccgtaaatcttttcaaaaatcgtgtttaaaaccgggaagatctcaacatcacggttgtagttgacggttgtctttccataggcctccagatggaacggatcgatcatattcacatcgttgaggtctgctgtagccgcttcatacgccagatttaccggatgcttcagcggcagattccagatcgggaatgtctcaaatttggcatatcctgcatgaatcccgcgtttgtgctcatgatataactgagacagacaggttgccatttttccgcttccaggacccggggctgtgatgatgacaagcggacgggaagtttcgatatagtcatttttaccgtatccttcatcactgacgatcagcgggatattggaagggtagccgttgatacagtagtgctggtatacacggattcccatattttccagacggtggcggaataaagaggcactttcctgaccggaatattgtgtgatcacgacactgcccacatacagaccgttgtcgcggtaagaatccatcagacggagtacgtcagaatcataagtgataccaagatcgccgcggactttatttttctcgatatcctttgcgctgatgacaatgacaatctctgcctggtcactgagctgttttaaaaggcggagcttgctgtcaggctcaaatcccggaagaacgcgggaagcgtggtagtcgtcgaacagttttccgccgaactcgagatacagtttgttatcaaactgattgatgcgttcgcggatatgctctgactgcatttttaaatacttttcgttatcaaatccaattttcatgatttcattcctctatcaatttagtattacgtgtgacaagaagggaaaacagaagttttacccttttctgatacagtatactataaacagggatgagtttacaatattttcacaatgtttttattgatttatgggaaacctgtatttataatggggatagtggactttaggaggaaaagaatggacaatcaaaacaacagaaataataagaacaatcccaaaaacaaccgtcagggatggggcgtcattcttgtgacgacactgctgacggcgtttctcgttatgggactgttttcgctgatgcaggggagcgacccgcaggagatcagctacgataagtttttaaagatggtagatgagaaaaaagtagaaaaagtaacgatcgattctgccaaaatctatattacgctcacagatgaagcgagaaaagaagcaatcaagaaaaaccaggaagaaaatacagcaaccgcagagcttcttgagcagattgaagaaaagactgcgggaggagagagagaacctgactattatacaggcgcggtaaaagatgatacactttcccagcgtttgtacgatgcgggagtagagtatgaacagaatataccggatacgatgtcttcgctgatattcgaagtatttatcacggcgatctttccgctgatcctgatattccttttaatgaattttgtgatgaagaggatgtcaaaaggcagcggtatgatgggaatcggaaagagcaatgccaaggtatatgttgaaaagcagaccggggtaacattccaggatgttgcaggagaggacgaggcaaaagaatccctgcaggaagtcgtagattttctgcataatccgggcaaatataccggaatcggagcaaaactgccaaagggtgcgcttctggtgggacctccgggaacaggtaagacgctgcttgccaaggcagttgcaggagaagcgaaggtgccgttcttctccctttcaggttctgcgtttgtagagatgtatgtgggagtcggtgcatcccgtgtgcgtgacctgtttaaacaggcgcagcagatggcgccgtgtattgtatttattgatgagatcgatgcgatcggtaagagccgtgacaatgccatgggaagcaatgatgagcgcgagcagacactgaaccagcttctggcagagatggatggatttgatacgaacaaaggtctgctgttacttgcagcgaccaaccgtccggaagtactcgatccggcacttttgcgtccggggcgctttgacagacggattatcgtagataaaccggatttaaaaggccgtgtggacattttgaaagtacactccaaggacgtcaagatggacgagacggtggatctggaggcgatcgcgcttgctacatcaggtgcagttggctcggatcttgccaatatgattaacgaagctgcgatcacagcggtaaagcatggcagacaggttgtcagccagaaagatctgtttgaagctgtggaagtagttcttgtaggaaaagagaaaaaagaccgcattatgaatgaggaagagcgccggatcgtatcttaccatgaagtggggcatgcactggtcagcgcgctgcagaaagatgcggagccggtacagaagatcacgatcgtgccaagaaccatgggagcgcttggatatgtgatgcagacgccggaagaagagaagttcttaaacactaagaaagagctgaaagcaatgctggtcggacttttggctggtcgtgcggcggaagaagttgtgtttgatacggtgacgacaggtgcgtccaatgacattgaaaaggcgacgaaggttgccagagcaatgatcacacagtacggaatgtctgagaagtttggtctgatcgggttagagtctgtacagagccgttacctggatggccgtgcggtgatgaactgtggagaagcgacagcagctgagattgatgctgaagtaatggagatgctcaaggctgcatatgaagaggcaaaacgcctgcttcgggaaaacagagaagcactggataagatttcagaattcctgatcgagaaagagacgatcacaggaaaagaatttatgaagattttaagaaaggtgcaggggatcgaagagagcgaagaactggaaacaaagaaagaagccagaatcgcgatgaaacctgtggaagaaccggcacaggaagtttggatgccggaggaaagtaagaaccaggaagatatcaaagaaccggaagaaggtcccgagtttacagaagaataaatgagacggagaaggacaggatttttatcttgtcctttttttcaaaagcatttataataaatggcatggaaaattataattttgatatacaggaagaattgaaaaaactcccggcgaaaccgggcgtttatattatgcatgatgaacgggatcatatcatctatgtaggaaaggcgatcagcctgaaaaaccgggtgcgtcagtattttcaaaccagccggaataaaggtgtgaagattgagcagatggtgacgcatatccgccgatttgagtacattgtcacagattcagaactggaggcactggtactggaatgcaatctgatcaaagagcatcatccgaaatacaataccatgctgatggatgataagacatatccgtttatcaaggtgacagtaaatgaagactttccgagagtgatgctggcaagaaagatgctcaaagacaaggcaaaatattttggaccgtatacaagcgggcaggcagtcagagatacgattgatctgcttcacaagttgtatcatgtccgcagctgcaaccggaatctgccaaaagacatcggaaaagagcgcccttgccttaattaccatatcaagcaatgtgatgcgccttgtcaggggtatatttcaaaagaagaatatggaaaagctatctcagaagtgatccgttttctgaatggaaattttgacgggattttgaaggatctggaagagaagatgcagaaggcttcggaagaactgaaatttgagaaagccatagagtatcgagaactgctcggaagcgtaaaaaagattgctcagaagcagaaaatcacagacagcagcggagaggacagagatattcttgcagcagcaatacaagaggaggatgcggtcgttcaggtattttttatccggggaggccgcctgatcggaagggatcacttctatcttcggatttccaagggagagacctgcggtgagatcctggatagttttatcaagcagtattatgcggggacgccgtttattccgggcgaactgatgctgcaggaagagattgaagatgcctcgcttctggaagaatggctgagtgtaaaacgaggaggaaaagtcaatatccgcgtgccgaaaaaaggcacgaaggaaaagctggtggaactggctgccaacaatgcaaccctggttctcagtaaagacagagaacgtctgaaaagagaagagggaaggaccatcggagcagtccgggagattgaaaaactgatcgggatttcggatatccgccgcatggaggcatatgatatctcgaatacgaatggatttgagtctgtcggatccatggttgtttatgagagaggaaagcccaagcggaatgactaccggaaattcaagatcaaaggaattgaaggtgcggatgactacggaagcatgcgggaggtgcttacaagaagattcacccatgggctaaaagaacagaaggaaagtaaagaaatcggaggtttcagcagttttccggatctgattctgatggatggaggaaaaggacaggtcaatgtggctcttcaggttttgggtgatctgcggttgaatatcccggtgtgtggtatggtcaaggatgactatcaccggacaagaggactttattatgaaaatcaggagatcgccattgacaaaaactcagaggcgtttcggttgatcacgcggattcaggatgaggcacatcggtttgcaatcgaatatcaccgttctttaagaagtaaaggacaggtgcattcgattctggatgatattgagggaatcggaccggcgagacgtaaagcgctgatgcggaactttatgagtctggatgctataaaagcagcttcggtggaagagcttgcccagattccgtcaatgaatgaaaaagcggcagaatctgtgtacaagttttttcataagtgatataattgaacgcaggaaatgcttagaaaaggagaacattatgggacaaggcgtaagtttaaaagaaattgtagaaaaaatgaacctgaaaaatctgacaccggatgtggatttggttgaaaaatatgttcaggtgcctgatatcaacagaccggctctgcagttgtccggatattttgatcattttgactcggatcgtgtacaggttatcggatatgttgaatatacgtatcttcagacacttgaggaagcgaaaaagatgaagatgtacgatgagctgttatcgcataaaattccatgcctgatcttcagccgtgcattagaaccggatcaagagcttttagaaaaggctacacaggcggatacaccggttctgatcacacaaaaatcaacatcctctttcatggcggagctgattcgctggatgaatgtgaaactggcaccgtgtatttccattcacggagtacttgtggatgtgtatggtgtcggtgtactgattatgggagagagtggaatcggtaagagcgaggcagcgctggagctgatcaagagaggacatcgtctggtaacagatgacgtggtagagatccgtaaggtcagcgatgatacgctggttggttctgcaccggatatcaccagacattttatcgagcttcgtggtattggaatcgtagatgtgaagtccatgtttggtgtgcagagcgtcagggagacacagaatatcgatctggtcatcacactggaagactggagcagagaaaaagaatacgatcgtctcggactggaagagacgtatacggaatttctgggcaacaaagtagtatgccataacattccgatccgtccgggaagaaatctggcgatcatcgtggagtcagcagcggtcaaccacagacagaaacagatgggatataacgctgcacaggaattatataaaagagttcagaacagtttgacaaaaaggaaataggagagcaggaagatgaaatattgttttggagtagatattggtggaacaacagtgaaaatgggcttgttcgaggcaacggggactattttggaaaaatgggagatcaagacccacacagaagaagagggaaaggcaatccttccggatgttgctgcatcactcaaggagaaaaaagcagagcatgatctggcagatgcggatattatcggagtaggtgtaggtgttcctgcaccggtgacagaagagggaatcgtctttggaagtgcaaatctcggctggaaatacaaagaagtgaaaaaagagctggaggagctgaccggactggacgtggaagtcggaaatgatgccaatgtagcagcccttggtgagatgtggaaaggcggcggagccggatataagaacctgattatggtaacgcttggaaccggagtcggcggcggcatcattgttgggggaaagattctgacaggaagccacggagcaggcggagagatcgggcatcttcgagtaaatcctcacgaaacagaaagctgcggatgtggaggaaagggatgcctggagcagtatgcatctgcaactgggattgtgcgtcttgcaaaaagaaaactggagcaggagacaagaaacacgattttaaacaggaatgatctgtctgcaaaatcagtatttgatgcggtgaaagcagatgattcagtggcaaaagagattgcagagtctttcggaaattatcttggacgtgctcttgcaaatctggcagcagtgatcgatccgtccatttttgtgatcggcggcggggtatcaaaagccggggagattcttcttgaatatgtagaaaagccatttcaggagaatgcgttctttgcaaataaagatgtaagatttgcccttgcaacacttggtaacgatgcaggaatctgtggtgcggcaaaactggttctggatgattttgcagagtagaaaaacaatcatttgacaggaaataaaaacgtacagatggcaggagtggaagaaaatctgcaatctgtacgttttttcgtttatgaacaaccttttgaaaatattggaagaaaacaaaaagggttgaaagccgaagccttcaaccttttttacacaagctggaaatcggatttgaaccgacgaccccttcattacgagtgaagtgctctaccgactgagctattccagcaagtgttcgttctgattgaacgaacctcaattattatagcgcttttgtaatagaaattcaactcttttttgtaaaaaaattactgtttttgggttctgttccctgaaaaccttgtcaatgcgcagtatttgatttaaaataaatttcagaatgaaaacgtcggggatgcgaagcaacaggaaaagggggcagagatatgagcatagatttaacgaatggacctgtgacgaaaaaaatgatgttattttctctccctctgattgccggaaatcttctgcagcagacgtataatattgcagacactgtgatcgtaggaaggtttcttggagcagatgctctggcggcagtgggatcatcatatacactgatgacgtttttgacttcgattctgctggggctgtgcatgggaagcggtgcattattttccatccggtatggagaaaagaatgaagaaaaattaaaagagaatatcggaacttcatttctgatgattgctgcagtggcaatattgctgaatgtactggtttgccggaacacggaatggattctggagtttttacaggtgccgcagcaggtatatgacgggatgcgaacatacctggaagtagtatttaccggaattcttgcaacatttttatataattattttgcctctcttttgagagcagcaggagaatctttgattccgttgatctttctggcagtctgtgccggtttgaatattgttctggatctgtggtttgtgatcggactggatgcaggaattgccggagctgcggttgcgactgtaatctctcagtggatttccggaatcggaatcgcagtctacacctgggggcgatgtccgcagtttcgtctgagaaggagagatttcagaattacaaaagagacgtttggtgagatttttcagttttcgtttttgacctgtgttcaacagtctgttatgaatctggggattttgatggtgcaggggctggtaaacagcttcggaccggttgtaatggcggcatttgcagcggctgtgaagattgattcatttgcatatatgccggtgcaggatttcggaaatgcgttttccacttttgtggcacagaattacggggccggaaaacaggagcggatccgggagggggcaagaaagtcggtgctgctcgtactgggattttgtctggtgatctcagcgtcagtttttgtgtttgcaaagcagctgcttttgatttttgtccagccatacgaaacagaaattctggcagttggaattcaatacttgcggattgaaggtgtgttttattttggaatcggattcctgtttttgttttatggatattaccgggcagtcagaaaaccgggaatgtcggttgtgctgacggtgatttctttggggacacgggtagtactggcatatgtattgtcagcggttcctcagatcggggtgtcaggaatctggagtgcagttccgatcggatggattctggcagatcttgcaggatggatttattataagaaattacaacaaagatgagtatattatggaaatgagggttgacaaatggagaaaaaagtagacagaagagtcattaaaacgagaaggcagttaaaaaaaggacttgcagcgctgatgaaggaaaaaagcgtgaatcagatcacagtcaaagagttggtagaagaagtggatatcaatcgttccacattttaccttcattttaaagacattcaggaccttttgagagaaatcgaagagaatatggaagcgcagatcaaaagagcgatcgaagagcatccgatcgtatccggcaatgaaaatgcgttttattttatagaagatatgtttcgtgtattagatgaagagcgggagatcagtaaagcgctgatcggtcccaacggagatatgggatttatccaccgcattgagcggatcatcaaagagaacagcagggggacgctggagaagatgtttccgggtaagaaagaggatctcaaatatttttacgcgttttgtctgagcggatgtcttgggcttgtgaaagtgtggctcaatgaaggggaagaaaaatcaccggaagaaatggcacagatgacatttaatatgatcgcaaatgcgaaggatgcgttctgtcagacagcatcggattttcttgacaagtaaatgtgatatcacgtaagataaacgttgaataagtgagagaggatgagagagatgaagagagaaaaatttggctcaaggcttggatttatcctgatttcagcaggatgtgccatcgggcttggaaatgtatggagatttccatatattaccggacaatacgggggtgcggcatttgtgctgatctacctgtttttcctgttaacactgggacttccgatcatggtcatggagttctcggtagggcgtgcgagtcaggcaagtattgcgctttcctttgataagctggaaccaaaggggaccaggtggcactggtataaatatttcgggatggcaggaaattatctgctgatgatgttttataccacgattggcggatggatgattttgtatttcgtgaaaatggcggcagggcagtttgagggacttgacgcaaaagggattgaagcggagtttgcaaatctgacagcgagaccgggattgatgtttgtgtgtatggcaatcgttgtaatcctgtgttttgcaatctgcagcatggggcttcagaaaggagtggagaagatcacaaaggtgatgatgatcctgctgcttgctctgatgattattttagcagtacgttctgccacacttccgaatgcaggagagggaattcggttctatttactgccggacttcggcaaggtgaaagaagcaggtgtatttgaagtcgtctatgcagccatgggacagtccttctttacgctgagtcttgggattggagcgattgcgatctttggaagctatattgataagaaacgggcgctgacaggggaggcaatctgtgttacgattctggatacctgcgtggcgctgatcgcggggatgatcatttttccggcatgctttgcgttcggagtgaacccgggacagggaccaagtctgatctttatcacactgccgaatatttttaatgcgatgagcggcggaagaatctggggaactctgttcttcctgtgtatgttctttgcagcagcatctacgatcattgccgtatttgaaaatatcattacatttgccatggaactgaccggatgcagcaggagaaaatctgtaatctgcaatctgatcgcaatcctggttttatctgttccatgtattctcggatttaatgtatggagtgggatttctcctttgggcgcaggaaaaaatattttggattttgaagatttcctggtaagcaacaatctgcttccgatcggaagtctggtatatcttctgttttgtaccagctgttatggatggggatggaagaaatttacgaaggaagcgaacagcggacagggaatccggttcccgaaatgggcaagggtgtatgtgtcatatattttgccgctgatcgtgctgtttatctttgtacagggatatatcaccatgttttaaagcacataggagaatgaaaaatggaaaagaagtatttgtcataaaaagtatcagggaaagtggaacttgtaaaaacaggatccgctttccctgattttttaaaaccgttttttacagagtttttctaccagattgatcaaggcatataatcccatcgccataatacacaaaagcacgatcgacatgagcagccaatccattttaaaaacctgactggagtaaatgatcaggtatccgagtccgtttctggccgctaaaaattctccgatgatcacacccacaagacacaggccgatattgaccttcatattgctgatgatcgcgggaatggagcttggcaggaccactttggtcagtgcgtggtgtctcgttccgtggagtgtgtaaatgagcttgatcttttcttcatcgattgttgtgaaactggtgtacagatttaaaatgcttccaaagatcgcaacggacattccggcaataataatggttgtctggtttgctccgagccagacgataagaagcggtgccagggcggatttcggaagactgttcaacacgaccagataaggatccagtatttcggataattttttgctgtaccacaaaataactgcgatcagaatactgattccggtaacgaacaggaagcttaaaatcgtttcgtaaagtgtgattccaagatggagaaaaatacttcggtcaaggaccatgctccaaaagcagcggacaatcttggcaggactgctgaaaacgaaagagtcgatcattcccaggcgggaagtgatctcccagagtcccagaaaaaggatcaggatcaggagtcttgataaattgacgatcaggtgatggcgtttttggaggagtagataacgtttctgcctgtttgaaagttcagacattttgattcagctccttccataaaatattgaagtatgtcttaaactccggagcgttgcggcgtttaagaggggtgtcagaggccagggagaaggtgacgggaacgatacgtgcaatggaggccggacgtttgctgaggatgaagatggtatctgcaaggctgatcgcttcggaaaggtcatgtgtcactaacacagcagtgcggccggaatcccgtatgatctgtccgatatcatctcctacggaaagccgtgtctggtaatccagtgcggaaaaaggttcatccagaagcagcagatccggttccaggatcagggtgcggatcagagcagctctctggcgcattcctccggagagttcagaagggcgtgagtcggcaaatttttccagtccataggtttttaacagctcccgtgcatgggttttggctgcagcagtcagtgtatgctggatttccagtccaaggaggatgttgtgataaattgttctccattcaaagaggtggtcgtgctgcagcatataaccgatattggtcgcgctttcttttaatgattttccattgagcagaatctccccctcttccggtttcaaaagaccggcgatcagtgagagcagtgtggacttgccgcatccggatggaccgacaattgccacaaattctcccggtttcacggaaagggaaatatctgacagtgcttttgtttcgccttccagagtatgataggcatagcttaagtgatccagtgttaaaattggttccatacagacactccattcgacaagtatataatcagtttatggaaaacaagaaaatctgtgcgtttcttttggaaaatccgacatttctttacagatatcccggaaagacgtatactataatagattgtaaaaaaggaaagaatgaaaatccggaggaaacaaacgatgaatgtgataaattatcagaaagaactggataaaacgatcgtaagtctccagaaagagggacgtgtgccaaaacttttgctgcacagctgctgtgcgccgtgcagcagttatgtattggagtacttgtcagagtattttgaaatcacggtattttattataatccgaacatttatccggaaagtgaatatacaaaacgaattctggagcagcaggagctgatatcccgtatgaatctgaagcatccggtcagttttctggcgggaaattatgagaaggatcgcttctaccggatggcagaggggctggaagatgtcaaagaggggggcgccagatgctttaaatgttatgcgctcaggcttcgggagacggcacagatggcaaaaaaagccggttatgattattttacgaccacactttctatcagtcctatgaaaaatgcagccaagttaaatgagatcggactggcagcacagaaagagtttggagtgaaatacctgcagtctgactttaaaaagaaaaacggatacaaacgatccattgagttatccaaagaatatggattgtatcggcaggattactgcggttgtgagttttcacaaagaagcagtacacaatagagcggaaactgtcacagttttctatggacatataacacgttaatgtgttaaactaattgcaatctgaaaagatactatcggagaaaaggagacaggggaatggcacagttatggggcggtcgtttcacaaaagaaacagacaagctggtatataattttaatgcatcgatctcttttgatcaaaaattttatgcgcaggatatccggggaagcatcgcacatgtgacaatgcttcaaaagcagggaattttgacaaaagaggagaaagagagcatcattgaaggtctgaaagggattcaggcagatgtggagaacgggacacttgagatcacggatgagtatgaagatatccacagctttgtagaggcgaatctgatcgaccggattggagatgcagggaagaaactgcacaccggaagaagcagaaatgatcaggtggcgctggatatgcggctgtacacaagagacgagattgaagcactggatacacttttaaaagaattgctggaagtgcttttaaaactgatgaaagagcatatcgagacgtatatgccgggatttacacatcttcagaaagcacaaccggtgacacttgcgcatcatcttggcgcatattttgaaatgttcaaaagagaccgtcttagaatgaaagatatcagaaaacgcatgaactactgcccgcttggagcaggggctcttgcggggacaacttatccgctggatcgggaatatacggcagagctgcttggatttgacggaccgaccttaaacagtatggattccgtatctgacagagattatctgatcgagatgctgtcagcaatgtctaccgtgatgatgcacttaagccgtttctgtgaggaagtgatcatctggaattccaatgagtatcagtttgtggagattgatgatgcgtacagtaccggaagcagcattatgccgcagaagaagaatccggatatcgcagagcttgtgcgcggaaagacaggaagagtttacggggcattgatgtcccttctgacgacaatgaagggaatcccgcttgcatataataaagatatgcaggaagacaaagagctggtgtttgatgccattgatacgacaaaaggctgtctggcattatttacggggatgcttcgcaccatgaggttcagaaagcagcggatggaagacagtgcaaagaatggttttacaaatgcgacagatgcggcggattatctggtcaatcacggcgtgccgtttcgggatgctcacgggattgtaggacagctggttttatattgtattgataaaaatatcgcccttgatgatatgagtctggaggagtataaggcaatctctccggtatttgaagaagatatctatgaggccatcagcatgaagacttgtgtggaaatgcgaaataccatcggagcaccgggaaaaagtgccatggagcaggcaatcgcactggaagaagcatatttgaaagaagaatagcaggtttgctgttttcaaataaaaatgagaggaaaggacagaaagaagatggaaaagaaattaaaagttggaattttaggagcaacaggaatggtcggacagagatttatctctttgcttgagaatcacccgtggtttgaggttgtgacagtggcagcaagtccgcgttctgcaggaaagacttatgaagaggcagtcggagacagatggaaaatgacaactccaatgccggaagcagtgaaaaaactggttgttatgaatgtaaacgacgtggaacatgttgcgtctacggtagattttgtattcagcgcagtggatatgacaaaagaagagatcaaagcgatcgaagaagaatacgcaaagacagagacaccggtcgtgtcaaacaacagtgcgcatcgttggacaccggacgtgccgatggtagtgccggagatcaattcagaacattttgatgtgattaaggatcagaaaaaacgccttggaacaacacgcggatttatcgcagtaaaaccaaactgttcgatccagagctacgcgccgtgtctggctgcatggaaagagttcggaccaaaagaagtagtggcaacgacttaccaggccatttccggagcgggaaagacatttaaagactggccggagatggtggaaaatatcattccatatattggcggagaggaagaaaagagtgagcaggagccgctgcgtgttctcggaaaagtagaaaacggcgagatcgtaaaggctcagcttccgaaaatcacttgccagtgtctgcgtgtaccggtattaaacggtcatacagcagctgtatttatcaattttgagaagaaaccgacaaaagagcagctgatcgaaaagcttgtgtcattcaaaggtttcccacaggaagaaaaccttccaagtgcaccaaagcagtttattcagtatctggaagaggacaaccgtccacaggtgaaactggatgtagattatgagaacggaatgggagtgtcaatcggacgactgagagaagattcgatgtttgacttcaaatttgtaggactttcccacaacacagtcagaggagcagcaggtggagcagttctctgcgcagaagctctgacagcaaaagggtttattcaggcaaaataaagattgagaaagggggattctcctatgggaatgacaatgacacagaagatactggcagcacatgcagggctggaatctgtaactgcaggacagctgatcgaggcaaagctggatattgtgatggcaaatgacatcacaggaccgatggcgctgccgattctgaagcagatggcagatcaggtgtttgataaagagaaggttgtatttgtaccggatcatttcaccccgaacaaagacatcaaatccgcagagaattcaaaagcgatccgtgaatttgcaaaagaacagggattgaaatggtattttgaacagggcaagtccggagtagagcatgctatccttccggaggcaggcgtggtgacagcaggagaatgcatcattggtgcagactcccacacctgtacctatggagcgctgggtgcgttttcaaccggtatgggaacgaccgatatcgcaaccggtatggcaaccggtgagatctggtttaaagttccggcggcgattcagtttgtactgactggaaaacctggaaaatatgtcagcggaaaagatatcatcatccacatcatcggcaagatcggtgtagatggggcactttacaaatccatggagtttaccggagacggaattgcacatttgtctatggatgaccgttttaccatggcgaacatggcgattgaagcaggtgcgaagaacggaatcttcccggtggatgaacagacaaaagcatatttagaagagcattcgaaaaaagaatatcagattttcgaggcagatgaggatgcagattatgaacaggttgtaaccattgatctttccgaagtgcgtccgacagttgcatttccgcatcttccgggcaatgcaaagaccatcgatgagatcgaggcgatggaaccgatcaagatcgatcaggtggtgatcggttcctgcaccaatggaagaatggaagatatgcgaaaggcagcggcaatcttaaaagggcatacggtacatccggatgtgcgtgtgatggtcattccggcaactcagaagatttacaaacagtgtatcaaagaagggctgcttgatatttttgtggatgcaggctgtgcggtcaatacaccgagctgtggaccgtgtatgggcggtcatatgggtgttatggcagcaggagaacgctgtgtatctacgacaaaccggaattttgtaggaagaatgggacatgtagattctctcatttatcttgcatctccggaagtggcagcggcgagtgcgattgcaggatatattgcaaatccggagagggcaggtgaagaggcatgagagcacagggacacgtttttaaatatggagacaatgtagatacggatgtgattattccggcaagatatctgaattcatttgatgcaaaagagctggcatcacatgccatggcagatattgatccggagtttgcaaaaaaagtgcaggcgggagatctgatcgtggcaaagaagaatttcggctgtggttcttccagagagcatgcgcctctttgtctgaaaacagcaggagtaagctgtgtgatcgcagagacctttgcaaggattttctaccgcaatgccatcaatatcgggcttccgatcattgaatgtccgcaggcggcacaggaaatcgaagccggagatgaggttgaagtagattttgacagcggaatgatctacgaccgtaccaaaggaactcagtatcagggacaggcgtttcctgaatttatgcagaagctgatcgcagccggaggtcttgtaagctatacaaacagcagaaagaaatagaacggaaattaagaccggatattgaaagaaagagcatgatataaaatgagggcgttttcaaaaagtcggagaatcttttggaacgccctcatggattttattaaagaagaaagaagtgaaatgagaaagagaggaacatcagtggaagagaaaaagttgagagtggaagaaaaaggaagggcggtggcgcttcttccgatcggagtatttctggtcctgtttttggggatggggattgtatttggcgatttttatgcgatgccggcaattgtggcattcttaatcgctcttctgacagcgtttttgcagaatgggaagttaacatttgcagacaaaatgaaggtgatttctgccgggatcggagatgagaatatcattacgatgagtctgatctttttatgtgcaggcggattttccggtgcagtaactgcggtaggcggtgtggagagtacggtaaatctggggctttcggtgcttccgccatccattgcagtcgtaggattgtttgtgatcggctgttttatttctgtatccatgggaacctccatgggaacgatcgcagcgcttgctccgattgcagtcggaatcagtgaaaagacaggattttctctggcaatctgtattggagccgttgtctgcggagcaatgtttggtgataatctgtccatgatctcagatacaacgatcgccgcggtaaaaacacagggctgcgagatgaaagataaattcaaggcaaattttctgatcgtactcccggcggcgattttaacgattgtgatattctggctgatgacaagaaacggaagttatcagatccgggaggagatgccatacagcatctggaaagtacttccatatctcgttgtattggtgggagcactggcggggattaacgtgtttgttgttctgatcagtggaattgcgttatctctgatcgtgggcgttgcaacaggaagcatcggattgtctgagatttttaatgtcgtaggagacggtgtgaccggaatgtatgatatcacggtaatttcgatcattgttgcctgtatcgtgtcacttgtcagagaatatggtggaatccggttcatcttaaatctgatcaaaagcaggatcagaggaaaaagaggcggcgaatttggaatcgcagtgctggcattgtttgtagatctttgtacagcaaataataccattgccattgtgatggcaggtcccattgcaaaagagatcagcgaagaatatgacattgatccaaaacgatccgcatcccttctggatatttttacatccgtggggcagggaatgatcccgtatggagctcagcttctgtctgcggcaactctcacaggactgactccgtttgatattattccgaatttgttctaccccgtcctgatgggtgtcagtgcaattctcttcattgtatttaagaaacaaaattgataaaacagagcacttatgatataattcatggcaataacagtgtgaagaaagaaaaagagggcgaagatatgaatttgttatacaaaagcacaagaaattctgagaaaaaagtaacagcgtctgaggcaatcttaaaagggcttgcagaagatggcggactcttcgtgccggagcagattccgacactggatgtgacaatggaagaactcaaaaacatgacgtatcaggagaccgcatacgcagtgatgaaacagtttctgacagactttacagaggaggagttaaagcactgcatagacagcgcatatgattccaagtttgatacagaagtgatcgccccccttgtgaaagtgggagatgtctatcatctggagctgtttcacggagcgacgatcgcgtttaaggatatggcattatcgatccttccgcatttgatgacaacatctgcaaagaagaatcatgtgacaaaggatattgtcattttgacagcaacctccggagataccggaaaagctgcgatggcaggattcgcagatgtgccgggaacgaagattattgtgttttatccgaagaacggggtcagccgggtgcaggagatgcagatggtgacacagaaaggtgccaatacttcagttgtggcaattcatggaaactttgataatgcacagagcggtgtcaaagcactttttgaagaccaggcgcttgcaaaggaactggatgcggcaggatatcagttttcttctgcaaattcgatcaacatcggtcgtctggtacctcaggttgtgtattatgtctatgcatatgcaaaactgcttcagaatgacgagattcaaagtggagagaagatcaatgtgacggttccgaccggaaactttggtaatattctggcagcatactatgcaaaacagatgggggttccgatcaataagctgatctgtgcatccaatgaaaacaaagtcctgtttgatttcttccgtacaggaacatatgacaaaaacagagaatttgtgctgacatcctccccgtccatggacattttgatctcaagcaatctggagcggctgatctatacaattgcaggacaggatggtcagaaaaatgcagaactgatggatgcattaaaaagtagtggtgcatatgagattacaaaagaaatgaaggcaaaactggatgattttgtgggaggttatgcaacggaggaacagacagcacaggcaatccacgatacatataaacgtaccggatatgtgatggatacacatacggcagttgcttcttgtgtatgtgcacagtacagagaagaaagtggggatgagacaaaatgtctgatcgcttccacagccagtccatataaattcgtaggcagtgtgatgcgtgcaattgatgcagaatatgcgggaagagacgagtttgagcttgtggacgagctggagaagctttctcaggttgccgttccgaatgcggtcaaggagatccgtgatgcgaaaatccttcatacaagagagtgtgatgcagacaaaatgaaagagacagtgaaagaaatattagaaatcgaggtatagtcaatgagtgcggacagtatgaacagtgtgtttggttttatcggaattcttgcagtaggatgcgggatatattgcctgtatgcatattttaacatgaaaaaagacggacacattaatgaaacgattctcctggggaagagttattcagaaaagatgtgcaaagataaggaagcatatctgaaaaaggcgttgccggcagttctgggatttggaattgtttcgattctttatggaattgtagattgtatccactggtatgtaaatccgatggagatggtggacacagtgggcggcattctttttatggcagcactggtggtatttgcagtgtatacgatgcaactgaaaaagaaatatttttagaaagatacaaggggaatatcaacgaaagagagtcaggaggatctgactctcttcttacgtcatacaaattgcagaaatgattcatctatcggagtaataacgttctaatgacaggatttataaaaagatatcagcggctttatcactctgacagactttgttcagttttttggctgccatggagagtttcatactgctgacactgcgggctttttgcttacagcttcgtacgcagcgcaggcaggaaatacattttttcttgtccgtctttttcggatcctgtgcagagattgctccggcaggacatgatttgacgcaagctttacattccgtgcacaggctgacatctgcctttggaatcagtggagtttttgcgtatttgcgatatggagtgttaccaggtacctgaatggagagcgcagagagatcttcatttttgatacggcggtttaatgcgatcccgaactcactgattgtctttagatccgctttattcggacggctcagaccaattgaacgaacgatcgaatgctcagtaggaaatgcaccggcaccgattacgtggaatccccgattttccacctcggtttttaattctaacagagcatcttcgtatgcccggcagccataagttgcgatcagcgcagccggagtgttgtttcctttgagtgtctcgaaataagaaagaaatgtttcgggaacccggccggaataaaccgggattccaaacaggacaaaatctgtttcgtcaaattgcagaaccggctttttttctttatgtacggacaggtcaaatgagacagatttaaggtcaatctgacgtgctgcctccatgatgacccttcttgtcgtccctgtcggactgaaatagaccagttttaattcagttgttttcataatagtatcctctccttgcattcaaatgtaaataatgttactataccataaatttgaaaaaaataccatgaaaaaagaaatggagtatgggttgtaaaatctatgtaaataggctataataaattcaacggaaaacctgagatgttcgataaccttgttattttgaacctacaatactttaaacgggattcttatatttctgtaatatgtcaagcctccgttatgcagtggaagacagaaaagcagatgcggttgcccacctagcttgcgtgctaggagtcaaaatacagggaacggcattttggggattctacagaagataaaagggaatgaaatttagcacaggctgatttcattcccttatttcatcaatacaggatatacaagccttcaaaaaagatccctttacgaaacaggggctttatgatatgattttgaaagtttgagagcagcaggagagaatattatgggaagaagagtcaaggagacgataaaaaaagtaaataaagtcactgagatcgtcggctcccatcatacaggagcgtatgcggcccaggctgcttatttttttgtactctctatgattccgatcatcctgcttttgctgacggcggtacagtttacaccagctacttatgcaaatgtcatcgatgcagtggagcaggtgtttccgacatccgtgcaggggtttatccgttcgatcgtgacacaggtctatttttcccagtcggctaagatcattccgatcacgatccttgtagcgctgtggtctgcaggaagaggggtactgtccgtgactgcaggactgaactgcatttatggtaataccgagactcgtaattatgtatacctgaggcttagggcttctttatataccgtgatcttcattcttgcaatcgtactgtcactggttctgtctgtatttggaaacagtatcagcgccatgatctacaagcatgcaccgttctggagtactctgatgcagtatattattaagatccggaccgttatgacacttgcagttctgaccgttttctgggatctggtttataaatatcttccaaaccggagagcaacacagaagacaactttgcgtaaacagcttccgggagccgtttttacagcgtgcggatggctgctgatctcttttattttttcgatttatctggacatctttgaaggattttcagatatgtatggaagtatgactacgattgtgctgattatgctgtggctgtatctgtgtatgtatgtgatccttcttggcggagaagtcaatgcactgttagagaaatatcttgacaatcacaaaaactgtgataagataataaagtaaatttgtcttaaatttgaaaaatgaatcaggatatgaaaagcgatgagcgtgcacagtagagaactgttttccatcagagagagaaggtcactggctgtaagccttctttggttcagacggcaatcgaaattcccacgtaagctgcatttttgaaatgatttcagagtagaaagtgccgtctattgtacgttacacaagaccaagtgctcacaggaagactgtgggaattagggtggtaccgcgaatacagacttcgtcccttttgggatggagtttttttcatactaagaaatatgctttcaaagaaaggagaaagaagatgaaagacagactggaacaaatcaaagcacaggctttggagcagattaaagcttctgatatgccggaaaagctgaacgaggtgcgtgtaaaatttcttggaaaaaaaggagaattaacagccgtattaaagggaatgaaagacgtggccccagaggagcgtccgaaagtcggacagctggtcaatgagacaagagctgcaatcgaagagcttttagaagagacaaaagtgaaaatggaggcagccatccgtgaggaaaaaatgaaagcggaagtcattgacgtgacgctgccatctaagaaaagtacggtgggacacagacatccaaatacgatcgcactggaagaggtagagcgcattttcgtgggaatgggatacgaagtagtagaaggaccggaagtagaatacgacctgtacaacttcgagaaactcaacattccggatgggcatcctgcaaaagatgaacaggataccttttatgtgaataaggacattgtgctgcgtacacagacttctccggttcaggcgagagtgatggagcagggcaagttgccgatccgtatgatcgcaccgggaagagtattccgttctgatgaagtggatgcaacacattctccatccttccatcagattgaaggtcttgtgatcgataaaaatgtttcctttgcagatctgaaaggaacactggaagtgtttgcaaaagagctgtttggagaagagacaaagacaaaattcagaccgcatcatttcccgtttacagagccaagtgcagaggtggatgtgacttgcttcaaatgcggaggcaaaggatgtcgattctgtaaaggttccggctggattgagatcctcggatgcgggatggtacatccacatgtgctggagatgtgcggaatcgatccggaggaatattcaggatttgcattcggtgtcggtctggagcgaatcgcactgctgaaatatgaaattgatgacatgagacttttgtatgaaaatgacatcagatttttgaaacagttctaggatttaggtggagagaaaggaataggattatgaatacttctttatcatggttaaaagcgtatgtcccggatctggacgtgacagcgcaggaatatacagatgcaatgacattgtcaggaacaaaagtagagggctatgaacagctggatgcagatctggaaaagattgtcattggtcagatcgataagattgaaaagcacccggatgcagacaaactggtcgtatgtcaggtgaatgtaggaacagagacagtacagatcgtaacaggtgcgaaaaatgtatttgaaggtgcaaaagtgccggtcgtactggacggtggacgcgtggcagggggacatgagccgggacagaaagttccgggcggaatcaagatcaaaaaaggcaagctccgcggagtggcaagttttggtatgatgtgttctatcgaggagctgggttctacgacagatatgtatccggaggctccggaagacggaatctatatcttcccggaggatgccgaaatcggagcaagtgcgattgaagcgcttgacagaaacgatgtggtatttgagtatgaagtgacatccaaccgtgtagactgctacagcgtacttggaatcgcaagagaagcagccgctacattcaacaaagagtttgttcctccaatcgtgaaagagacaggaaatggagaagatgtcaacgattatataaaagtaacagtagaagatgccgatctgtgtccgagatactgtgcaagagtggtaaaaaatattaaaatcggtccgtctccaaaatggatgcagagaaggctggcatctgtaggaattcgtccgatcaacaatctggtggatattacaaactatgtgatggaagagtacggacagccgatgcatgcctatgatctggatacgatcgcaggtcatgagattgttgtaaaaactgcacaggatggagagaaatttaccacacttgacggacaggagcgtatcatggacaaggatgtcctgatgatctgtgacggagaaaaagcagtcggaattgccggtatcatgggtggggaaaactccatgatcacagatgatgtcaagaccatgctctttgaggcagcatgctttgacggtgtcaacatccgaaaatcttcaaagagagtagggcttcgtacagatgcttccggaaaatttgaaaagggtctggatccgaacaatgcaaaagcagccattgacagagcctgccagttagtagaagaattaggcgccggagaagtggttggcggaaccgtggatgtttacggaaaagtaaaagaaccggtaagagttccatttgatgcagacaagatcaatgcaatgctgggaacttcgatttcagaagaagagatgcttggttatttcgcaaagatcggtctggaatatgatgaagcagcaaaggaagtgatcgcaccgacattccgtcatgatctgttcagaattgcagatctggcagaagaggttgcaagattctttggatatgataatattccgacgacacttccaaagggagaggccacaacaggaaaactgtccttcaaactgagaatcgaagatgtggcaaaagatatcgccgaattctgcggattcagccagggaatgacctattcattcgagagcccgaaggtgtttgacaaactgagaatcccggcagattcgaaattgagagaaacagtggagatcatgaacccactgggagaagattatagtgtgatgagaacgacatccttaaatggaatgctcacatctcttgcgacaaactataaccgcagaaacaaaaatgtaagactttacgaacttggaaatatttatctgccaaaacagcttccgatcacagagcttccggaggaaagaatgcagtttactctgggaatgtatggagaaggggatttcttcagcatgaagggtgtagtagaagaattctttgagaagatcggaatgcacgaaaaagaaacatacgatccaaatgcaggaaaaacatatctgcatcctgggcgccaggcaaatatcatttacgatggaaaagtagtcggatatctgggagaggtacatccggaagttgccgatacttacggaatcggggaacgcgcatatgtagcagtactggatatgccggagatcattccgtatgcaacttttgacagaaaatatacaggaatcgcaaagtaccctgctgtgacaagagatatcagtatggtagtgccaaaagagatcctggtaggacagattgaagatgtgatcgagaaaaaaggcggagcatatctggaaagctatgcactgtttgacctgtatgaaggaagtcagatcaaagccggattcaaatccgttgcatattctatcgtattccgtgcaaaggataagactctggaagaggcggatgtaacttctgcgatgaaccggatcttaaaagcactggaagagatgggaatcgagctgagaaaataggaccgagtctgtttagaaagagggatatcattgaaaacaagtgatttttattatgacctgccggaggaactgatcgcacaggatcctctggaggatcgctccggttccagattattgtttctggataaagagacagggaaaacagagcatcatatctttcgggatgtgatcgattatctgaatccgggagactgtctggtcatcaacgatacaaaagtaattccggcacgcctgatcggagaaaaagaaggcaccggtgccaagatcgaggtcctcctgttgaagcgcggagaaaacgatgtgtgggaaacactggtaaaaccggggaaaaaagcaaaaccgggaaccaggatcagtttcggagacggacttctggtcggcgaggttgtggatgtggtagaagagggaaaccgtctgattcactttgagtataagggaatctttgaggagattttagaccagcttggtcagatgccgcttcctccatatattacccaccagctggaagacagaagccgttataatacggtgtatgcagctcacgaaggttcagctgcagcaccgactgcggggcttcattttactccggagcttttgaaagaaattcaggaaaaaggcgtggatattgcaagagtgacacttcatgtcggactgggcacattccgcccggtgaaagtggaggatgtgaccgagcaccatatgcattcggagttttacatggtggatgcagaagcggcagagaagatcaacaaagccaaagaacatggaggccgtgtgatctgtgtgggaacgacgagctgccgtaccatcgaatctgcggcggacgagaacggacgcttaaagccttgcagcggctggacagaaatttttatctatccgggatatcagtttaagatattagatgggctgatcacaaatttccatctgccggaatctacactgatcatgctggtatctgcactggcgggaaaagagcatgtcatggcagcctatgaagaggcagtgaaagaacggtatcgttttttcagcttcggagatgcgatgattattttatagaggaagaaaaacgccattctatggggacatagatggcgtttttttgactctgtggaattgaaaaaatgcatggaaaagaaacaaatgctgtgatatgatgaatatgctgtcgaaaccttccagcagaagggaggtgagactatggattatattctccgattccttgtttcggttatggcgagtgtggctggctactacatacgcaagtggttagaccggaatgataaagacagttagcccaaaaagaacccccaaggactggcctccttgggggttcactttgactatggaatattctccatttccttagctaagattatgatatgccactttacaaaaaaagtcaacagtttttcaaacactgatttatcgaatacctcccggctatcggacataggatagtcaggaggtgtttttatgatttatgtgacagtaccgggagatactgtatcttcgatctcccgtcaaagtggggttcccgtctggaagattatttatgataatcagctgggagaagagggaaaactgacagtggggcaggcgctgctcttattaaaaccgcaggagagcgcggaaattcgagaggatttgtatgtgacagggtatgcatatccttttattgaaccttatgtgctggagatggcatttccggcactcaatgaactgcttgtgttttcttatggctttacgtttgaaggagagttggttccgcccatacaggatgaaacatggatgatacagctggcctgggagaatgggatagaaccgatgctggttctgaccccgtttacacagggggtctttaacaatcagctgatccagactctggtggaggaagaatcagtacgtgaaaatgtgattaccaatctgctgaaggtggtggaggaaaaaggatatgtgggcgtggatgtagattttgaatatgtccgtgcgcagaacagggaaggatatgccgagtttgtcggagaattgcgggctgccatgaacgaaaagggatatcgcgtgtcagtggctctggcgcccaagacgtcttcagatcagaaagggctgctctatgaggggattgattatgcacttctgggagaacaggcagaccggctgtttctgatgacttatgagtggggatattcttatggtccgcccatggcagtcgcaccccttacgaaagtccgccaggtggtagagtatgcgctgacacagatcccggctgagaagcttctgatggggataccgaactatgggtataactggacccttccttatgaaaaaggagtgacaaaagcagagacgatcggtaatgtaggggctgtacggcttgcggtggaatacggtgctccaattcagtatgaccaggaggctcaaagcccgtattttacttacagaaatcagggaagagagcaggaagtctggtttgaagatgtgagaagtattgcggcaaagatcgaactggcaaaagaatatgaactatatggagtcggatactggaatttaatgcgtccctttcgtgcaaactggatcatgctggaataaagagaccgggaaatcacatattgaactgtgattccccggcagattaaagattatcttgtgactgaactgcattataaccggtctcttttgtgcggattttgacagcgctgcggatttcatagctgaaaatttttccgtcaccgacttcgccggtaaaagcggctttttgtattgctgagattgttttttgttcccattcttcggaagagacgaccacttcaaatttaattttgggatgtaacaggatatctacttcacttccgcggacaatttctgtatagccacgctgcgttccataccccataacctgggagatggtaaccccgttcacctggatgtcctgaagagcagatttaacctgttcaaatttttcttctcttacgattgcttcaattttgatcaacatgatgactccccctcttttatgaatcaaatccgttaaaggacggatatgcattttctccatgctgtgagaaatccagaccggatatctcagcagaaacatctacacgaagcggtgtgaaaattcttacgataccgatgcagatcaaggttccgcacacagcaactgcaatggtgaccagaatgctgatcagctgtgcagtgaataaatgaaaatctccgaagactaatccattccatctggcaacagaattgacagaagttttaccgaaaagtccggtcgcaataccgccccagataccgccgattccatgacatccgaacgcatcgagcgcatcatcgatttttaatttctgttttaagagcaccacggtaaaatagcagatcggactgacaagtgcaccgatcaggaaagaagaccagatcggaacaaatccggcaccgggggtgatagctacaagccctacgaccagtcctgtagaagcaccgacaagtgtggtttttttacttttcagataatcaatgagcatccagatgagcattgcggaagcagaagcaatcgcagaggtcataaaagcgtgagctgcaagtccatctgccgcaagagcacttccggcattgaagccaaaccatccgaaccagagcagtgatgcacccagagtgacaaatgggatgttgtggatgcgataggaagtgtgttcatatccgcgtcttcgaccaagacagatggcaaggacaagagcggatactccggaactgatatggacaacatttccgccggcaaaatcaacagatcctaaagcggcaaggaaaccgtcttctccccataccatatgtgccatcggataataaacaatcaaagaccagaatgcaataaacagaaacagtgccttaaaacgcattctgccgacgacagctccggtgatcagcgcaggggtaatgactgcgaacatcatctggaaaccggcaaatacaagatgtggaatcgtatcagcataaggaccgggatcggctcctacaccttgaaaagcaaagtatcgaaaatcaccgatgattccggcatggtttccgccgaaagaaagggaatatccaaacagtacccacataacgatggacagccccataatgccgatgcaggccatcattgtgttgacaacatttttccggcggaccaatccgccataaaagaaagcaaggcccggtgtcataagaaaaacaagggcagagcaaagcatgataaaaccagtatctcctgaactcataaaatctcctcctagttgaaacaaaaacagtttttctgctgtgaaaaggccttttctataaaaaaagatgtctgagagatttttaaaaatccttcagacatcttcgtctgcaaacagaatagcagagaagctgaaaaatgacaagagtgaaactaaacaaagaatttttggaaaatcatgcaaaatcttcaaaattaaacaaacaggcagaaaattgtaattgttattgttccggctaatcaaactaagttttgacggaaacgccggctaatagtatagtagatgaaaagaaagtgaaaagagaagaaaataatgaagagaaaaagtgtgagaatttatagttttaccgggactggaagccgtctggcgttaaatctggcggaaaaactaaaacaggaagggtatgtgtgtacaggatatactgtggcacgttttgcagaggataaaaggctgcagagattaaatgacggatggaaacaagaaatcggggcatcctggggagaacatgcactggtatttatcggggcggcaggaatcgcgatccgtgcgatcgctccgtttgtaaaagataagtttacagatcctccggttattgttctggatgagaagggcacatttgccattccgcttttgtccggacatgtaggcggcggagtaacgctggcgaaggttcttgcagaatacacaggaggaagggcggtgatcacgacggctacagatgtgcagaaaaagtttgcggcagacgtgtttgccatggagaacggactcgtcattacagatcgggaagaggcgaaaaaaatctcggcagggattcttgaaaaaaagaatacgggaattttttcagagtttccgcttttgggggatgtacccgaagaactgaccatatgtggcagtgaagaacaactggagggatgctgtgggaagatcgtgatctgtgaaagaaatcccagaaataaaaaatcaggtgtattatatcttttgccaagaaatctgtatgtgggaatgggatgcaaaaaagggacaaaaaaagaaattctggaggcagagcttttgaaaactctggaaaagcatggatttttaccggagcagatccgtgcacttggaagcatcgatctgaaaagggaggaggccgggttgctggagctggcagattctcttggagtggagtttttgacttattccgcagaatcacttcaggaaatttcggcagtcagcagttcttcggaatttgtaagaggagtgacaggggtagacaatgtctgtgagagagcggcgaaaaaaatgtgtccggatggagtgatggttcaggaaaaggtctgtctgaatcagtgcacggctgcgtttgtctgtggtgaagttatggtaaaatttaggaaagaggaggaagaaagatgaagcgtatcttgattttttcaggtactacagaaggtcgggaactggcagaatttctgagaaacaggcaggtggatgtcatcgtcagtgttgccacagagtatggaagagactgtatggatgtcgagagttcttctaatgtaagcgtacgtactggacgtatggatgaggcacagatccggcagtttttaacgacgcagaaaattgatctggtggtggatgcgacacatccgtttgcagcagaagtgacgaaaaatgtagagcaggcatgcaggatggcaggtacggaatatatcagatgtgtgcgggagcggcagaactgggatgacaaaggagagcgtgttgtgcgtgtggaaagtgtacctgaggcggtggaatacctgcaaaatacaacagggaatgttctgattgctaccggaagcaaagaattgaaagaatataccaggatagcaggctgcaaagagcgatgttatgcccgtgtcctttctacacaggtttcagtggaagagagcattcggcttggattcgaaggaaagcatctgatcgccatgcagggtccgttttcaaaagaattaaatcttgcgatgctaagagctttggatgccaggtattttgtgacaaaagaatccggaaaatccggtggttttctggagaaggtacaggctgcagaagaggcaaaggctgtgctggtggtagtaggaaggccgtttgaagtaggaaaaatactaaaagaaacaaaaaaattcctagaaatatgggcagggctgtgctaaaatttagaaagatttaaggaaaggctgaaacaggaagaggacagaatatgaggcagggaatgatccacatttactgtggagacggaaaaggaaagaccacggcagctacgggacttgcagttcgggcggccggaagcgggatgaaagtactgtttgcccgttttttgaagaatgagaactctgcagaattgtgtgtgttagatcagattccggggatagaagtgatccatttaccgaagtcctatgggttttataacacgcagtccgaggaagaaaaggcagaaacaaagcagatgtatgaagaattgtggaagtatgcactggatcgggcgaaaaatggagcgtgtgacatgcttgtcatggatgaatttatggcagcagacaggtatggtctgatcccgcatgaagaggctattcagtttttgaaagagaaaccagaaggtctggaagtggttctgaccggacgggatccgtcagaggatctgatcagaatagcggattatgtgtctgagatccggaaagtaaagcatccgtttgattgcggcgtttatgcccgcagaggaattgaatattaaatattattttgtatgtatggacgctgctctttgtgacagaagaagcaggtgtttctacataaattcagattcaaagcagatttaaaagatgccgtccgaaaaaaggcggcaggggaaccaggtgagaatcccggacaatgctcgttgctgtattggagtagtggtatttcatgaggtcactgtaggaaattctatgggaaggcgaaatactgtgtttgatgcctaagtcagaacacccgcttttaaaggaatctggaaggttacgggaatatgaccgggtgtatgcaaaacagtctccttttaggaccttttgacagcctggaatatttcagaaaaattttgtcaaaggaaaaggagagaaaagaacatgacaaaaaaacaaaatatcttactgaaggcaagcatcgcaatcgcggtgttatttgccattgcaccggcttcaaatgctatgcacattatggagggataccttcaggcaacattttgcattgcgtggggagtcatctgcctgccgtttatcgtcgcaggatttttttccattcaaaaaacattaaaacagaacagaaaaacactgatccttctggcaatgtcaggagcctttgtgtttgtgatttcttccttgaagatcccgtctgtgaccggaagctgttcccatatgacaggaaccggactgggtgcgatcttattcgggccgacggcagcaggcgtgttggggctgatcgtgttattatttcaggcaatcctgctggcacacggcggactgaccacgctgggagccaatacattttctatggcaatcgcaggtccgtttctttcttatgggatttataagctttgccagaaactcaatgtaaaccggaaggtggcagtgtttctggcagcatttttcggggatctgttcacttactgtgtaacaagtctgcagcttgctatggcatatccgtctgaagcgggcggggtgggagcttccgcagtgaaattccttggagtgtttgctccgacacagcttccgctggcagtaatggaaggacttcttacggttgtgatcgtgatcgcactggagtcttatgcaaaaccggaactcaaagccgttggatttttaaaggaggaaaagtaggatgagtaagaaaaataaaacactggtactggttctgctgctcgcggtggtcctgctggcggcagttccgtttctgactttgaaagatgcagagtttggcggatcagatgatgcgggaagtgtgatggtagaagagatccatggagaatatgaaccgtggtttacccctgttttggaagattttcttggaaaagaaatcccgggagaggtggagtccctgctgttttgtgtacagaccggaatcggcgtgggaatcatcgctttttgcatgggtcgtctcgtagagcggaagaagtggcagaatgataatcattgataaattaagttattcctccggacttgcagatgtgagtccggaggagaagtttgcatatgcggttctgaccctgttggtctgtgtggtcagccggtctgttacagcggcagtgatcgtactggcggtcaatggaattctcaatgtaaaaaagggaagagttccatttcacctgtacctgaaatacctgatggtacccctgatatttctgctgttgagtacactggcaatcctggtcaatgtatccaaagagccgctggatgcctatgcaatcccggtggggcagtattatgtgacatccagctggatggggctgaaaaaaggcgggcagatgatactgactgcgcttgcaagtgtttccagtctgtatgtcctgtcttttaacacgccgatgacggaaattctggatgtgttaaagcgactgcattttccgggattgttcattgagctgatgcttttgacatatcggtttatttttattctgatggaaggggcatctgcaattatgacggcacagaaagcaaggcttggaaaccgggatctgaaaacttcgatccagtctttcgggcagatggcatcggttgtgtttgtgcgggcgctgaagcagtcggatgcattgtacaatgcgatggaatccagatgttatgacggtgagatccgggtactttcaggagagtatgaaaaaaacaagagcaatttccggaaaatagcagtttttgaggcagtcctgattttgcttgcggtttgggggagaatagtatgagtgaagagattattttagaggcgagagatatctggcattcttatgaagagaatgaccggttttctctgcaggggctggacttaaaagtaaaaaaggggagtaaggttgcttttatgggagccaacggttctggaaaatctactttttttctctgctgcaacggaattttacgaccacaaaagggagatattttgtttcatggaaaacctgtgagctacaagagaaaggaacttctggcacttcgggccaaggtgggcatcgtgtttcaggacccggataaacagttgttttctgccagcgtggagcaggaaatctcattcgggatcctgaatctgggtgttgcaaaagaacaggcaagaacagaagtggagcaggtgatggaagaactggagatcgtgccctttcgaaaacggccggtacatgcgttaagcggagggcagaaaaaacaggtctcgatcgcggatattttagtgatgcgtccggagatcatcattttggatgaacctgcagcagccctggatccgaagcatacccgtatggtaaatgagatggtagacaaactcacagagcagggaatcacagtactcatggcgactcatgatatggattatgcatatgcctgggcggatgagatcgtgttgatgaaagatggaaaagtgctctgtcagggcgcgccggaagcagtgtgcagagaaacagaaaagctgaaagagacgaatctggaagaaccggctcttttacggttatttgaccgtttaaaagcacgtaaaataatagaagcaacaggaaaagctccaaggacatggaaggaactggagcagttgatcggatagaaatttctggagaggaaggattgaaaatggagaaaaaaggaattcttgtggtaagcttcggaaccagtcatctggatacgatggcaaaaacaatacaggtaatggaagagcagattgcagaagcatttcccgggtatacggtataccgggcatttacaagtcagatgatcttgaacaaactggaacggacagaacataaaaagtatgataatgtccgtcaggcactggagcgtatgaagcaggacgggatcacaagggtgatcgttcagccgacacatattatcaacggcattgaaaatgaaaaaatgctggaggagattcaaaaacatgcgtcgtcttttgaaaaagtcctggtgggaaaaccacttctgtctgaaccggatgattataaaaagacagtgcatgcagtgatggaggatgtggatctggaagagggcgaatgcctgatcttaatgggacatggaacagatcaccatgcaaacagtgcctatccggcgttggaatatacacttcaggcattgggatatgaccgcattcatgtggcgactgtagaaggctttccagaattaaaagacgtgatgcatcggattgaacaaaagcagtatcgtaaagtggcactgctgccgtttatgtttgtggcaggagatcatgcaaaaaatgacatggcaggagatgaggattcctggaaatgtgagctggaagaagccggatatgaagttcgcccgatcttaaggggacttggagaacttccgggaatccgtcagattttcatggagcatttagaggaggcacaatgacagaacaggcatttgtgtggaaagatcagaaaaaactgagaatgggatataccaccggaagctgtgctgcggctgcggcaaaagcagcagccagaatgctgtttttgggagaagagatccgtcaggtttctctgatgacaccaaaagggatccggctgtatctggatgtggaggacattttgcgtatgaaagacaaggtacgctgtgcgatccgaaaggatgcaggggacgatccggatgtgacggatcagattctggtctatgcagaggtttccaaaacagagggaaagcagatcacactggatggcggcgttggtgtcggacgtattaccagaaaaggactggagcaggatatcggcgatgccgcgatcaataaagttccaagagccatgatccgtgaagcagtggaaaaagagaaagagcgcggcgggtacacaggcggtctttctgtgatcatttcaattcctgacggagcagaactggcaaaaaaaacattcaacccgaggcttggtatcgaaggaggactttctgtgcttggaaccacaggcattgtagagccaatgagtgagaaagctctgacagatacgattttcctggaaatgaagatgctcagagaaaatggaaacgagtactgttatctggtaccgggaaattatggaagtgattttctgaaagaagcacttggttatgatggaaatcttgcggtcaagtgcagcaattacatcggagaatccattgatcatgcggtgcggctcgggatgaaaggaattctgctgatcggacatgtgggcaaactgatcaaggtggcggcaggagtgatgaatacgcactccagacaggcggactgcaggatggaagtatttgcttcgcatgcggcgatggcgggggctgatcctgaaaccgtaaaaaaaattatggaaagtattacaacagcagaaatgacagaactgcttgaaaaagaacagctgttgggacaggttatggattctgtaatgaaacggatcgcattttatctgaagcacagaggaggggagtctcttcgtgtggaagcaatcgtgttttcgaatgaaaacgggatattaggagagacttccggtgcagaagaacttttggaaatcatacgcgcagaatcagtgaaagagaaacgaacaggagagaaagaatgagcggaatattttacggagcaggtgtagggccgggagatcccgagcttttaacagtaaaggcactgcgtgtcatgaagcagtgtccggtgattgcaatcccggtatcggataaaaattttacagaggcggcgtatgatccgacaggaacagatcctgcatataaacgttatctggaaaaatgtgttgcctatcagattgcagtgcaggcagatgcacaaatcggggagaaagccaagttgtatctgccaatgccgatgatgaaagaaaaagaacggcttcgtcaggtacatgacgagggtgcagaaaaaacagcagagcttctggaaaaaggaatggatgtggtgtttatcacgctgggagatccgaccgtgtactcgacctgtatgtatattcacaagagaattcggaaacagggatatgagacaaggatcataccgggagttccttccttttgtgcggcagcggcaagactggatcagagccttgtggagaaccaggaagaactgcatgtcatccctgcgtcctatgagattgaagaaggattaaagatggcgggaacaaaggtgctgatgaaggccgggcgaaagattccttatgtcaagcaggtgatcaaagagcagaacttaaatctgacgatggtagaaaactgcggcatggagaatgagacaatctaccattcggcagaggagattccggatgaggcaagttattattcattgtttattgtaaaagagaaaaaatagcagaaggggaggagacgaaatgatcgtatttgtaggagcaggaccgggagcggaagatctgatcacagtgcggggacagcagtatttaaaagaagcggacattatcatttatgcagggtcactggtaaatccgggtcttttgcaggtaaaaaaagaaggctgtgaagtatataacagcgcctatatgacgctggaagaagttctggaagtgatgtatgcaggggaaaaagaaggaaaacggatcgttcggctgcataccggggatccgtgtctgtacggagcgataagagagcagatggatgctttggaagagcgtcagattccgtacgaagtatgtccgggtgtcagttctttttgcggagcagcagcagcgctacatgcagaatatacactgcctgatatttcccagtctgtggtgattacaagaatggcaggcagaacgccggttccggataaagagtccatccgcagctttgcggcgcatcaggcgacgatggtgatttttctgagcaccggaatgcttggaaaactgcaggaagagctgatggcagggggatatccggcagacactccggcagcgatcgtgtacaaggcaacctggccggaggaaaaagtgctgcgatgcatggtctcagaactggaaaaaacagcggcagacgcacaggtgacaaaaacagccctgatcgtggtgggaagaattctggaaggagaatatgagagatcacttctgtaccatccggaatttaccacagaatttcgacagggaaaacaggaggagcaggcagatgaatagagtgtatgtagtcgggatcggtcccggagcgggaaaacagatgacagaagaggcgagagaagtgctgaatgcctgcgatacaatcatcggatatacggtgtatgtagatctggtgaaagagcagtttcccgagaaagaatttctgaccacgccgatgaagcaggaagtgaagcggtgcaagatggcatttgaggaggccatgaaagggaaaaaagtggcgatgatctgcagcggggatgccggtgtgtatggaatggctggtttgatgtatgaggtcggtgtcgagtttcctaaggcagagcttgagattgtgccggggatcacggctgcaatcggcggtgcagccgtgcttggagctccgttaattcatgattttgcagtcatcagtttaagtgacctgctcacaccatgggagaagattgaaaagagagtcagggcagcagccatggcagattttgtgatctgtctttacaatccttccagcagaaaacgtcatgactatctggagaaggcatgtaatatgatgctggaatacaaagcagaagatacaatctgcggaattgtcagacagatcggaagagacgggcaggagagccggatccttacattaaaggaattaaaagacacagaggtggatatgtttacaacggtgtttatcggaaatgaacagacacaggaaatggatggtcacatggtgacaccgagaggatatcgggatgtgtaaagagaaaagaatcgtttatctggccgggatcggaatgggaacgaaagaggggatgactgtccaggcaaaagagtctttaaaaggctgtgactgtatgattggcgcaaaacggcttctggaagaggtatccgatgcagattgtgtctgccatgcagaatatctgccggaaaaaatagaagagtaccttcgaaagcatccgcagttttgcaggatcgggattgtactttccggggatgcaggattttacagcggggcaaaaaaactggaagaagttctaaatggcagtgaagaacggtatgaaatccaaaggattccgggaatttcgtctgttgtgtattttgcagctgcgctacacacttcctgggaggatgcagcccttgtcagcctccatggaagatggcagaactggatttatgaagcagaacatcatgcaaaaacttttctgctgttgggcggaagaaaagaaaatctgaaagagaagcttttgtattatgggcttgaagacttgacggtacatatcggaaaaaatttttcctatccgcaagagcagattttttcaaaaacggtaagcgaactgacggaggaggatgcagaggggctttgcattgtctgtctggaaaatccacatccatcacagaaggtgtgccggcatttgaaggatgaagcctttacaagaggaaacgttcctatgacgaaagaagaagtgcggacaatctgtatcgcaaagcttgatctggaaaaagatgcggttctttatgacgttggtgcgggaacaggttctgttgctgttgaagcagcctgccaggacggcagtattcgagtgtatgctattgaaaagaatccggaagggatcgagctgatccgtaaaaacgtgcaaaaattgcggacagataatgtgcagatcgtggagggaacagcaccggaagcactcaggaaactggaaccgccgacccatgtatttatcgggggaagcagcggaaatctgagggaaatcctgctggcagttaaaaagaagaacccggatgtacagatcgtactgacagcgatttctctggatacgatggcggaagtaatggaagcagtggatgaagggcttttgcgggaaccggaaattgtacagattacagcggcaaaagcgagaaaactgggacgtcatcacatgatgacaggacaaaacccgatctatattatttcggagggagaagcgtgaatattccaaaaattttaattgccgcaccgtccagcggaagcggaaaaacggtgatttcctgtgggctgatggcagcgttttgcagacagcagaaaaatgttgtttcctgtaaatgcggaccggattatattgatccgatgtttcaccgggaggtgctcgggattgattctcagaatctggatctgtttttctgcgagaaagagcagctgaccgggatttttgcagagcatgccaaaaatgccgatctggcagtggtagagggtgttatgggatattatgacggtatgggactggatacggcaaaagcaagttcctatgatgtggcagctgccttgcagataccggtcgtgctggtggtttcagcgagaggctccgctctgtctctggctgctctggtgaaagggtttctggaatttaaaaaggagagccggattcggggaattttgttaaaccgcgtatcggcaatgttgtatccccgtttgaaagaaatgctggaaaacgagctgaaaaaggcaggacatccgatcaaggtgctcgggtatattccggaacatgaagcgtttcatctaaagagccggcatcttggtctggtcacaccggaggaaatcaaacatctgaaagcacagctggagcaggcaggagagatcctctcagagacggtagatctggaaggtctctatgagttggccaaagaagcaccgtctctggaaataagcgtacctgaggatgaggagaaagaaaatccaaaggtatcgattgcggtggcaagggatgaggcgtttggattttattataaagacaatctgaaactgctggaaagatatggctgcaatctggtgtatttcagccctattcgagatacccacctgccagaaggagtcagcggtcttttgttaggcggcggatatccggaattatatgccagagaattaagtgaaaacaaaaccatgcttgctaaaatccgggaaagcattcaaaatggaatgccctgccatgcggaatgcggcggttttttgtatcttcatgagaagcttgcggatccgaaaggaaaactctggaagatggccggcgtgatcagaggcgaggcagcgccgaaggaaaaactggtacggtttggttacatcaatctgacaggagtggtggacggtacgtttttgaagcgaggagagaggatccgcggtcatgaattccactactgggacagtacaaataatggaacagatgcaaaagcgttaaaaccggacggaaagagaagctgggaatgcgttcatatgcagcagaatctgtttgcgggatttccgcatctttcctattcgtccaatccggtatttgcagaaaggttcatgcgggaagcaatcagatgggagcagtcacaaaaagaaggaagtgaaagaaaatgacactggaagagttgaaaaaagagatcagacctttggatgaaacaagcatggaacaggcaagaaagcactggataaagatcgcaaaaccactgttttctctgggaaagctggaggatgcagtgatacagatggcggggatcaaagagaccccggattatgagctgaagaaaaaggcgctggtcattatgtgcgcagacaatggaatcgtggaggaaggggtcacacagaccgggcaggaagtgactgccatggtagcggacaatttcacaaaatccagtaccagcgtctgtgcgatgagcaaagtggccggggtggatctctttccagtagacatcggaatggcggtggatgttccgtcagtgacagtcaaggaagaaaaagttgcctacggaacacgtaatttttcaaaagaacctgcaatgacaagagaagaggtatggcaggcaattgaaatcggcatccgaaaagtggaacagctcaaagaacagggatatgagatgatcgctacgggagagatgggaatcggtaacacgacgaccagcagtgctgttgcgtcggtgctgttatccgttgcaccagaacaggtaaccgggcgcggggcaggccttagcagcgcagggcttgagaaaaagatttctgttattaaggatgcgattgcaaactatcagccggacaaggaagatccggtggatgttctttcaaaagtaggaggcctggatattgcgggtctgaccggtgtctttttaggaggagctctgtaccgcgttccggtggtgatcgacggatttatctcttctgtagcggctttgtgtgccgcgcgcatggtgccggtttcaaagtcttattttctgccttcccatgtatccaaagaaccggcaggagctatgctgttggaggcgttggagctttccccgcttttgacttgtaatatgagtctgggagaagggaccggcgcagtggcagtgattccggttctggagatggggctttcggtttaccgggagatgaccacatttgaaaaagcaaagatcgaacaatacgaggtgttaaaatgagattctttgagtctctggcaatcggagttgcgatgtactcgaaaattccgatgccccgggtggaatggaatgaaaaaaatatgaaatatgccatgtgctttttccctctggtaggagtggtgacaggaattctggaggtcatcctcggaaatgctcttcttgtgtatacgtcatgcggaacgttgttttttgcaggagtgatgacactgcttccggtactggtcaacggcggaatccacatggacggattcctggacacgatggatgctctgaattcctatggaagcagagaaaagaagctggaaattttaaaagattcccgcaccggagctttcgcagtgatcggatttggactatatcttgtggcaagtctggcattgtggagtgaagcaaaatcagaaatgctcccggtgatcggggcaggatatgtaatgtcacgttcccttagcggactctctgtgatggtgttcccatctgcgaaaaaagacggacttggacgaacctttcaggagcaggcacacaggaaacgggtggcagttgtgatggtgtgctggttttttgcggctttggcagtgatgttgatgacttctgtgcagatgggcgcggcggctctttgcaccgctcttctggtattctggtattaccatcacatggcaatgaaacagtttggcgggatgacaggcgatctggcaggatattttctgcagcttgccgaacttctgatactggcagcagttatcgtggcaggaggtgcattatgagaatctggctgatccgccattttcagacacagggaaatctggaaagacggtatatcggacgaacagatgagcccatcttgccggggcagacaggaagtatcctttgttgtccggagaagatcatcacaagtccaatgcttcgctgcagacagacagctaggttgttgtttcaaaaagagccggatctgatctgtgaaaatttccgggagaaggatttcgggcgttttgaaggaaaaaattatgaagaattaaaagacgatcccggatatcagaggtggctggattccaatggaacgattccttttccggaaggagaaggacaggagacattttttgagcgaacacgccttggatttgagcagatgatggagcatctgatggatttgcagtgccgggaagcagcatttgtcgtacacggcggtacgatcatggcggttttgtcagcgttttctcaaacgggaggagaattttatgactggcaggtctcaaatggcagcggatattctgcaatcgcagaggagggaagctggagacagggaaaaaaacaactgacggagatagaaagattatgagaatattacttgcatgtatgacaggatttggactggatttgatctttggcgatccttactggctgtatcacccgataaggctgatcggacatctgatttcttttttggaaaaaccgctgcgaagtgcggcgggaaaatcaccgaaaaaacagattgtggcagggggaattctgtggctcctggtgattttgatcagtaccgggattccatgtctgatgctgtggacggcagagaagatccatccggctgtttcgtttcttctggaatgcttctggtgttaccagatcctggcggcacgttcactttctgtggagagtaagaaggtataccatgctctgaaaacacaggatgtggagggggcaagaaaagcagtttccatgattgtaggaagagataccaagtcgcttacagaagaagggattgcaaaggcagcagtggaaactgtggcagaaaatacatcagacggtgtgactgcgccgctgatgtttctgatgcttggcggtgcaccgcttggattcctctataaagcggtcaatacgatggattcgatgctgggatataagaatgaaaaaaatctctatttcgggagagtggcggcaaagatggatgacgtgtttaattatctgccatccagagtatcggcagttctgatgatcgcggcggcatttctgacaggaatggatgcaaaaaaggcagcgcagatttataaaagagaccggagaaagcatgccagtccgaattctgcgcagacggaatcagtctgtgcaggggcgcttcaggtgcagctggcaggagatgcatggtattttggtgtactgcataaaaaagagacgatcggagatccgatccgtcctgtcgaggccgaagacatcaaacgggcaggaaggctgatgtatgtgacagcagtgcttaccctgctgtttgcaggaatgatccggttctggtatttctggtaagaaaggagacaaaatcatggaatatatgcatggcggagatatttatacttatgaaaacgtgacggactactctgtcaacctcaatcctttcggaccaggagaagaggtgcttttggcgatggcggaaaatctgaagcatgcaggggagtatccggacagcaaaagccggaaactcagaagtgcactggcagaacatctgcaggttccccaggaatttctgatttttggaaatggagcggcagaactgatctttttgctgatccattcccttcgaccgaaaaaagcgctcctgacgatcccgtcttttgcagaatatcacagagcgcttcaggcggtggactgtgaatgtgtgtactatccgctcagtgagaaacacgggtttgtgccgcaaacgtcttatctggagtttttgaaagaagatgtggatctgctcttcttatgttctccggataatccaagcggagcggtaatcccaaaggactttctgcttgagattttaaagacatgtgaagaaaaagggattctcatgattttggatgagtgttttgtggaatttctgtcagaaccgcaaaaacagacactctgcagagaatgcgagagaagtaaaaatctgatgattctgcaggcctttacaaagatttctgcgattccgggaatccggctcggatacgggatcacatccaatttggagctgcttgaaaagatggaaagaaaccggcagccctggagcgtgtccagtgtggcacaggcagccgggtgtgcggctttaaaggaaatgaaaagatggcaggaaatgcgaaaatggctggaaactgaacgggcatggctggaagaaagtctgacccggattggggtggagtggttcccttcaaaagtgaactatctgctcttaaagagtccatatccgctgttctctctgctgcttcagaaaaacatcctgattcgggactgctccaattatgagggactggaaaaggggtattaccgaatcgcggtgaaacagagaacagacaatgaaaaattactgaaagcattggaatatatttatgaagggggagaatgagaatggcagcaccgatcatgatacagggaaccatgtcaaatgcaggaaaaagtgttctggcaggcggactgtgccgggtatttcatcaggatggatatcaggtagcgccctttaaatcccagaatatggcgctcaattcctttattacaagagaaggtctggaaatgggaagagctcaggtcatgcaggcagaggctgcgggtatcgaacctcttgcgatcatgaatccgatcttgttaaaaccgaccaatgacaccggctctcaggtgatcttaaacggagaagtacagggtgtgatgtcagcgatggaatattttcgcaggaaaagagaatatattccggtgatcaaaagcgcctatcagaaactggatgaacagtttgacattattgtcatcgaaggtgcgggcagcccggcggagattaatctgaaacgtgaagatatcgtgaatatgggaatggcagagatggtagatgcaccggtgcttctggccggagatattgacagaggcggtgtgtttgcccagattgtgggaaccattgagcttttagaggagcaggagagaagaaggatcaaaggaacgatcatcaataaatttcgcggggacaaagaaatcttacgtcccggacttgatatgctggaagaaaagacaaagattccggtatgtggggttgttccttatttccacctggatattgacgaagaagacagcttaagcgagcggttcacgcacagagaaaagaaagggcttctggatattgccgtgatccggcttccgagaatttctaattttacagatctgatgccgctagaatctatggatgaagtcggtgtccggtacgtgacaagtgcgtcacagttcggcactccggatgcggtcattcttcccggaagtaaaaacacgatggaagacttgaagtggcttcgtcagtgcggactggaaggaaagatccttcgccatgcggcatccggaaaaactgtatttggaatctgcggcggctatcagatgatgggagagcttttgcaggatcccaaaggtgtggaagcgggcggggaactcaaaggaatgggcttgcttccgatacagactgtgtttgcaggggaaaagatgagaacccgcgtacagggaacttttgaagggctgtctggaagtctgagcagtttaagtcaggtgccattagaaggatatgaaatccatatgggagtgacaacgtatacagaggagccttgtccgctggtgcagattcaggaggaaacaggcgaaagacggattcgatatgacggcgccagaaaaaacaactgttacggctgctatgtacacggaatttttgatcaggcttgtgtcgcatccgggtttgtttcggcacttttaaaagaaaaaggatatgatgccgggcagcttgagcgtctggactggaaggcatacaaggaaacccagtacaataagctggcggagattatccgggaaagtttggatatggagtatatttatcagattctggggaaaggaacgagaatgccatgaaaacagtaatacggatcggaagcagggaaagcaggctggcggtgacacagaccgagatcataaaaggacagattgaggcgcattttccgcatatccgtgtggagatcgtgacaatgaagacgaccggagaccggattttagaccggagtctggagcagatcgggggaaaaggtttgtttgtcaaggagctggatcaggctttgcgaaagggacgggtcgatctgtctgtgcacagcttaaaagacatgccgatggacatcccggaagatcttccgattcttgcatatagcaaacgggaagatccgcgagatgtgctgatctttcggcagggacagaccgaaagcatttccggcgggatgattgggacttccagcaagaggcggagactgcagctggagagactgtatccggactgtcactttcagggaatccgcggaaacgtgcagacgagacttcgcaaactggaggaagaaggattttgtgctacggttctggcagcagccggattaaaaagactgggaatggattcctgtatcgggagatatttttcctgcgaagaaatgatcccggcagccggacagggaattctggcagtgcaggcaagagccggggaatatcaggaacttttagaagtgctcaacgatccccggtctgaggccgcggcgaaggcagaacgagcctttgtaaaagtactgaatggcggatgtacttcacctgtggcagcatatgcagaaatcagaggatcaaagtgtcatattacagggctgtactggagagaatcggatgagaactggtttgtagaaaagacaagcggcaataagaaagaagcagagctgttgggggagactcttgcacacaatatgcagaaaaagtatggaaaatagaaaaggagcgcatatggaaagtcagcagaaaaaaaagacaggaaagggatctccatccggcaaagtatggcttgcgggagcaggaccgggagatgcatctcttttgacactgaaagtaaaaaaatggatggatgaggcggatgtgatcatctatgatgcgctgatcagtgcagaaatcctgagtctgatcccggatggaaaagaatggatttacgtgggaaaacgttccggacatcactgtgtccgtcaggaagagatcaatcagattttgcttcgtgaggcgaaagcaggaaaaaatgtccttcgtttaaaaggaggagatccgtttgtattcgggagaggggccgaggaggtggagtgtctggcggcagaagggattccgtttgaaatcatccccggagtgacttctgctcttgcagttccggcgtatgcaggcattccgatcacgcatcgggattttgcgtcttcctttcatgtgatcacagggcatgcaaaagaaggcaaaaaaatagagattccttatgacgcccttgcaaaattgaacggaacgcttatttttctgatggggatcactgccatggaagaaatatgccgtggactgatccaggcgggaatggatgagaatacaccggcagcagtgctggaaaaaggaactacggcaagacaaagaaggcttgtcagcacacttgccaggctttgggaggatgcaaaaacatttcaggtgcagacgcctgcgatcattcttgtgggaaaagtctgtacattgtctgaaaaatttgactgggtaaagaatctccctctgtggggaaaacagattctgaccacccgcccgaggcagaacagttccaggctggccggaaggcttcgggaattgggggcacaggtaattgagctgccgtctattacaacaaagcctgtctggccgaatgaagtacttgggacaattctggggagtatcagagaacaggaaagcgagcagtggcttgtgtttaccagccccatcggggtacagacgttctggaaacagatcagaatgctgaaaatggatgtacgcaatgtatttcttccccatgtaaaagttgccgcaattggttccggtacagcaaaggaactggaacagtttggcgtgtttgcggatgtcatgccccggacgttctgtgcagcggcactgggggaggcaatcgcaggagaagcggcaccaaagagccggattgtactgctgcgggcaaagcagggatccgaagagttgcttccgccgctgaaaaacgccggattgaaggtggaagatgtgcctctgtatgaaacggtctgcaaattgcaggagactttaaaggaaacaatcgagaagcagcagaggcagggagaaattgatctggtgacatttaccagtgcgtccacggtccgtggatttgtacaggcacttccgggaatcgatactacaaaaatacgggctgtctgcattggagaacagacagcaaatgaggcaaaaagatatggaatgcagatacagatttcagaagaagcatctgtggagagcatggtcttaaagattctggagctggcagaagactagagaggagagcatacagtggcaaaatacataggaaaacggcttgttacagggattctttccttgtttgttctggcaacggttacattttttctgaccagggtaattccgggaagtccttttcagggagcaaatgtgtcggagagtgtgctgcagatgatggaggaagaatatggattacatcagccggcaggggtccagtatgtcacatatatgaagcatctgcttcgcggaaatctgggatattcttatcaaaatccgtccgaatcggttgcaaatatcattcaaagatcctggccggtgactgcggtgatcggagttctggcgattcttctggcaatgatcgtcggaatcgggattggagtctggcagactttttcgagacacaggctgcttcggggagggctttttactggaacacttctgatcggaggagttcccaattttgtggcagcacttttgctgatgcttgtatttggagtctggctgaaatggctgccggtcagtggactggattcctggaaaaattacattctcccggtatgcgctctggcgctgtatcccgcctgttcgctggcacggctgaccgggacacttcttgcccaggagaaacaaagagattatgtacttctggcgcgaacgaaaggactgaaaaaaagacagatcctgtttacgcacattctgccgcatatctggattccggtgctgaattatctgggacctgcaagcgcgtttcttttgacaggaagttttgtggtggagagcatttttaccattccggggcttggcagacagtttgtaagttccattgcaaaccgggattatacactcattctcggattgacgatctttatgggggcagtcgtgatcctgattcagctggcagtggacttacttagtgcgtgcattgatccgagagtgcgaagaagctatgtagatgaggagtaagagcagtgcaaaggagaagcaatgaagcagataaattttagaaaaaacgaaaaaataacagtgggactgatcctgcttttgctctgcatttttttagcagtactggttccggccctgtcaccttggacatctacagaaatgcatgcggatatccgcaatcagggaatatccttctcccatcctttcgggacagataagtttggaagagatctgtttgtacgggtttggtgcggagtcaggatcagtttgtgtgtcggacttgcaagtgcacttttaaacggcgcgctgggtgttttatatggagcggcatccgggtatgcgggaaaaaccgcagataatattctgatgcggatcgcggatattgtggcatcggttccgtctcttttgtatgtgatcctgatcatgatggtactgggagcgaatgaggtaagcatccttgtgggactttgtatatccggctggattgaaacagcgcgaattgtaagaggagaagtgatgcggatcaaagaacgggagtttgttctggcatcccggcttgcgggagccggccctcttcggatttttctgacccatcttttgccgaatgctgcaggaccgattgtggtaagtcttacatttctggtaccgcaggctatttttaccgaagcatttttgagctttatgggagtcgggattccggcgccaagagccagtcttggcaccatgatccaggcagccagaagccagattttcgtgcatccgtatcagatgctgattccgacagcagtgctgtgtatcctgatactgtcgctgaatctgatcggggcaggactggaagcaaaaatccgcagaagaagggaaggaatgtaagatgaagctgttagaagtagaaaatctgactgtacagtatccgggaagcaccaatccggcatgcaaggtatcttttcaggtagaatccggagaactgcttgggatcgcaggggcttccggtgcagggaagagcacggcgatgctgtcattgatggggattttgccggaacaggtacagatcaccagcgaaaaattgaagcagcacgggacaaaagcaatgatctttcaggatgcttcggcatctttaaatccgctggtccgtgtgggaaagcagctcacagagaccattttggcacatcagaggtgtaccggaaaagaagccagagagcgggcggaaacacttctggatgaagtgggaattcaagatcccgggcagagaatgaagcagtatccgtttgagctttccggcggaatgaagcagagggtggcaatcgcgatcgcacttgcatgtaatccggatctgatcattgcggatgagccgaccacagcgctggatgtgaccgtacagagacagatcctcgatctattgaaaaaaattgcagaagagacgcatacagccatcgtactggtcagccatgatctgggtgtgatcgcctccatgtgcagcagggtgctggtgatgaaagaggggcggatcgtagaagagggaagtatggagcagattttttatgaaccggtacatccttatacgaaaaaactctcggacatggcaagaaagctttatcaggtgccggagaaaaaaaggaccggagaagttattttaaggacacagggactgggaagaagctttgtaaaaaattccctgtttggaaaatccagatctctggaagcggtggaaccgctgtcttttgagattcataagggtgagacctttggattggtaggagagagcggatccgggaagacgactcttgcaagaatgctgacagggattattcctccgagctgcggcagtttttcctgtgaagggaagatccagatgatctttcaggagacatcggcatcctttgatccggaattttcactggaacggatcctggaggagcctctggtgattcagaaaaaaggctccaaaaaggagcgggaaaaacgtgtggcagaaatgctcggactggttcagatggaaaaaatcgacgtcagaaaaacgacagcgactctttccggagggcagcgtcagagaattgcagtggcaagggcattacttttaaatccggagcttttaatctgtgacgaatcgttttcttcgcaggacatccttacgcagtctcagcttctggagcttctggaagagattcagagaaagacacagctgtcctatttgtttatttcccatgatctgcaggtagtcagacggatcagccagaggatgggagttatgtatcttggaagtatggtagagcagggattgactgcggagatttacgaggagccgtggcatccgtatacaaaagaactgctgcgggcaatgctgccgcttgatccgaagaaagcagccagacagaaacgactgatcctgaaggaaacgagaaatcattctcaggatacagaaaacggctgtccatatgcaccgagatgccggtatgcaatggagtgctgccacaaagaaaaacctggaaactatcggtttggtgaaagagaagtgcggtgctttttgtattcggaagcgcataccaaaaagcgtgcaaaggattaccatatgacttctcagatttgagaacagaagagaatggagaagagcatgaagaaaaaaatgacagcgattgccatgtgtatctgcattctggcaggcatgataacagggtgcaatgcttcggatcagaagaagacagaagcacgtacaaaaaaagaaattacgattgcagtaaacagtgaaacaggagggatggatccggcgggaaatattgcactgacctatctttcctattcggtcacagcactggacgaactgctgacatttgatgaaaatggagaaatcgaataccgggcggcacagtcctatgaggtgaatgaggattctacagaatggacatttcatttaagagaaggggcctgctggtcggatggaacaccggtgacttcggccgactttaaaaataccatcgtgcgggcactggatcctaaaagtggaagtggatatgcgaactatctgtttcctattgaacacgcagaggaaatttatgaaggaacggctgatatggagagccttggtgttgaaacaccggataaaaatactctgatttttcatttgagtaagccgtgtgtgtattttctggagcttttgcgtcttccggtctacacaccgtcctgcagtaaatatgcgaaagagacaggcagcggatgggataaaaatccagagaccagtctgtcaaacggaccgttttatctggaaaaatatgtacccgagcaatattttgtcctgaaaaagaatgagcgttactggaatgcagatgcggtgcatctggagcggatcacctatcgcttttttgaagaacagcaggcaatgttaagtgcttatgagaccaaagaggtcgatgtggcagtctcccttccttctgtcgtcatggaactgtatcaggggaaagacgatctggtagtgacagacaatatcgcgacgcgctatatttatccgaatctggatgtgaagcctctggatgatgtgcgtgtgcgggaggcgatcaatcttgccatcaaccgggaggatctttgtaagatggtaggagaagacacagagccgactgtgaatttcgtggcaaagcgtatgaaaaataatacgaccggagagtattttgtggaagaggcagatcctccatttgaggaaaatgtggaaaaggcaagagagctgctctctcaggcggggtatccggatgggaaaggatttcctgttttgacctacaaatatccgtctctggaattagatgcagatacggcccaggtgatccaggagcagctcaagcagaatctgaatatagagatcaagctggaggcgcaggaattacagaccaattatgcgaccagaagagccgggaactttgatctttgccggatgaactggacggcagattttgcagatccgtacacctacttatccatgcttttgtcaaatggaacgtataactgcagtggagtccgggatgaaaaatacgatcgtctggtagaagcctcggatgtggaaacagatcctgtaaaacgaaatgcactgcttcatgaggcagagcagtgggcagtgggagagcagttttatatcattcctttgttttctatgaaaagctgcaatctgattcggccggatatcacaggagtgagtcagattccggcaaccggagcactggaataccggtatgcagatgtgaaaggagactgaaatgtttcacgtagtgacaggcggaagtgggagcgggaaatccgcatatgcagaagaacagatttgtatgctcaaaaaaaagacaaattcccgtcatctgtattatattgcaaccatggtcccttatgggaaagagacagaacaaaagatcctgcgccacagacagatgcgaaatggaaaaggatttgagacgttggaatgttttacagaccttaagaagatggttcagaccgagccgggttttcgcgcggatgcggcagaagagggaatctgtgtacttctggaatgtatgtcgaatctgaccgcaaatgagttgtatttggatacaggcgcaaaagaacggaccagggaagccgttcttgaaggaattcgggaattagaaaaacgctgccggggacttgtggcagtcacaaatgaagtgttttgtgatctgcctccggctgacgaagaaatgcaggaatacttaagcgtactgggaacgatcaactgccggatggcaaaaatggcagatcaggtgacagaagttgtttatggaataccggtggaggtgaaaaagggatgaaaatggtaatcggaggagcttatcaggggaaaacagactatgcaaaacaggtatatccaaaccttgtgtggagtgacggggcatcctgcgacctgaaagacattttttcctgttcgggaattgttcattttgaagaatttgtaaggcgctggatccgggaaaacaaagcagagcatgcaacggatctggcagagcagattttacaggaaaatcctgagctgatcgtagtgactgcggaagtcggatacggactggttcctgtggatgcgtttgaaagacagtacagagaagctgtgggaagaatctgtacaaatcttgcagcctgtgcagatcgggtagatcgggtacagtgcgggatcgggaccaggatcaagtgagaaggagaacagaaagatgaagacagagttggaaaatgtattgccgcaggatattgaaaaaagaagttttgagatcattacagaagagctgggagaggtcagtctgattccgggaacagaaccgatcgtaaagcgctgtattcatacaagcgcagattttgagtatgcaaagagtctgaaattttcagaagacgcagttcaaagggcaatggatgcaatccgtgacggagcgtggatcgtgaccgatacgcagatgggaaaatcagggatcaacaagaaaaaactggcacagtacggaggcgaagtgtgctgttttatgtctgacgaagagactgcaaacatggcaaaagaacagggaacaacgcgcgcggttgccagcatggagcgtgcggccaagctggataaaaaactgatctttgccattggcaatgcgccgactgcgctgatccggttgtatgagatgattcaggaaggaagattaaaacccgagctgatcattggagtgccggtggggtttgtcaatgtggtacagtcaaaagaactgatcctgtcactgaacgacacaccgtatatcgtggcaagaggacgaaaaggcggaagcaatatcgcagcatgtatctgcaatgcgttgttgtatatgatggatgaaaagaagtgacgagggagagaagagcatgggcggatattattttccgatgtttgtggatatttcgacaaagaggattcttgtgatcggcggggggaaaattgcggcaagaagggtgcgtacgctgttaaaatttgcagagcacattgaggtgacagcgcctgagatctgtgatgaaatgaaggacattctgaaagaagaggaaaaaaaggaagtgccccaggcagtgtggagttctcgaaaagttttggaagaagatctgaaagatacatctgattttttgaatggggcagacattgtgctgactgcgaccgatgaccgagagctgaatcaaaaaatcgtaagtgcgtgcagaatgcgtaagattttggtaaatactgcagatgacaaatccctgtgtgatttttattttcctgcggtgactgaaaaagatggtgttgtgatcgggatgaattccggtgggaaaagcccgaagacggtgcgtaaggtccgggaatatctggagaaatatcgctgaaatcttacgggattatgttgttggcatttacaatttagaaacgattgagctttttctgttttatcagtataatgaaaataataaaacttgttggaatctatgaaatgaggtgatcatgtgacagtcgaacaaatgaggcgaaaaagacagcagtttggctatagttgtgagcagctatcggagctatcaggagtctctttggaaacggtgcaaaagattttccatgacaatgaggaagtattcagccaggatatactgaaacaaatagaatctgtatttgagaataaaagagactctgataggggcttttcttatgtgtgcgaatcgaagatggaatatggaatatcaaaaaaaagtcgagagtgtactcttgaggattactatcaacttccggatgaaagacgagcagagttgattgatggtgtgatctatgatatgtctgcgcctacaattattcatcagaagatcagcttggaaatcagtgtacggtttcatgctttcatcagccaaaagaagggagcatgcatggttttttctgcaccggtagatgtacagcttgattgtgatgaaaagacaatggtacagccggacgttttggtggtatgtgaccgtgagaaaatagttccgacacatgtgtatggagctccggatctgattatggaaatcttgtcccctgctacaagaaaaattgatatgaatatcaaacatagcaaatatgcggcagcgggagtcagggaatactggcttatcgacccggataagaaaaaaattgtagtgtatgatctggaaaatgaagaacttccggttgtctatggatttgaaaatcgtgtacctgtgggaatattccagggggaatgtgagattgatttttccgaaatatatgagtctgtaaagtttttgtatcaggagtgattgactcctgattacagtaatttttctaaaatataccgctgaggggtcatacccagtgaccggtataattcctgtgcagattcattgaattcccataccatcagatcgattcttttggctccgagttcttttgctcttcgttccatttcatgaaaaagagtcgttgcgattttctgaccacggtaagaagggtgtacaaacatatcatctacatatgcgatgagtgttccggtcaccatattgcttttggtccggaacgcggcaatgataaaaccggcgataaaatggtcgtctgtcattgcaagagctatgtgattgccgtcggttgttatttcacggaagtcggcttctgaataaatgtgacttgcaggaataaataaatcagggcggccctgaacatgaaggtcgtgaagctcctgcatataagaatcgatcacaggataatcctctgggatcagtaggcgaatgttcataagttgtctccttttctgaaaaatcaaatcatgttatttgtgggtcaggtttccacggaattgcttacatagaaactgaaatctattgaactggctctccgattttcatctgataaccacaaaatcattcatatcatcattatagttcattcaaataccgaatggaagaaaattatttggccatagtgatgtactggcaacagaaaaatataaaaaaacagtagccgttccactgcatttagtgataaaatattaacaaaagaattacagcaaatgatgacaggaggaattgacaatggcaaaggtattgatcagcccgggaaaatatgtgcagggcgcaggagagatgaaaaaactgggagaatatgctcagaattatggaaagaaggctctgatcctgatcagcaaggggggatacaagcgaatcggagcaatggtggagaaaagttttgaaggaaaagaatgtggatatgtttttgattacttcaatggtgaatgcagtaaaaaagaaatcaaacgtcttggagaaatcgtgaaagaagaagcgtgtgatgttgtgatcggtatcggcggaggtaagatttttgatactgcaaaggcagtggcatattatgaaaagacgccggttctgatctgtccgacgatcgcatctacagatgcaccgtgcagcgcactttctgtaatttatacagaagaaggtgtgtttgaggagtatttgttcctgccgtccaatccggatatggtcatgatggatacagagattattgcagaatcaccggttcgccttaccgttgccggaatgggagatgctcttgcaacttattttgaagcaagagcatgtcagagatcagatgccgcatcctgtgcaggcggaaagattaccggggcagctatggctcttgcaaaattgtgttttgatacgctgatggaggaaggcgtgaaggcgaagcttgcactggaagcagatgcctgtacagaagcagtggaaaaagtgatcgaggcaaatacactgctgtccggaattggctttgaaagtggtggtcttgcaggagcacatgcgattcacaatggtctgacagtactcgaagaatgtcatcatatgtaccatggagagaaagtggcatttggaacgatcacgcagctggtgcttgagaacattccgtcagaagagctgcagcaggtgatcgacttctgcatcgaatgtggacttccggttacactggaacagctgggagcaggtaagattacggaagaacagttgatgaaagtggcagaggcagcctgtgccgagacagatactctgcacaatatgccgtttgaagtgacaccgaagaaagtggcagatgcgatcaaggcggcagatgcatacggacattattttctcggagagtaagcttgtatctagtacaacatagcagaaacttagtattcgttgtactggtcagaaaaaatgacggcggatgcagtccatggcgaaagtcaggatggcattcgcctttttctgtgctataataaaagttcagaaatacaacaggagaatagtgactgttcatacagtaacggagaatggcaatttatgaatcaggtaatacagacagttctggcagcattttcaaaccagaatattgagataaatacagccagaaaactggcaaatctaaaaaaattagatccgcttcatctctgggtggagaaagaagatattgtgataaaaacagagtgtgggaagattcctttgagattatatttcccatcagaagagacaaaaaggcagaaagaagagatttcctccgcgattttttttatccatggaggaggatggtctacagagagtgtagaaacatatgacagaatctgcagtatgctatcaaaatctgttgacaagaccatcatatctgtagaatatcgcctggcaccggagtatccgtttccggcagggcttgaggattgttatctggctgcaagggcactgtatcaggggaaaatctttccaaagattgagccgggacagatttctgttatgggagacagctccggaggaaatctggcggcggcgttgtgtctgctggcaagagaccgcggggaattttcaattcataagcaaattttggtctacccggcagtaaacaactgctacacactggattctgcatatgattcgattcgggagaacggagaaggatatctgcttaccagaggaaagatgcatgactatctgcagctttatatcgggaagcaggaggatttaaaaagtccgtatgtggcgcctgttcttgcagaagatttgacaaatatgccggaaacgctggtgctgagtgcagagtttgatccgcttagagatgagggcgaggattatgccaaaagactgaaagaagccggaaataaggtgacatgctatcgaatcgcaggggcatttcacgggtattttgcacttggagtttcaagacttcatgtggaagagagttttgcgtatattgaccattttttacgggaggggtaacgatgcagaaaaagaaacgttcacagtggagaaagctggataatgcagcacaggcatttccggcagcaaccgggaagaaagataccagagtattccggctgtattgtgaactgaaagaggatgtcatagaggaagttctgcaaaaagcagtggaatgtacgctggaaaagtatccgctgtattgttcggttctcaggaaagggctgttctggttctatatggagcagcggaatttaaaaccaaaagtcaaggcagaagatcggccgccctgcagcggactgtatgtgcctgatcagaaaagctttctgtttgaggtttcttattataaaaagaaaataaatctggaagtgtttcattgtctgactgatgggacgggagcgctgaattttttaaaagaactggtgcggaattacctgatgatttgctatccacaggtggagtttccgcctgtttcagaagaagagatttccacagccagtgatcacgaagaagacagcttttcgcagtattattcaaaatcagattatggcagtgtcaaaaagagcagacctgcattccagctgaagggggaaaggctggagcaggaggagatgtctgttttagaggtggttctttccgcgaaagaagtatacagaaaggcaaaatcatacggggtgtcagtcacggtatttctctctgccgcactgctttgtgcgattcacgaggagatgccgagaagtcagatgaaaaagccggtcactctgatggtgccggtgaatctgagaaattattttccctcctattccatgacgaacttttttggttggattgaagctggtcaggtgtttgaagaaaatacgagatttgaggaagttttgcagaatctgcagcatgtctttcgaacagaacttgtaaaagagcggattgcagacaatatgaaccggcttgtccgtctggaaaaaaatcctctgcttcgggccgtgcctctggagattaaaaacctgtttttgctggctggaacgacgcttggcgggagaagtatttccgcgatttattccaatatcggaaaaatccagcttccggatgtgtttgagacctatgtggattcgtttggattttttacaagtacggacaaactgcagatgtgctcctgctcttacggggataaaatgagagtagggatcacctcgaaaatactgagtcataatatccagcggaattttctgcggatcttaaaagaggaagggattcacgttacagaacaagagaatgacttccccggatatcaggaaaagaagctgggactgatgcagaagagtatgcagatttttacgtttttgtgtattgctgcggttgtgatcagctgggtggtcaatctgatgcttccttccggatttttgtgggcaggctttgtgagcgggggagtactttgtacctggctgtttgtaatggtaggctataaaaagcgcaggaaccttctgaaaaatggaatgtggcagcttctgctcatatcggcagcggggcttttgtgggacgtttttaccggatggcatggatgggcagtggattttgtactcccgcttgcatcgctggtcattcttgcagcaatgacagtggtcgcaagggtgtgcaggctggaggaaaacgaatatttgttttatcttgttcagatcggcgcctttggatgtattccgggaattcttctggcagcaggggcagtccggatccggtatccgtctttactttgtacaggaatcagcattctgttgctggccggaatcgtagtttttcgtggaaaatcgttcgttcgggagattaagaaaaaattccgggtttgaaaatgtaaaaaatgtaataaaaagtagaaggaaactattgaaaattgtttaaaataaacatataattataaaagaaaaataaatttattaaaattctctaaagagaaggagggggatttctatgattagtttctttctatgtctgcttctgttgatcggaggctattttgtctacgggaagatcgtagaaaacacatttgcaccggatgacagggagacgcctgctgtcaaaatcaatgacggtgtggattacgtggtaatgccgcagtggaagctctttttagtgcagcttttaaacattgcaggcctgggaccgatttttggtgccatgcagggagccctgtggggaccgatcgtatttttatggatcacatttggtacgatttttgcaggcggtgtccatgattacttttcaggtatgctttctgaaagaaataatggtacatcaatttcagaggtttgtggtatttaccttggaaatgcaatgaaaaatgtgatgcgtgtattcagtgtggttctgctggttatggtaggaactgtgtttgcagtcggacctgcaggtctgatcgtgacattgttcaaggagggcggaatcggcggaattcttgccagtacagaattctggctctggatcattctggcatactattttatcgcaacatttatttctattgataagatcatcggacggatttacccggtattcggaatctgcctgatcatcatggcggtaggagttatcattggaatctttacacattccgagtttgtgatcccggaaatctggaataacttctccagtatgcatccggacggtgcgccgatctggagcgttatgtttatcacagttgcctgcggagcgatttccggattccattctacacagtcaccgctgatggcacgttgtatgaaatcagagcgtcagggacattttgtattttatggagctatggtggcggaaggtgtgatcgcactgatctgggctgctgcaggatgcgcattgtatgaagtgacaggcggtctgagtacaggattaagcgcgattctcgcaaatggccagtcagcagcgatttatgatgtctgctcaaagacaatgggaggaatcggagttgcactggcgatgatcggtgttatcgtatgcccgatcacatccggagatacggcatttagaagtgcaagactggtattggcggactggtttaagatcgagcagtccaaatacagcaaacgtttgttgctttgtgttccgttgttaggtgcaggtgccattatcggacatctggattatacgatcgtctggagatatttcagctggaccaaccagacactggcaatgatcgttctctggacagcaagtatgtatctgttccgtgagaagaagaattactggctgacagcagttccggctacctttatgagtgcagtctccatgacatatttcttctatgcgaaagaatgtctgggactgggaacagctgttgcgtatccggcaggtatcattctggcagcaggattccttgccattttcctgtatgcaacgagaaaacctgcgaaagcagcaaaataaagtgttttcataaaacacaaacagaaaggactgacacgagatgatatggaaaccaaagcagctgggcagacagaaaatagaagagcgggagctggaagcggataaaaagaactgcaggagattcggcccctgtggagtggatcaaaaggctctttatctgagcagcttttactttgacagaagatattatgtagctctggactcggtatcaagagtatttaaaagagtagccatgagtaaaggtggtttttcgggaaaaggaatgtttgccacgattccatatctggtcgtgcagtatgacggcggagaggaaaagcagtgtattttcaaaagagaagagcaggtagatgcactgcttgaccatatccgaagtatccgtcccgagatgccggtgcacagcgtgcaggcagaaaaaaaactgctggagaaacagcggatacttgaacagaaaaaagcaaggattgctttttcggatgcgcgggaagaaatccaatggttagaaaaatgtgcgcagtttttggaaaaaagacctgagttatatcgggaactgagcagctgtgcgaagagaaaaagaacctatgataagagcaatcctgcttataaatgggcagcgcttttcattaccctgatggggattgcggcactggtttacgggatttatgcgctggtcacaaaagcgggattcggaatttattttctgctgttcggactggccgccatctttttcttctccagtgcgaatgttcttcctactgcccgcaataacaggcggtatgtggaagacaggctgaagaaggcgatagaagcgatgtatcgctacattgcagaatatccgaagtttcctcttccggcgtgttatgcacatccggcagtacttcgaagaatgattgatattattgcagaagaacggacacggtctgtggcagaagctctggaattgctgaagcaggatttgaaagcaatgaattccagtgtggagcttgagcaggaagaatacgatgaggtcatggcgatcaagccgatgtttcttgtgaaagactatgaataatatgaaaagaaaatagccggggaaggaatcagaaatggttctttccccggctgttttattttgatgattgaaaacaatgtaaaattattataatgcggaaagaaaaaaattgctataaaattttacttgaaatataccccataagggtatataatgcgtgtatgaaatgaggtgaaagaaatggaagaaaaaagagagtgctgtcatacaacaaagacaaaagaacgcacagaaaaagaatataaagatttgatccatcgtctgaacaggattgaaggtcaggtgcggggaatcaaaaaaatggtagaaagtgatacgtattgtacggacattctgatccaggtctcagcagttaatgcggcgttgaacagctttagtaaagtgctgcttggcaatcatatccggacctgtgtggcagaggatatccgtcagggaaaagaagagacagtggaagagttagtagcaacgcttcaaaaactgatgaagtaaagtgaggtgatattgtgaagcaatacaatgtgaacggaatgagctgtgcggcatgcagtacaagagtggaaaaggcagtttccaaagttgagggagtgacttcgtgttcagtcagtcttctgacgaattccatgggcgtggagggagatgcgaaagaagcagacattcttgcagcagtggaaaaagcgggatattcagcttctgtaaagggagagaataccgcaaagccggcagaacatgcagaagaggaatttctgaaagataaagagactccggtcttaaaaaagcggctgatcttatcgttttgtttccttgtgccgctgatgtatctttcgatgggacatatgatgtggaactggccgcttcccgggattctggcagagaatcatgtggcaatgggaattttacagctcttgctgacaggatgtgtgatgatcatcaatcagaagttttttgtcagtggatttcaaagtctgctgcacggcgcgcctaatatggatacgctggtagcacttggagcaggcgcttcatttggctacagcacctatgcattgtttgccatgacagatgcacagatgcgtcaggatatggcaggcgtgatgacttatatgcatgagttttatttcgaatctgcagcgatgattctgacattgatcactgtcggtaagatgctggaggcacgttccaaaggaaagactacagatgccttaaaaggcctgatgcgcctggcgccaaagacggcggttgtgatccggaacgggcaggaacagacagtttccatcgagcaggtgagaaaaggggatgtgtttgtggttcgcccgggtgagcatatacccgtggatggtattgtgctggaaggaagcagtgcgattgatgaatcggcgcttacaggagaaagtattccggtagacaaaaaagcaggagacattgtttctgctgcgacactcaatcagtcggggtatatccgttgtgaggcatcccgtgtgggagaggacacgacactgtcccagattatccagatggtcagtgatgcagcagcaaccaaggcgccgattgcaaaagttgcagacaaagtatccggagtctttgttccgattgtaatcgtgattgcggtcattaccattgccgtatggatgctggcaggagagagtgtgggatttgcgcttgcaagaggaattgctgttctggtgattagctgtccatgtgcgcttggtcttgccactccggtagcgatcatggtcggaagcggaaaaggtgcaaaaaacggtgttatgtttaaaacagcggtttctctggaagagaccggaaaagttcagatcgtggcgctggataagacaggaacgattaccagcggggaaccgaaagtgacagatgttattccggatagtaaaattgcaagagaagaactgctggagattgcgtatgctctggaaaagaaaagtgagcatccgctggcaaaagcaattttatcctatgcaaaggagcagaaagtgccagatggcatcgaagtgagtgaatttcaggcagtgccgggaaatggactttccgggctgaatgatggagagaatctgaccggaggaaatttgaactttatccgccagcatgctgaagtatcagaaaatgtggaggcagaggcgagaaaactggcagatcagggaaagaccccgttattctttgccagaaacggaagatttctggggatgatcgcagttgcagatgtgatcaaagaagacagtccccaggcagtgcaggaactgcagaatatgggaatccgggtggtcatgcttacaggtgacaatgaacagacagcccgtgccatcggagcgcaggctggagtggacgaagttatcgcaggggtactgccggaaggaaaagaagaagtgatccgcagactgaagaatcagggaaaagtagccatggtcggagacggtatcaatgatgctcctgcactgacaagagcagatatgggaattgcgatcggagcaggaacagatattgcgatagatgctgcagatgtggtattgatgaagagcagacttacggatgttccggcagcgattcgactgagtcgtgcgacacttcgcaacattcatgagaatttattctgggcatttatttataatgtcatcggaatcccgctggcagccggaatctggtatccattgtttggatggaaattaaatcctatgttcggagcggcggcaatgagtttgtccagcgtttgtgttgttaccaatgcacttcgtctcaactggttccgtatgaaggacgccacaagagatcgaaaaataaaaacaagaaagaaacaggaggaaatgacaatggaaaaaacaatgaaaattgaaggaatgatgtgtggacactgcgaggcgtctgtaaagaaagcactggaggcacttgcagaggtggaagcggcagaagtaagccatgagaaaggcacagcggttgtgacactgcgctcggaggtttctgatgaagtactgaaaaaggcagtggaagagaaagattataccgttgtggaaatccggtaggatttatttgtcagtataaaagaattaaagagaaaacagtcgggtaaaatccggctgttttttttaatgaatcacaaacatctggcagtaaacagaaaaatataatactatataaggtatgtaaaaagattttgacaaagatattttgtggatgtacaggatatttgatagacaaatcaggagaaacctgcgatagtgcagaggaaaggacggatgttatggaaataggtgtaaaattaaaagaagcaaggatcaagagtggattgacacaggagaatgttgcagaaaaaattcaggtctcccgccagacaatttcaaactgggaaaatgaaaaatcttttccggatattgtgaatgtgatcaaattgagtgacctgtataacatcagccttgatcaattattgaaaggagatgaagcaatgatagaacatttggaaaaaagtacaaacattgtaaaaagtaatgagaaattgattgctgcgattattgccaatgtattgttgatgatcttgtttatattatttaatggtttgatcattgagaatcattatctgatcatgggcagctcgattcttggcattacagcaacttgtatgctattttatcagattataaagaaactttaggaggaatggaaaatgcttatttttgcaattatatttgtatttatggttttgcttggcggactgacattatcctatcagatatttaaactggtagctcttgatgcagagagcagagggttgaagcatccgaaattatggggaatgttttcactttccggaaatcagggtggaggcggactgattttatatttgattggcagaaatcgatatgtgtccaatatgacagatgctgccagagtggaatttgattcccgcaagaggcgggctgcgctatctttgagttttattgcaatcggaacgattggagtgatgtttatagccttatttggaaatgttttttaagaattacagagggtgtcgcaaagagattttgcggcatccttttttacaaatttttgaactgattctttacaaataaaaagatgtgtgttatattgaaaacaacaaaaggtaatacctattacataatactttataaggagaagagaagatgtatcagagtcacgaattttatttgagaagagcgattgaaatttcaaaagaggcaagagaagcaggaaatactccgtttggagcccttctggtcaacaaagagggagagatcatcatggagcagggaaatattgagattacagagaaaatctgtacagggcacgcggaagcgacacttgcagcaagagcatctcatgaatattccagagagtttttgtgggattgtacattatatacgactgcagagccatgtgcgatgtgtgcaggagctatttattgggcgaatatcggaagagttgtatacggaatgacagagagacgactgttggagctgacaggaagtaatgagcagaacccgacttttgatcttccatgcagagatgtatttgcaaaagggcagaaagcaattgaagtagtaggaccggtagaggccgttgaagtagaagcagcaaaggtgcatgagggatattgggattaagttccagtcaggagcagagtatgaaagcggaatattttgatgaaaaagtaggatggacaaagacgctgctgatcggatttcagcatgtccttaccatgtgtccgggaacaatcgcggttcccttgattttagcaggagccctgggattgggggaaaaagaaactgcatttttagtagcagccaatttttttacaagtggaattgccattctgattcaggtaatcggaatcggaaaactggcaggatccaaatatcccattattttgggttcttcctttgcacctctaagccctatgatcctgatcggaaaagaatacgggatgcagacactctttggcgcagtgatcgcatccggtgcgataatttttatcctgtctttttttatggatcagattttaaaacttttccctcaggttgtagtgggaacatttgtaacgttgatcggaattacactggcgccgactgcactgcgggatctggcaggcggagaaggcagcgaaagttttgggtctgttgaaaatctgattctgggtactgcagttttgatctttatcattctggtagaaaagtatgcaaaaggaatctggaaaagtatgtccctgctgctcggaatcgtggcgggaacgatcgtgggatgtggtctgcacatggtcgattttacatcaatcgcgcaggcagaagtattccagccggtgaaaccattttattatggaatgccggagtttaaaatatggccgatttttattatgagtattttctgcatcatcaacatgattcagtgtatcggagtcttttccgtaatggatgaaattgttggaatccagacagacaataagacaaaggagagaggaatcagaggtcaggcagcagcacagatggtgactggtatgttcaattcggttccatctaccatgttcaatgaaaatgtaagtctgatcggactgacaaaagttaaaagcagatccgttgttgcagcagccggcattatgatcattctggcaggaattttcccgaagatttccgcggtatttacggctgttcctaaatctgtgctgggaggtgcaacactggcattgttcggggtgatcacttcttctggaatttccattttatccaaactggatttttcaaaagataacaatttcaagattgtagggaccagcattgcgatcggagtaggcgcagcgtttgcatcagatgtttttgtgaatattccgaatgcattgcagatggtattaagcaatggtctgtttatggtcagcatcagcgcgatttttctgaatttgatcttgaatgggaaaaaagctttttcttgacaaagaaaagggattcttctatcatcatacataggttaagagaaagagaggaatcgctttgagtacgcagaaattacgtgtaaaatccttgtccggacaggcaaaggaggccattcttcaatatatagaagagatggatctaaaaacagacaataagcttccaagagaagaggcacttgccgagatgcttggagtgagccggatcacaatccgtcaggcattgaatgatcttgcggcagaggggattattttccgcagacagggaaggggtacatttgtcaatgtggattctctcaatatcaaggtcacgttcagtccctgtatggaattgacgcagatgatcaaaaagagcgggtatgctccttccgtcagacttttaaatattcaaaaagtaaaacgggaggaagaaatctgttctcttcttcagatgcagccggacgaacagctggtagtggcagaaaagctgtttctggcagatgataagatctgtgcattctgcagagattatttcggaatgaatctgatcggcggggaagaggcatttgatatgttttcaaagtatgaagattcgatttacaaatatatttatgaattgtccggggaaaaggcgcaatgggataaagttgagatcgatacagtgaatccggcagaaattgcaggattaaaaaaatatgtatctgtgaaagaactgggtttaagtccatatctttacctgaagacattaaattacagtgagaaagataaaccactggtctatgcgaatgaatattttaacacggaaatcatcaaatttaatctgatccgtcaaaagaatatacaatattgagaaagggcacttcgtcttggttggatgaagtgccctcgtctttcttataaaagatgttcaaatgcatcataaaatcccggataggaaacgtcaatacagtggctgtccagaattttcgtgcgtccgtcagctacaagagctgcgatactgaatgccatggcgatccggtgatcgagcagtgtgtggatggtagcgccttttaaaggctcccctcctttgatcaccattccatcttctgtcgggagaacgctgcatcccatggcgatcagattgtcagtgatcgtctcgatccggtccgtctctttgacacgaagttcctgcgcatcgcggatgatggtcgtaccttcagcgcaggctgccataacggcaatgatcggaatctcatcgatcagtgtgggaatgatatcaccgtgaatcgaaattccatgaagctggctgctgcgaaccagaatatcggccattttttccccggcttctgtacgttcatttaacagtgtgatattaccgcccatatcttcgcatactttcaaaagacctgcacgagtcgggttgattcctacatttttgaccagaatctcggaatccggaactaaaagtcctgctgcgataaagtaggcagcggaagaaatatctccgggaacagtgatcttctgtccatgtaattcctgacatggctggatcacggacgttgcctcagaaccagccagctgatgaacggtccggatatccgcaccgaattctttgagcatcaactctgtgtgattgcgggacaggataggttctgtcacggaagtttccccctctgcgtaaagtcctgcaagaagaatacaggattttacctgagcagaagcaaccggtgacgtgtagtggattccgtgcaatttccccggttcaatgaccagcggtgcgcatccattgccgtgcaggctggaaatatgagcgcccatctgtgtcagtggttcgatgatccgtttcatgggacgtgagttgagtgactcgtctccggaaagggaagtggaaaatggctgtcctgcaagaataccggagagcaggcgggtagttgttccgctgttttttacctgtaatgtttccgaaggcgcagtcagtccgtgcagtcccttgccgtgtaccagaatccggttttggtgttcctctattttaatccccattttccggaagcagtcaatggtggcaagacagtctgcaccatttaggaagttgtggatctctgtcattccgttggcgagagatgcgaacatcacactgcggtgagaaatggatttgtctcccggaatggaaacttctccttttaatcctgtaatgcttgtcaattccataatcatatattcctttctttaaacttcatatacaatataccggtatttctgcagaagtgcggcggcttttacagaggcgtcctcttcgtaaaattcgatgcgcagtaccccttcttcaaattcccggttatgaatgattccaatatttttaatgctgatgtgattgctcgccagaatcgtggcaatggtcgcgattcctccagcttcatcgataatgtcacagtacagggcaaaaatctttttgatcggtcctgcagagtgatccggcatggaattccggtagtctctggatgactcgaagaatgaaaataattcccgttcattgccggcatcaatggaaatttttgcgcggttcagttcttcgatataagcgtccaggatccgggagatattatctttatttttcaggcagatctgctgccacatgatcggagaagaagatgcaatccttgtaatatctttaaaaccgcccgcagccagaagcttcatcagttcctcttttgtatccgtactttttacgaagttgaccaggcaggaggcaatgatgtgcggcagatgactgatagttccggtgaccgtatcatgcagccggtagtcaagcacgatcggcagcgccttcagagactgtacaaagcagcggtaatcttccagcttctcagaagagactttgtcagacggcgtcaggatgtagtatgcattttcaatcagatgagccttggaattggcaaatccgcttttttcggaacctgccataggatgtcctccgatgaaatttgcatccagaccaagccgggtaatctcctcatggatcgcagtctttacactgccgacatctgtcaggatgcaatccggatggatcaaatcctttaactgagataaatacgcattattgtaagaaatcggcgcacagagaaaaagataggaacagtgagagaactgttcgtcaatggcagtacaggagatgtcgatcgttccgtcctgcatggccagtgcaagtgtttctctgcttttatcaaaagccaggatctgatagtccggataatactggcggattgccttggcgatagaaccgccgattagtcccagcccgataaatccgatggtagtgcttgtttttgtctgcatagtttgatgtcctttctaaataaactggctgatgggaagctgcgatcccaagaagcacatatagaatattttagcattttaactcgtaaaagtaaattagaaacaagttgttaaaaataaataaaatagttgtaatttatataaaattttagtacaatatacacatagcacgtgagtcggcagaacagctgccggaacatgaagagaataacaacataaggaggcagcactatgaaggtttacagaacggatgagattagaaacgtagtattgcttggccacggtggcagcggcaaaacaagtcttgcagaggcgatgctttatgtatcaggagcagtcagtcgtatgggaaagatttccgagtccaatacgaccagtgattttgataaagaagagcagaagcgcggattctcgatcagcacgagcctgatcccgatcgagtgggaaaaggcaaagatcaatattctggatacaccgggatattttgattttgtcggcgaagtagaagaagcagtgagtgcagcagatgcggcagttatcgtggtttccggaaaagccggtgtacaggttggtacagaaaaagcgtgggagctttgtgacaagtacaacctgccgcgtatggtctatgtgacagagatggatatggacgacgcaagtttccgccaggttgtggaagatctgactgtcagatatggtaagaaaatcgcgccgcatttccagccgatccgtgagaacgaaaagctggtcggatatatcaacattattaaaaatgccggcagacgttatacaggaatcggacagagagaagagtgcgagattccggattattgtcttcctaacctgaagattttgagagattctctgatggaggcagttgcggagacgagcgaagaatttatggatcgttactttgagggagacgaattttcaattgaagagatccgtgcagccatgcgtacggaagtgatggatggggacatcgttccggttgctatgggatccaatgtacaggcacagggtgttgccaatctgctttctgatatcgtgcgtttcttcccgagtccggataagagaagctgtgcgggtatccacaggacaaagagtgagatctacgaggctgattatgatttttcaaaggccaaatctgcctatgtattcaagacaatggtagatccgtttatcggaaagtattcatttgtaaaggtatgctccggtgtactcaaaggggatgacgtactttacaatgcagatgcggatgccgaggaaaaaccgggcaagctttatacgatgtgcggaaacaaaccgacagaagtttccgaactgtttgcaggagatatcggagcaatcgcaaagcttggaagtacaaagacaggagatactctttcgacaaagaatacgccgattacatattccagaacagattattcggttccatatacctatatgagatacaagactctgacaaaaggggatgaagacaaggtatctcaggcactgcagaagatgatggcagaggatgtgacactcagagcagtcaatgacagtgagaacagacagtctcttctttacggtatgggagatcagcatctggaaatcgcagccagcaaactggcagccagatataaagtagaaattaaactggagacaccgaaagtggcgttccgtgagacaatccgtaagaaatcggatgtggacacaaaatacaaaaaacagtccggcggacatggtcagtacggacatgtaaagatgcggtttgaaccatctggtgatctggagactccttatgtatttgaagaagaagtggtaggcggcgctgttccgaagaactacttcccggctgtagaaaaaggacttcaggactctgtggtaaaaggtcctctcgcaggatatccggtagtcggagtcaaagcagttctttacgatggatcttaccatccggtagattcttcggagatggcattcaagacagctacgatccaggcatttaagaaaggctttatggaagcgggaccggttcttctggagcctatcgcatccttgaaagtgacagtgccggacgactatacaggagatgttatgggtgatctgaataagagaagaggacgtgtccttggcatgacacctgtaagcggcggcaaacagatcatagaagcagacattccgatgacaggactgtttggatactgtacagtgcttcgctccatgacaggaggaagaggtacttatgagtatcagtttgcaagatatgagcaggcaccttcggatgtacaggagaaggaaatcgcagcaagagcagcggaagaaaaatagaatagaaaattagaaaaagaccttttctgcaaaaatcaatgattttgttgtaggaaaggtcttttttggcggagaaaacagaaaaaaattatgcaaaacgtggaaaaaatataaaaatggtattaaaattgtgtgtgtggtattaaggtggtataatagaacacgttttgaaaagaagaatgtgaaaacagagaggacttagggaaccaatgaaaattgtaatcataggcgacggcaaggttggttataaactggcaaaacaactgtcatcagaaaagtacgatattatattgatcgataataatgaagaaaaactgcgaaaatccattgaaagaatggatgttttttgtgttgtgggagaaggcggcagtgtggaggttcagcagagggcggatgtaccgcatgcagatctggtgattgcctgcacttctacggacgagtgcaatatgctcagctgtctgatcgcgagaaggctgggcgcacggcatacgattgcccgggtaagaaatccgatctactataaacagattgattttttgaaaaaggacctccatttgagtatggtagtaaatccggaactgatcgttgcgggggatattacccgtctgctgctgtttccggatgcaagtaaggtagagactttcgtaaaaggaagggtggaacttgttgaatttccgattcactgcggaaaactggaaggattgtctttgtctgaattatatgcacgttttcaggttcaggtgctggtatgtgcagtcgaatccggagaaacggttttaatcccggatggagattatattttaaaagcaggagacaagttgcatattgcggcttctcatcagaatatggagcagttcttcaagaagattgccctgcgaaaagagaagattaaaaatgcaatgatctgcggtggggggagagtggcctactatctggcaagccagttgtgtaatctggggatgaatgtcaagatcatcgaaagaaacagagagcgctgtgaagagctctgtgaacttcttccacaagcaaccatcatcaatggcgatgcgacggagcatgatctgctgatagaagaggggattgaaaaaacagatgcttttattgcactgacaggaatggatgaagagaacatcatcatgtctttgtttgcttctaagcagagtgtatccaaggtgatcgtaaagatcaatgaggaccgcagagccatgatgatcgatgaacttggactcgacagtattgtatctgctaaaacagcgactgctgatgccattcttggttatgtgcgggcgagaagaaattctcagtgcagtgcaaatgtggagaccatgtaccagctactggatggaagagtggaggcgctggaatttattatcaaatcggagaatgcgtatacgggagtacctcttaaagatctgaatctgaaagcgaacaatatcattgcctgcattgcacggggaagaaaaatcattattccaaacggggatgacagtattcaggtaggtgacagtgtagttattatcaccatgacaaaacagatccgggatctggacgatattttggtgaagaggtaatgagatgaataatagaatgattgtttatatgataggcagaatgctgggagtggaaggacttctgcttctggtgccggcgcttgtttcttttttgtatggagagcaaagcggaattgcatttttattgacagcggccattctgctcattatttttctgctggcgggcagaaaaaaaccgaaagatacgagtatttatggaaaagaagggcttgcactggtcgggattgcctggattttgtggtcactgttcggtgcactgccgttttttatctccggttcgattccagattatctggatgccttttttgagacagtctccggatttacaacaacaggttctacaattctgacggatatcgaggcgcttccgcagggaatgttgttttggagagcgctgacacactggatcggcggaatgggagttttggtatttgttatggtacttttgaatctggatgatgacggatccatgtatctgatgcgcgcggaagtaccgggaccggaagcagacaagcttgttccgaaggcacgcagtacggcgagaattctgtatctgatgtatctgattctgacaatggcagaggtgattttccttttatttggcggaatgaacctttatgacgcactgattcattcattcagtactgcgggaaccggtggattttccaacagaaatgcaagtgtgagctattatgacagtgcgtatattgacggggttatcaccgtatttatgattttgtttgggatcaattttaatatttattttgcaatttacataaaaaactggaagagtgcattaaaaaatgaagaagcacgcacctatcttggtgtgattgctgcggcaatattgatgatcacagtcaacatttatcatatatacggcaatgtggcaagtgcgttccggtattcaagttttcaggtggcagcggtgatcacgacaacgggattctacactgcggactttaatttatggccggaattttctaaaaccattttgctggtcaccatgatcatcggagcttgtgccggatcgacaggtggaggaatgaaggtgtcgagaattctgatcctctgcaagagcgtaaagcaggaaatcaagcggattctgcatcctaaagcagtgacggtggtgactgtgaacggtcagaaggtaggcagagagactcttcatggagtatatgtatacagtatttgttatgcgcttatcctggtatcttctgttttgatcgtgtccatcgataattatgattttgcgacttctgtcagtgcggttctgacgaccttaaataatgtcggtcccggaatttcacaggtgggaccggttgagaatttctttgagttctcctggctgtcaaaactggtattctgtgcggatatgctgctgggacggctggaaatcttcccttgtcttgtcctgcttgcaccggagctctggaaacggaaattttaagacaaaatgttggaaaaatcataggtaaatattaaaaagatataaaaattgcaagaagaattgtgaattatctttgaagatgttataattgtcccactactttaaaagtagaaattatttttaggaaagggaattagcatgaaaaaaggtaaaatgaaacttcttgcagtgttggcattggttattcttgccggtatttactattatgttgcattgccggcactcaatattcattctacggagttctggatatttctgatcgtggtgatcgtggcagcagcatttttctatgcgaaaagaaagcggttcgacagatatgcgctgaaagaatccaaggggatgaaagtgatcctggggattcttggcgcagttgtaatcgtgtatgcagcaggtacactgttgtcttctccgatcgtcaacgcgaaaaaatatcagaagctgatgaaagtagaggatggagaatttacaaaagatatcgaggaactctcatttgatcagattccgctgcttgacagagattctgcgacgatcctgggaaacagaaagatgggaagtatggtggatatggtctctcagtttgaggtagatgactggtacagccagatcaactaccaggatcagcccgtgagagtatctcccctgcgttatgccagcctgatcaaatggttcacgaatcagagtgagggaattccggcatatatcaagatcgatatggcgacacagaataccgaactggtgaagttggatgaagggatgaagtatacgaccagtgatcatttcaatcgcaatatttaccgtcatctccggttcaaatatccgacttatatcttcaatgacttaagttttgagatcgatgacaacggagttccatactggatcagcccggtgaagaaattcaatatcggtctgtttggaggtaccacagttggaagagtggttttatgtaatgccattacaggtgagacgaaagattataagatcgaagatgcaccggagtggatcgaccgggcgtactccgcagatatgctgatacagctgtatgattattatggtacgttgaagcatggatttttaaacagtgtgctgggacagaaggattgtctgcatacgacgacaggatacaactatcttgcgctggatgatgatgtatgggtatatacaggtgtgacttcgatcacaggagaccagtccaatgtaggatttgttctgatgaatcagcgtacgatggagacgaagttctatgaagtggaaggcgcgacagaagagtctgccatgtcttcagcagaaggtcaggtgcagaacttaaaatacaaagcggcattcccgttgcttttgaatatttcaggggagccgacctattttatggcgctgaaagatgatgccggactggtgaaaaagtatgccatggtcaatgtgcagaaatatcaggttgtagccattggaaatacggtcagtgagtgtgaagaaaactacaatgatctgatgtatgagagtggcatcaagaagcaggcggaagatacgagagaagtaaagacgctggcttccaagatcacaaagatcgcacagggcgttgtagacggagattctcacttttatatcatgttggaaggctctgatgatatttttgatgtttcagtcgttgattttatcgatattatcaaatacaatgtcggtgatactgtgacggtagaatacaaagaaggtgagcgggcaaattctgtactttctttgaacggagaagagccggatcaaaaagcaaaagagacaaaaaaatcagaagcggaaagcgaagagcaggcattatcagaagaataataaaaacagatataccataatgtataaaaaagcggtactcagtaaaaaatactgaatatcgcttttttcatacccattagttcaaaacgttataattgtcggaatctatatcgggaatggattctttctcagcccccacactgataaagaaatcaagagtattttctgcagaaattttactcagactggtcataaatgcagaaatgttgtttaaagaaatatccgcctgttttaatacgctgtcaataaagatggtatcaatatcatgattacctgctaccataccgtagagaaaaccgataaattcatccattgtcagaatatcaggatagtcttccatgcagattgcacgtacaccgaagtctaaagtagtagtgttgcgatgactttttttgataaatacgacgtttccgttagatgttttgaccttttcattagcaagctcaatcatctgctgtgtttttccggttcctttcggtcctgtaattaaatttaccatggcaaatctctcctttttgtatgtattttgagacttctttctgctcaaataacttaaatttattatacactaaacaaggttcttaaacaataaaaaaataataaaaatgcagataaatattcagaaaaatataatgagaaaacttctcaataacaaatgttgaaattgagagtaggacatggtaatatcaaactaattgagaatcataatcatttaaggaggctcatatgtcatcggaaacattgtcttattttttcaaaaatgaagatataaaactaaaagccaggtttcaggttgcgctgcagtgcgccccctttttaaaggggatcaagatatccagcgtgatcacaatggaacagaaaatgtgtgaggagctgcaggagatttttgaagagacagaggtagaatatcgaattctgtcctgcagggacagcagatgtcttgttttctttttcagacggagtgagttggagtatcatctgatgctgcctgacaatcagcggctgcttgaggcatatgggtatcatatgcggaatctggatgagatgctcaaaagactggctcaaagagtgaggcagataagcagcagaaaactgggatttccccatgaaatcggagtgtttttagggtatccgaaggaagatgtggaaggatttattcacaatgaaggaagaaagtatcttatgatcggatattggaaagtatatagtaatccgtccagggcaaaaatgattttcaagtcttatgatcaggccaaagaaggagtggtcagagaatttttagccggaaaaagtatccgggaaatcgcacaataatgaaggaggaattcacatgaatgcagcagtagtatattggagtggaacaggaaatacagaggcaatggcacaggcggtcgcagaagggattcaggcagcaggaggaaccgcggaggtatgtgaggttggacagacagatgcggatacgatttcaaaatttgataaaattgcgctcggctgcccgtctatgggagcagagcagttggaagacagcgaaatggagccgttcgtggaagaactggagccgatgatctccggtaagcagctacttttgtttgggtcttacggctggggtgacggagagtggatgcgtgactggtgccagagaatggaagaggcgggagcacatctgatctgtgaagaaggtgtgatcgcaaacgagacgccggatgatgctgcgttggaggaatgccgggcagccggaaaggaactgatcacggcattggtataaggattctttttccatgtgcatttaaacggaaccaaagtcttctcctgagcataggataacatatcgaaaaaaagaattacgaaagggagaaacatatgaatttggatgtaatacttggaattttactgccgtttgcaggaacaactcttggcgcagcaatggtattcttcatgagaaaagagatgaatgaaaagctgcagaaaggtctgcttggatttgcttcgggtgtcatgatcgcagcatctgtctggtcgcttttaatcccggccatcgagatggcagaggaaggcggacagattgcatggattcctgcagcggcagggtttctgcttgggattggctttctgcttttgctggacacggtgacacctcaccagcactttcaggaatcggagccggaagggattcaggcatcacttcgaaaaacaacaatgttgatgctcgcagtgacgctgcacaatattccggaaggaatggcagtgggtgtgacctttgccggagttctttcggacaatgtactgataacaatgacaggggcatttgtattgtctgccggaatcgccattcagaattttccggagggagcgattatttccatgccgttaagggcgcagggaattacaaaactgagggcgtttgtgtatggaacactgtcagggattgtagagccgatcgccgcatttctgacaatctggctgacggggcttgtagttccgcttctgccatattttctctcttttgcggcaggcgctatgatttatgttgtagtggaagagttgattccggaggcacaaaacggaaaacataccaatgtaggaacaatcggtgttgcagcagggttcacactgatgatgattctggatgtggcgctgggatagaaaaaagcagagggagcgatgtctgtattccctctgcattttacttataaacattgattagtttttctaaaatggaaaatcagaaaatggcttgcattcttttcaaaaccatgctattctttactttagtgttgtaaaacactaaactcaggagagtctctgaaaaaagagcgccgaaggtgtaatcagcagacgcatgatctggatgcggttttgctgagaatctctcaggcaaaaggatggaggaaagaaagtatgttagcacaaatctacaatcaaatcgacacagcgatcaaatgggtggatgaccggatatggggactgccgctcattattctgatcctgacaacaggtatctatttaaccgttcgccttggcggacttcagattcggcatctgccgaaagcactcagattcatggtaaaaaatgaagaagaaggacatggggaagtgaccagctttggagcactttgtacggcgctttctgcaacgatcggaaccggaaatattaccggagtagcgactgcgattgcggcaggcggaccgggcgcactgttctggatggtggtggcagcatttttcggaatggcaacgaagtatgcagaagggcttcttgcaatcaaataccggacaatcgacaaagaagggcatgttcttggcggaccgttctattatattgaaaacggaatgggaaaaaactggcgctggctggcaaaaatatttgcatttttcggagccggagtcgggttgtttggaatcggtacgtttacccaggtaaacagtattgcatctgcagtgaagaatttctttgatccgaatacagagaatgccgtgcagatgtttggaaatacatattcatgggcaactgtgattacttgtattattctgacagtctgtgtcggtctggtcgtgatcggaggactgaaacgaattgcaaaagtatccgaaattgtagttccgtttatggcggtattgtacgtggtgtttgttctgatcattatgatcacacatattacagaaatcccggcagcgatcgtaacgattgtgaaatctgcatttaccggaagtgcactggcaggcggcgcgatgggaaccatggtcgtggccatgcagaaaggaatcgcaaggggaatcttttccaatgaggcgggtcttggtagtgcgccgatcgcggcagcggctgcagtaacaaaagaacctgtgcgtcagggactggtgtctatgacaggtacatttattgatacaatcataatttgcacaatgaccggaatttccgtggtcttagcaggaacatggaatgatccgaatctggaaggtgtggagatcacgatggcagcatttcagaaggggctgccgtttgcgccggcagttgcatcctttattctgatgctttgtctggtattctttgcatttactacgattctcggctggaattactatggagaacggtgtatggaatatctgttcaaccggaataaaaaagtagtgatgacttatcgctggctgtatattctggctgtatttatcggaccatatatgacggttgcggcagtgtggaacatcgcagatatcttcaatgcgctgatggcgcttccgaacctgatcgcactgcttgtgctcagcaatgtggtggtcaaagaaacgaaagattattttgcgaggatgaaatagagagaaatcagcagaatccacttgacttattttatgattcttcttataataaggaaacatatgaaagaaatgttgatgaggaatagtaagagtctgaggtttttcagagacctgccggatggtgcgaggcaggaaacagcgttctcccaactcccctcggagttctttttctgaacacccaggatggaaaagtaggaaaaagcgggccttcccgttacagaagtaatgagtgcatctgtatgtttgcagatgaagaagagtggtaccacggaagataaaagccttttcgtctcttaattgagatgaaaaggcttttttagaaatcaaaggaggatatgcgaaatgggtgcaaaaattgtttacaaccacaaagcaatcgagaaaaaatggcatgataaatggcaggaaaatccggtaaatccaagattcagggacaacggagagaaaaaagaaaaatattattgtctggatatgttcccgtatccgtcaggaaacggtctgcatgtcgggcactggagaggatatgtgatctctgatgtctggagccgttacaaattacagcagggatattatattgtacatccgatgggatgggatgcattcggtcttccggctgagaactatgcgatcaagatgggagttcatcctgcaaaatccacagcagagaacgtagcaaacatcaaacgtcagatcaatgagatcgcagcattgtatgactgggatatggaagttaacacaacagatccgaatttctacaaatggacacagtggatctttgtgaaaatgttcaaagaaggtcttgcatatgagaaagagttcccgatcaactggtgcccatcctgcaaaacaggtctggcaaacgaagaggttgtgaatggaaaatgtgagcgttgcggaacagatgttacaaagaaaaatctgcgtcagtggatgctgcgtatcacaaaatatgcagaccgtcttttgaacgatctcgacaaactggactggccggaaaaagtaaagaaaatgcaggctgactggatcggaaaatcttacggtgcagaagtagatttccaggtggatggaagagacgacaagatcaccgtttatacaacacgtccggataccttacacggtgcaacattcatggtacttgcgccggaacatgcacttgcaaaagaacttgcgacagacgagacaagagaagcggtggagcagtatatttatgatgcttccatgaagtccaacgtagaccgtatgcaggataaggaaaagacaggtgtgtttacgggaagttatgcgatcaatccgatcaacggtgcaaaagtaccgatttggctgtctgattatgtactggcagattatggtacaggagcaattatgtgtgtacctgcacatgatgaccgtgactttgcatttgcaaaaaaattcgagatcccgatcattcaggtcattgcaaaagacggacaggaaatcgaaaatatggaagaggcatacacagatgctgttggaactatgatcaattccggagagtggaacggaatggaatcagccgttctcaagaaagaagctccacatatcattgaagagcgtggaattggaaaagcaactgtaaactataagctgcgtgattgggtattctcccgtcagcgttattggggagagccgattccgattgtacactgtccggaatgtggagcagtgccggtaccggaagaagagctgccgctgcgtctgccggatgtagattcttatgaaccgacaggaactggagagtcaccgcttgccggaatcgaagagtgggtaaactgcaagtgtccggtttgtggaaaagacgcaaaacgtgagacaaataccatgcctcagtgggctggttcttcctggtacttcctgcgttatgtggacagtcacaatgacaaagaactggtttccagagaaaaagcggacgagatgcttccggtagatatgtatatcggtggtgtagagcatgcggtactgcatcttctgtactctcgtttctatacaaaattcctgcatgacatcggagttgtagactttgatgaaccattccacaagctgttcaaccagggaatgatcacaggaaagaacggaatcaagatgagtaagtccaaaggaaatgtcgtatctccggatgatctggtacgcgactacggatgtgactctttgagaatgtatgaattgttcgtgggaccgccggagttggatgcagagtgggatgaccgtggaatcgacggtgtcaaccgcttcctgaaacgtctgtggaatctgctgatggacagcaaagaaaatgaagtacaggcaacaaaagagatgatcaaacagcgtcacagaatggtagcagatatcaccatgcgtctggagagcttcagtctgaataccgttatctccggatttatggagtacaacaacaagtttatcgagatcgcaaagaaagaaggcggaatcgataaagaaacgctggagacgatcgcagtcctgctttctccatttgcacctcattttgcagaggagatatgggagcagctcggacatacagagacaatcttcaaagcaggctggccgacatacgatgaggcacagatgaaagacgatgagatcgaagttccggtacagattaacggaaagacaaaagccgtgatcagtatcgcagcagatatctccaaagaagaagcgattgcagcaggaaaagaagcgattgcagataaactgacaggaaatgtgattaaggaaatctatgttccgaagaagattattaatattgtaatgaaataatttgagagaaaatcccacaacagaataaagtgcttgggaatattgaaaagttcgcttaaaatcaaggcttgcagacatttttcttcaagggaaaggtatcatagaataccgtaaaatatcgtaacagatttttaaaatggagtaaaattggagtaaagattgaaagaaaatggagtaaatatttcaaagatgtaatgagaaatggcgta

SEQ ID NO: 6976 - DNA, 45004 bp, Unknown
  gut microbiota DNA sequence
gaaaatggcatattataatgtgctgatcaacactcatacgtaacaggactgttatattcttctgcagacaatgtaacgtttctatttgttttgaattgtatatttcccgttcctacaatttgctgtgcaacacaagggcgaaactaagattagccatagagggcgtaaacggcttagatattggctgtttcaggggggcaaagtcagcagtggcacatgctgatgaatttaaagaattacatgcgtattacacaacccgaaaagacaatccgctaaaaaagttgcagtcgttgatagtgattacctgtaagatactgagggtgatttttgcaatcctgacaaaagggatgacatatgatccgaagaaaatgttgagagatatagtaagaccaaacgaacagtcagtacaggtggcataagaacaagactgaatcatatattccagagccttgccggattgcagaaagtatctgaaatcgggcagggttctggataggaaacccggatggagtgtgaaatgcactgcatcaccaacaagaccaaccgatgaaacaaaagagagcgtccactgaaaatcagttttcttgaagaaagcagtaggtcggtaagaatcaaatacaaacaagagctgtagctgacggtagttcactccgtagggcatgaccctgttagaaagcttagttggcacccagtgtatgaacaggtgggacgaaggaagttggtacaagataccattagacacggaaggttcaacatcatagttgaacagagggattatagcctttataaagcaaacaaaaggatgttttattaagtgtacccattttcaactattcagtacaggatacaatgattgttctacactttaagcccttgttttgaggtaaacatttaaagaaaaaagcccaaaaatcaatgaattagggcttgaaattataggaaggagttgccgaggagtaacaatcttaaggatacctccgcaaaaagaggtgagacttaaggaaattaatccaaataattctagaatgtattgtgtgcatttttgaaattgttagatttctagaagaccacgatatgtaatagtctctccccgtaattatcatccaacgatagttacggggaatccttttttccgtacatacatgcagttgttatttacaaagagaaaatcttctatttctgttgactttatatagaaaatattctataatcagaataaccacaaacgatgtagaatttttcttatttattcagcaatgtcgtagaagtttttctaccttatagctgtattatatcgacttttttctacgttatcaatactttgtgtagatttttttctacatttttagaaagggacaattatgacgacgtatgatgtaatttcagaattatgcaaaaaacggaatctggctattacagcactagaaagagaattagggtttggccgtggttccataggaaaacttagaactggcaacacaacgttggaaagattacaaaaaatagctgactatttcggtgtgtcagtaaattatttaacaacaggaaaagaaccagaaactcaaatcgttaccgataaatcctctctcacaaaaagagattccaaacaaatagaagctattttaagtgatacagaagcacttctgaagcaagatggtttaatgtttgatggtgatccagcctctccagaagcaatagaatctattctttccgctatgaaaattggaatggaaatggcaaaacagaaaaacaaagaaaagtacacacctaaaaagtataaaaaggattgatacttatggacattaaagatttactggatccagtgatattgttgaaatcggaagaatcttaggaaaatatgttctttaagatataaccgctacagcgtttatatagagtaaagtggtgttaaggtacggggaaaaagaggaaaactatggaagaaacaaaaaagaaaagtaaaaatgctattataggtatcgttttcactattattgtcatcgccagtgtcagcgtttgtacttggtactttcaggtaaagaaaccgcatgacgaagctgtgaacggtttcaatactgccacagagactttggaagtaaagaatgcagaattagactccgtcatagctgatacacaatccctaatggatgaaacaaataagccttatgatgaaaataccatgtccgaactcaaagtctcaatagcagatgcagaaaatgctaaaagaacagttcctgagcttccgagtaaaacatcggacattatatccgctaccaaaatgttaaaagagcctattgattacagttcatttattgatgctataaaagaaaaacaatcagcactggaaaacagtatcttgcagatgcgacagatcacagcacctacagaaagttttgttattcaaagaatagcggatgtagaaggtatttccggtgtgcaggcagttactgaagaccatgaccccaacggtaatctgaacaaggctggtggatatactgcttgcatatatttttctagttcattaataaaccaggatgaagtttttggtaatgatattgtcgaaaaaggcaccgattgcggcggatgtattgaggtatatcctactattgaagaagcagagaaacgaaatacttatctttctgcatttgatggagcggggatgttagattctggttcccataacatactgggaagtattgtaataagaacatcaagaacactaaccgcaacacagcaaagcgaattaacacagaagatatctgaaaaattactagaattacaataacacctttgcttttatccaaaaatagaacaggcagctatcacgccctagtggtcttaaagagataccggagtaccactcggttggataattgataaactaaaattatgttttattattttcagaaggaggttttcctatgccattattaaaaacaactacacacacaattgatgatatctatgctcttccagatggacagagagcggaattgattgacggacaaatttataacatggcaccaccgtctccattacatcaggaattagtaatggaactctccgcctctctgaggaattatatcaaaaaaaaaggtggtaactgcaaagtctatcctgctccatttgctgtttttattaaggatgatgattccaattatgtggagcctgatatcaacattgtctgtgattctaacaaaatttcacaccgtggctgtgaaggagcaccagactttatcatcgaaatcgtttcaccgagcagccgtaaaatggattactctaccaaaaatacgctctatactgacgcaggtgttcgggagtattggattgtggatcctgccaaagaacgcacaacggtataccgatatgaggaagatgtcgcgccggtgatcattccttttcatgatacactcaaattgaaaatatatgaagattttgaaatttgtattgatgatttattaaaataaaaactgcaataaaataccgccccagtgctaccaacactgagacggtctacatatccgaagatatgccatatcttaccagtgaatattgtatcatcttcggagcagctacacaatccagaacattcgttcatgtgctggctgctatttttatacctaaatttaaaggagatgatgatatggccaaaagaaaaaagcatcctcgtttgcccaatggttacggtcagatacgcttccttggtaagaatcgccgcaatccttacggcgtttacccgccagctaaagaagaatacgaaaacgggcaaatgaagccacagaaagcaatatgctatgtttctggatgatcggctttgcagttcttacagcatacaaagccggcacctatactcccggcatggaaaatgatatccaggtggatgacaaaaagaatgcggaggattttatccagtctctgcttgcaaattacaatcaagtgcagggaattaaagcaaaggaagagcctcaattaacatttgcggaagtataccggaaattcaatgttaaaaagtttgggcatgaatacgatgcaaaaaaagtaaaacgcaccagcttggaatatacgctacgcgcaggattcaagaactctgctgccctacacaacagaattttcgcaaagcttgttacagacgatctgcaggaagtaatggacgcttgtccgctcagacacgccagcatagaacacatcaaaaatctatactaccacatgtacaagtatgctatggcaaacaatttatgtacaaaagattattcatcttatgtcgaaatcacacaggatgaaaacacatggagtgctcctgcctgacaaaatcgatatattccgggacaagatgtatactcaactgaccacacttggaattgaaaaacatactccccatgattgccggcacacattttcaaggctgtttgaaaaatataaagtcatggaaaatgatcgtaaaaggatgctcggtcataagataggtgatgtcacaaatgacacatatggtcaccggacattggaagacttaagaaacgagattgaaaaaatagaaatggatttgttgtaagtgtgttgtaaacggttcgattattctactcaaaaatcatttcttttagattgcattttatgcaccaaaaagcccgtggttgacccgttttttgaagtttttgtgtcaaccacaggaatctttgaaaatccttagaccttagatactgttaaaaacaaaaaaatatgatcaaaatcacctatttcgctttgttttatattatactgacactatatgccttcccggcagactgacgataacgaggtgatcctatgcaaaacatgaactattattatgacttttccggacagaaattcaatcatcccttaagtcttagcatcaacagctttgaccgcaaagtattttccagacagaccagcctggagctttcctatgttctaaagggcagttatgaggtgatcacagaacacatctcccactccctgacagagcaggaactggctgtgattgcaccggacgagatccatatactgaaaaaactgcagcctgaaagcgtgattctgaccattcacattgattttgagcggattccggaaaatatgctcggttcctgtaaaaatctgttccatacaattttgtgtactccggtaagcaatgccgctcttttacgctccctgaaagaagaaatccgtcggcttcttatggttcttttcaatggagattccgcagatggaactgatctgtttgccctcaatgagattatgatgaagatcctctgcattgcaaaaaagcagcgcaacacaccttttgaacagcttcctgtggactccactcaccacgagaactacgtgcgggcaatccagtttatcgaccgccattatcaagaggatattcaccttacagacattgcaaaaacgctttctttcagcaccagctatacctccagactgttcacccgctataccggactttcctttgtcaaatatctgtcctatgtgcgagtccgggaatctctggaggaccttctggaagggaaagcttcgattgaagagatttccggaaaatgcgggatgccaaactccaaggcctactctcagattttcaaggaactctacggcattacaccgagcacctatcggaagcgtttcgtaaaaaatctgcttcctcttccggagcaggaaacacgtccgatggaattcacacagaaacaaaaagaactgcttacaaaggtctttcatctggatgatacaaaccgtcttctctttcacgcagaggggattcaaatcgtgtcagatggcgatacactcctttgtacactttctgatgcccgtcaaaaagaactgcttctctctcagaaagaggacgatattgttctgacgatacggccttcctgcgcaggaacataactgtttcctttctgttttcaggcattttttgctatgttttttacaggaaaatctatttttgcaaaaaacacgacaaattttgccctgtattgtgttgggaaagagaggatatttctgtctcttcatattaaaataaatgtagaattgtacaggaggaaatcaaattatgaatacatatccaaaactcttctccccgatcaaaatcggagaaactactgtaaaaaaccgcgtatttatgccaccgatctctacaaatctggctgacaaaggatacgtaacagatgctttggtggagcactacgctgcccgcgcgaaaggcggtgtcggactgattgtaacagaagtaacaactgtagagcctacttatgtatatcttccgggagatatgtccatctgtgacgacagctatatcccgggatgggaaaagctgactgctgccgtccacaagtacggcgcaaagattttgccgcagctttttcatcctgcttacatggcattcccgattcctggtactccgcggctgatcgctccgtcttttgtaggtccttactatgccaaggaagcgccaagaccggtcactgttgaagaactgcaggtcattatccgccagttcggcgaggctgctctgcgtgtaaaaaaagcaggcgctgacggagtggaaattcacgccgctcatgcacatggactccttggcggattcctttccccgctctacaacaaacggacagatgcctatggtggagatatcaatggacgcttaaaactgactcttgaagtcattgccgaagtcagaaaaatatgtggaaaagatttcatcatcgatgtacgtatttccggagatgaatattcagacgggggtctgaatttaaatgatgccatctatgtttccaaacagctcgaaaaagccggtgtggatatgcttcatgtttccggcggaacaacgatcaaaagaggaagctccattcctgcacccggaacaaaaatgggatctcacagcgcgctctccgcagagatcaaaaaacatgtttcgatcccggtggcaactgtgggacgcatcacagaaccatggctggcagaagaacttctggaaaatgataaggcagatatctgcatgatcggccgcgcaaatctctgtgaacctgaattctgcaacaaggctcaggccggacacgaggaagatatccgtccatgtatcggctgtctgcgctgcttaaacggcattatgttcggaaaacgggttgcatgtactgtcaatccttctctggaaccggaaaatgaagacaccatcacccctgcaaaagagacaaaaaatgtccttgttatcggtggaggtcctgccggaatggaagctgcttacgttgctgcaaaacgcggacatcatgttgtacttgcagaccgtcaggattcccttggcggaaccgttcggatcgctgccgttccgattgcaaaacaggatctgacacagctgatcaaatatcaggcacacaaactggaacaggccggcgtaaaggttcttttaaatacggaggttacactggaaacaatccagaaggactatccagattatgaggtcatactctgtgcaggtgcgactccggttgttcctcagtttatgacacaatttaaagactggatgactgcggacgacgtcctctatggaaggaagttcccgggacgcaagattgtagtcatcggcggaggctctgtcggatgtgaaaccgcagattatctggctccggttctgaatgaccgtttccctagaaaccgggagattactctgattgaaatggcacatgagatcatggaagcagaaagtggtccgggaagaagtctgcttgtccagagaatgatggaaaaaggaatccagattctctgcgatgcaaaagtggaagaagtcaatcataccgtgatcaaatatacaaaagatggaaagactcacgagattacagatgccgatacactcgttcttgcaatgggataccgtccgtctaacactttagaggaacagctgacctctgcaggaattacctgtcatgtactgggcgactgcaaaaaacctggaaatatcaaagatgctgtaacagaaggatatcagactgcattgaatttataaaatagaaaagctgagattttatcattcaatttccgatgataaatctcagctcttttttatcgtttctttcctctcccgacgctttctcccagccttacttttgtttcaatcccattcagagaattctcccagatatccggatccggcattgcctttcctttttgtgtgagcagaatgatcgtagaacctccaaatgcaaaatttcctttttcctgacctcttcgcactcttgccgcctgatggcgattttcaatttttcccaccatcattgcccctacttccatcattaaaaccgtcccaaaattttctgagcagagcagcgaaaactctcttgcattctctttatagattgggaaactgtcattcgccaccggattgaccgtatgcaatactcccggtattttcacgttttccgattttactccatcatccacataaatgtaacgatgataatcttccacacaaagccggaacacccatgcatacccgcctgcatagcgttttgcaagcccttcatttttcaaaagactctctgtactgtagcttgtatgtttgatttgaaaccgggaattttcttcaattttatagacactgagtcttccgtcacaaggactgatcagcctctctggctcccgaatgattcttcgtgctcccggaagtgcttttcgtttaaaaaattcattgaaagagcggtactttttctgctcatactgatacatcggaatcttgttcttccggataaaccacgcaattagcactctggaggcccgagaatccaaaaacgcagctccgatttcagagatatgtggattgatcagtcccttcataagaaaccttcctgtttcatgcgtgtaaatccattccagcagccgatcctgtcctgaactgcattcttctatgtttcctcttctgtctgccagcttcatcctttttacctccttattgatctcatcctttgaaaactacatatgccggaaaaaccgcgctctgcagaactcccaccatcctccgttatagaacaggatgaacaggactgcgactcctacgattccgacaagaactgccagttctttattcgttggtttgcggaacttaaaatctgccacaaacaagataccgaccactgccactgtaatatgcagtgcatacagaaaccagtgatatcccggaagtatcagcgatactacaaagagcagcggcagtacgactgacatggatgtgattggaagtccctgatagtattttcgattttcgctggtctcctgctgccgtttggtctccatgacattaaaatatccaaggcggattactccggcaagcccatacagtactaaaattgccatactgtaaatacggcgcatgcccaactcatagcataatacaatcggaaacactccaaaacagaccacatcacacagagaatcaatctgaattccgaactgcttctcatcctctgttctgtttttcttcgttcgcgcaatctttccatcaaacatatcgcataatccggaaagcgccagacagaacacagcccactttggatgtcctgtaacagcacaaaaaatgccgattattgatgaagtaaaactaatataagtcagcaccaccgtataatcataaaatcctatcatccctcaacacgctcctttatacacttcttttgttctcttactttttcatttcctatcgtaagctgcgccaccactgtaaatgcagcactgatcagtaattctgcataatatcccagtccccggcttaaaaccatacccggaagcagcaaagatccgaacaccgggcgaaaaatattcaaaaataatgtttcactgatccccataccaccgggaagcggcagcatatctaccgcaactgctatcactgcctgaagaaacagaatatcaaagaatgaagttcctgacagtccaaacgcccgatacacaaaccaggtagctgcaaacaaggccattctctgaacaaatgtaattccgaatacaaccacgatcacgcccatatgctcttttaaatatactgccgttccccggtaagtatccatagatgcatccagcttttccagccgttcttctttgtgtttcatcaggcgcagcttttccagcaaatggacgccttttttcaggatttcctttgtcagcaccggatgaaatacaagaactgtcataaataccacacaaaacacattcaatcccaatcccagataatagaccggcagaatgccttccagatatctgtgcagaaatccctgaccaaatatgagaatcccgattccgatcacaaccaggaccagcttatatgtaatcgtcacaatcatcaatactaccgtcgatactggaatcggtatcttttctttcttcatatagtatatctgcatcggctgtccaccgcttgccgacggtgtaatgcaactaaagaaaaaaccaacggaagaaaacagaaaacaagaccgtttcttcaaccgggttccatacgatttcatcatataccagataataattgattctgaccatataaagaataataccagagccactcccggcaccagccattgccactgtgcctgtcgaatggagtgcatcatactctcaaggtcttctcctcgaaaaacaccatatacagtcagaccaaatacaagtaataaaaataaaatattaaaaactgcttttttcttatctctcatgtcgtgctcctcctgtcaaatgaaaaatacagctttgtatcctttcacaaaatctttgatatatccgataccactgtgttttcccggaaaccgtaaaacagatctgcgccaggataacaccacctgccacatcccagacaacatgctgttttgtcatcaaagtggataaaaacacgcaaactgcaatcacacaggacaggtattgataccatttcggaatctcctgccgcccacgaattcccagaaaacaaaaccagcttaccaggcaatgaatggaaggaaacaaattgtccgcggcatcaatggaataaagccagatcacggcctgattccagaatccgtctgccacaatctccggtctggtattggtcgtcggaaacaagacaaaaaaacagaaacagacaatccgggatattgcatctgctgtaaaaaagcgatatacactctctttttcctgtcccgcaatcaaaatgtaattgattccccaaaacagataacatccaaaatagattaccaatgtccagggtatgaaagggatcctctcatccaacacagtctcaatattgtaatgatatcgcccggatgcaatccatctggcaccattatatgccagtgagttccataacaatgccagtaaaagcggcacaatcccgtacgccggaatcagtttcttccttacattgttctgtctgtatctcatcttgcctgctccttcttctccaacatttgacagtgtttagtatagtcgttttctgtttcttactcaatagtctttactgtatctttaagaatctttaagaaatcttaaagattagagagcctgtttccaagctctccaatgattatctgcttatatttaattttctcatcagtgcttcttgaagaacctgagaataatttaccccggctctcgtagccgcctcattcaaccactctggtatggttaatgttttcttcactgctctattattatgcatttttgcatattcaattgtatcgcatgcgatataattcacaaattctccgtcctttaactcgacttctgccggaacagagacctttcatttttattgtggcggatccatggaactgatataataaaggtatcaagaaaacgacagatcagagaaaggaaggggagcagaatggttatttggcttctatttttagcaattatcctgtgggtcaatttaccatccattgtacagaaatgccttacgaataaactcataaataaagattaccatccatcaaatggaccgctaaaaatgattgaatggtttcgtctttacccacttaaaaagttattgctagcctttatatggggattttgtgcttatcagtctgtacggggatttagaatagtgtggattgaaaaacatcaagaagttctatggatcgaattattctttctttgttttactttgttgaccgcatataaaatatggaaatatatcaaaacgccctatcattgtgcaaagttcaacacgaatgtttgtcagtaaaaattggttcgttataaacggaaacctctatgccaaaaagtatataaaggatttgcgctatgtatttccaggaaccagaaataatacaatatggattacttattacaacaataaaagactgactctgcctttttcaagcattgatttgtcaggagataacggcgaagaaatgaaacgaatacttaataaaataatgcggggagaccagagcattgtcgtaaatgcaaaatagaaaatcaggattatccacttaaatggtaatcctgattttctattttctcttcagttctaattagtcttctgcaacatctttcatgctgaagctgaatcttcccattttatcttttccaaggcataccaccttcacaacatctccaatgttcagaacatcttctaccttgttgactctctctttggagatcttggaaatatgaaccattccttcttttccaggtgcaaactcaaggaatgctccgaattctttgatgctgattacttttccttcaaaaagctgtcctgcttcaaagtctgttacgatcgttgcgatcagcttcgctgctttttccatcgcttctttttctgtaccgcagatagaaactgctccatcgtctgtgatatcgatcttcacgccagtctgctcgatgatcgcattgatcgtctttcctctctgtccgacaacatcgccgatcttctgtgggtcgatctgcatctgaataatcttcggtgcataagttcccacttcttttctaggttctgcaattgctttattcatcacttcgtccagaatataagttcttgctttctttgtcgctgcgattgcttcttcaatgatcggtcttgtcagtccgtggatcttaatgtccatctggatcgctgtgatacccttgtgtgtaccagccactttaaagtccatatctccgaagaaatcttccaatccctggatatctgtaagaaccagataatcatcgtctgtctctcctgtcaccagacctgctgaaattccggcaacagctgccttgatcggcacacctgctgtcatcagagacatactggacgcacatacgcttgcctgagaagtagaaccattcgattcaaatgtctcagataccgtacggatcgcatacgggaactctgcctcgcttggaagtaccggaaggagtgctctctctgccagtgcaccgtgaccaatctcacgacgtcccggtcctctggatggttttgtctctccaacagaataagacgggaaattgtagtggtgcatatatctcttggaagtctctgcctcatccagtccgtcgattctctgtgcttctgaaagaggtgccagtgttgtcactgtacaaatctgagtctgtcctcttgtaaacatcgcagatccatgaactctcgggatcaggtctgtctctgctgccagcggacgaatctgatcgatcgcacgtccgtccggacgtttgtgatcttttaagatcatctttctgacagtcttcttctgatactgataaactgcttcccctaacactgccagccattcttcgttctctgcaaatgcctcttccagtttttctgtaatgacacggatattttcttctcttgtctgtttgtcatctgtaaagactgcttcttccatctctgccggtggaacgatctctttaatcgcctcaaacagttcttccggaaccgcgcagcttgtatattcatgttttgcttttccgcattctgccacgatcgtctcaataaatgcgatgactttctggttcagttcatgtgccgcaaaaatagcctcgatcatctgagcctccggaacttcatttgctccggcttcgatcatgattactttctcttttgtagatgcaactgtcagcgccagatccgatacttctttctgtgctgctgtcgggttgaatacaaattctccgtcaaccagaccaacctgagtcgtagagatcggtccgtcaaacggaatatctgaaatacttgtggcaatcgccgcaccaagcattgctgtcagttccggactgcagtcctgatcaacagacataaccagattctccaatgtcacgtcatttctgtaatccttcgggaacagaggacgcatcggtctgtcaatgacacgacatgttaaaattgcattctcagaagcctttccttctcttttgttgaatcctcccggaatctttccgactgcataaagtctctcattgtactctacactcagcgggaaaaagtcaatcccgtctcttggcttctcagatgctgtcgcagtacagagaactgtagtatctccgtagtgcatcaaaaccgcaccatttgcctgctttgccactctgtcaacatccacgcgcagagttctgccggcaagttccatctcaaatttcttatacataatattctcctttttgtttgaaacatttcccggaacaagtgtctccgaaactactgaaaaaaacaccggaagctttcgatatacttttcagtggtctcgggtatacatacttgtccgcaatctagattattataccatagatatgtatgaatcgcaagaaataaaaagacctctgcctgccggataaaccgacacaggcagaagtccctcttccatgaattattttcttaatccaagtttttcgatcaaagcacggtatctttcgatatctacttttttcaggtatgcaagcagtccacgtctctgtcctaccattttcagaagtcctcttcttgagtggtggtcttttggatttgctttgaagtgatctgtcagctcgttgattcttgctgtcaggatcgctacctgtacttccggagatcctgtatctccttcacttcttccaaattctgcaataatagcctgtttcttttcttttgcgatcatcgtatgatcctcctttaaacttaataataaaccgcctggtattaagtaacggtcggagttgtccgattaccgaacaccggctgaatcctaaggtagtataccacagggattttcggatgtaaagtcctattttttcaactcgattttcaaaacagtatcgatttcatccggcagcggataactgaataccggattttcacccagcgccacaaacggtgtatctgaatacatagctgtattccatgcctcacccctctgcacctgcgctccgctggaaaggaaggtgattgttcctacctcctgcgggctgattccatacaatgggagtgctcccagaggcgtttcataaatatgggcatatactgtgtttcctttttgtgtataacgtccccattccggcttgtcatactcggaaattccacattcatagagactttctccgttttgctccatccattctcctacctgcgtcagaatttcctgactttctttcggaattcttccttttgcatccggtcctacgttcaggataaagtttccgcctttgctgacacattcaaccagtttgcggataatggtctgtgatgttttgtaagtatgatcataataacagtatccccagtggttgttcatcgttgcacaaagctcccacgggatcggttttccgttcagatctttcattcctcccggcggaatgatcatttccggacttgcgaaatctccgctgtaaatattcggatgatctgttacgatacttccgttcttctctccggaaccttccagacgattgtcaataataacatccggctgatgttttctgaccatacggatcaactcttctgctttccatgtatcttcacacatgttgtcataagagaaatcaaaccagagaatatccagctttccgtaattggtcaccagttcttccacctggccatgcatatattccagataccggtcaaaattgatattttcatctttatacgcctcatttccgcgcattggatggtgcatatcattgtatttcggatagtccggatgatgccagtcaatcagtgtaaagtaaagccctacttttaatccttccgcacggaatgcatccagaaattcccgaaccagatcccgtccggcctttgtatttgtcgctttataatctgtcagtgcagaatcaaacaaacaaaatccatcgtgatgctttgcagtcagcaccgcatatttcatacctgctttttttgccagtcttgcccattctctcggattgtaatccgttggatcaaactgctcgaaatatttctcatattcttctactgtcattcgtttttcggacattacccactcgcccagcgccggaatggcatacagtccccagtggataaacattccgaatctttctttccggaaccattcggtccgattccatatttcctgattcattactattttccatatcctttcatttcataaacaacaccgttgtgttcccggctgtcttctgccgccagtgccatcaaatgactctcgatggattctgatgcggcgcttacgctttttgcagttccgcctcctgccaccagttccacaaagtctttcatcatggagacatcgcttccgctgtgtccaccttttggtacttttaccttgatctttgttgtatttccagacgcaaaatcttccacaatgatttcattttcttccatgtttccgcgaatctgtccttttgttcccatcagattgatgatccgctcgcatttattggtaaacgcacacattgtcatacttgctgtcacaccattgtcaaactccagatttactacctgatgatctaccacatcgttgtcacagtggtaaacacaccttccatatggtccgtctttcaatgcatccagcagagattttttatccgtctgaagacttaccacttttgcaaatgttccgcctttttcctctaaatcctccagatagaatcgaggtgcaaaatacggacattcatcccggtgtacacatccgtccagacagtgagccggagcatcttctggtgcattttcttctttaaaatgcatcagatttccgaagcttgtaagtcttgtacaggacgcacctacgagccataataagatgtccatatcatgacagcacttctgcaggatcatcggactgcttaaggacttgtttctccagttaccacgtacaaagctgtgtgccatatgccagtatcccacactctcaatatgctggatatcaacaagctgaccgatcgctccttcatccagaagccgtttcagctctctgaaaaatggagaataacgcagcacgtggcaaatactgatcaccttgtcataattctttgcgatctccccgatctcgatcagttcagattttacaggtgagatcggtttttcacataaaatgtgatagcctttttccacagccagcttcaatgcctcataatgcatctgatcctgtgtacagatcagaacacagtccgccattttcggacggttcaaaagctccatgtccgattccacagcgttttgaggtgcaatatcatgaagctttgcaaactcttcccgtcgatccgctcttggttccgctactgctacaaatttcaattcattgggataatccagggcataagaggcataagcctctgcccctctctgtccggctcccaaaagaatggctgttacttgtttcatgttttttctctccttttagccttttactgccccaccagacagtgcttcaataaagtacttgctgaaacagcagaacaagatcaccggcggaagcagaattacaacgattgcggaaaacattccgttgtagttcgtagaaaatgcattctggaactgtgccagaatcgccggaacagtcttcagttcttttgttgtcagtaccatagatgcccagtagtattcattccagtaattcataaacgccagcattgctgctgtcaggattcccggacgtgcgatcggcagcatgatcttgaaaaatgtctgtgtataaccgcagccgtcaatacgcgctgcttcttccagctctaccggtatcgtcaggaaatagtttttgatgaccataaagctgactgcgataccgctgcatgtatagattaaaatcaatcctgcatgcgtatcgttgattcccatactgttgatcagattataaaccgggaatgtcatcgctgtcggtggaataaacaatgtagacatcaacatgacgctgaccaccgatttaaatttaaagttcattcttgccacaacatacgctgacatggaaatcatgatgatacttaatacgacagaaatacctgccactttaaaactgttaaagaagtatctcataatatgcatgtcccggaatactccgatatatccatcaaaacaaagtgcacttggcagagtaaatcccggctctgccagaggatctgccttcaacgaggaaattgccacccaaataaccggaaacagggagatgaaacataccagaatcatcacaacatacgaaacgatctttccaaaagtccccactccatggaccgcttcattttctttgccttttctctgtctgctcatcatcttctgcctcctttctgttttctctcacgaaacagcatgttaatgatcaggatcaataccagacctcccaggatctgaatcgcaccgatcgcatttgcacgtgcgtactgtgctcttggactgacaactgccagttcacgaatcaggaagctgatactctttgttcctgctgctccgttcgtcaggaaataaacttcattatacaacaggaatcctgcggatacggagagaatactgattgtctttattgtatctttaatcaatggaagaacgatacaacgatccagtgtccatcctttggctccatccaaaagtgccgcctcacgaacctcttccggtattgcagaaatctgtcccagaaccatgatcatgtttgttcctgcaaagaagatgtatgcgcaggtcaaagcgatcatatttacctttggtataaacagtacgttgtcctggaaattcggcacaaaaacacggataatttcattgataataccatacttcggattgtacagctgtaagaagatcaatcccattgctgccgaagaaataatattcggtatcacgtaaatatttcttgccagcttccatcctctgcatttcttggagattaccagcgccactcctgtcgcgatcggaacctggattacaagtccgcacaatgcccagatacaggaatttctaagtccttcccagaaatacggatatttctcaaaaatatatttatagttgtcaaacagatgtccaaaggaatacatctgcatatcattcaaattcgtgtagtcccattttgcaaaggaactgatgaccaccgttgcgatcggatataaataaaacacacaaaagcagaccagagtcggtaaaagaaagaagagaataaacgcattctttctcaacttttgtttttttccggttatttccattttgctacctcctactctggaaaatttcatagagaaggaagctgctccttaaatacctcctgcaaagagcagcttccatgatttacaattaaccgatcagaccgatcagttcactctttaattcttcaaattttgcatttacatcagttccggaaacggtagattcgatcagtttgttaccgatcgcatttgcaatatctgttccccatgtagaatcgattgttgcaatcacatattctgcatcatttgcctgagaacatgcctctgcaagaagttttgttttctcgtcagatccttctgccagtgcattcagatccagtgttgttgtacatgggtttgcacctacttctttgaagatctttgtctgtacttcatcacttgtcatatattttacaaattccagtgccagttctttttctgcatcactcatatcatttgctgctgtgattccgccgcttgcagaagataaggaaacgcttcccgggaagattgccggtttaaagtttgtagtatcttcaaatccgcctgctgcccatactccgttgaagaacactgcagactgtcctttgttgaagtctgctgcccagtcgtttgcaccgtcatcggcattgctgctggcattggaagatccgtttttctgatccatatttgccacctgtttgaatgcttcttcaaactctttggattcgattgcttcttctgtcagaggctctcctacgatttttcttccattttcggacataccgaggattgcgttaaagcatcttgtagatccctgaccggcaccatatgcatacacatctccgcctgcggaacgtactttttccattgctccttcaaaatcgctccagttcttccatgtatccggtgttgttgctcctgcgtcttttaacaccttgtcattgtaccagtatcccagtgtcagaagctgatcgtgaaccgtataaatctttccatccacgtcgttctgtgtatagttgattccaacgttgtctttgatcccttcttcatctatgtatggtttcatgtcaaggagcaaatcctgactgatcgctgccagtgatacagaccgtcctgccagatccaccatatccggatagcttccgcctgccactttattttctaccacactgtcgatatcctctgtcggaattgctttaaattccacttctccatctgcatgctcttttgcaaactcgtcatagatatcgcgcataacctgtgcaggtgcccattcgcttgcatcctgataatatccatgataaaactccaataccttgtcatcagatgcttctgttttctttttgccgtcatctgttttctcagagtcaccggatttcccacatccggaaacgactactgttgccgccatagttgtagccaaaatcaggctgatgattcttttctttttcattactaaatcctccttcgatttcctgttgaatttagaatatcatgatcatcagcctgactctatggatagaattgacactttcttgcattatttctggtttttccgtgtcaatttcctattttttgtaatatatttatgattctgccgttttcttgtaatttatttacctctgttttgtcatatttatgaaaagcgccataccattttcatgatatgacgctgcaactattgatataaatttgtacaaaactgctcttcatccaaagtcccgttaagaacttccataatctggttccgaaagttttccagctgatctgccgtccagagattgtccggcacctcaatgatacggtctgctccacgaattgcttccacagcattgcacatcctcggaatctgctccttatattcttccagatgtatctttgggctggacggcatttgtccggtttccagaagaatccgcttctgtaccttttcgctgagcatatactttaaaaattcaacactggcatccattgtctcttgattcccggtattgcctacaatatatcccagacatacggaagaactggcgatcgtgctgccattctttcccggaaacggtgcatagcaggcatcgattttttcatcgatcagcttacttgcccacactccattgatatacatggctgtatttccactgttgaacatacttccttcgtccctgtatccataatttttgtctgtactgtccccatattgtctgatctgcttcattgtctctaaaaccggaaaaagttcttttgcacttagcatcatcgaatgattttccactgcgtcctgtgcttctttggaagtgtccaaaagcagggcatctgccagataagcactgttttctttcgtaatctgtaccgggatcaccgattttccttcattctgtgaccagctctgtatcttctcacaagcctccagaaactcatcccaggtctccggtaccgattcaatccccgctttttcaaaaatatccgcgttataccagtatccccctccaagcaacagtacatctgacagggtatacagcttcccgtccttctgccagtaggaaatgatctccggcgctacagagtctgcaaattcctgatctttctccagataaggcataaggtctgccgctttgtttttttcttccataaagcggtacaccgaatcttttccgtagcctcctgtaaaaatcagatccggaacctctccaacagaaagcatgttttttgtctttttgatcacctcatccgatgaagtcatggacatcagattcagcttgatctccgggtgctctttttcaaaatccttataaatctgccgcattctgacatgctccgattccatggagccccaaccatgtatcagcgtaatctctgtctgctccgcgctctccttactgcagcctccgagcagacaggtcgtcataagaagcagtaaaacccacgttccttttctcatagatttcttcctccggactgctcgtattcctttggcggacatcctgcatatttcttaaacacctttgaaaaatatgccgtatcctcaaaaccggtcaatgctgcgatctcatagattttcttgtctcctcttaaaagcagttctttggctttttccacacgaagagaattaatcgtatcaaacaggttctctcctgccttcaatttgtaaaaccgactcagataactggagctgacatggactgcctccgcaatatccgccagtgtcaggcgctctgtataatggttccggatataggtctgaacacgctttaacaatgtatctgtcccatctccctcttctgcattctgcggcacgatcaaaatctgctctgcacttcttcccttggcgtaggcctttgtctgttcatagagcaaggaagaatcatctccctgctgataggcccggctgcacaaaatctgcggcgtctctccaagaaagtttttacaaaaggctttcattttctcacaacagctgaagatttcctctgtccgttcactgtcattgactgtaagcaccagtccttcttcctccgttccgggtgaaagagcgcggtattcaaacgaatgaaaggcatgcagaaagaattttctcaccttttcaccctgacgcaccggtgttaccaggagcatccgataccaggtcatattttcactctccagccgctgtttgatatttgcaatggctgccggaatttcttccagagctgctgttttgacaatataatcactcacctggtactgaattgcctttcgtgcatactgaaaatccgcatacgcagtcagaaagatcacagacgtccggatatgatttttataaatgtattccgcaacttccatgccgtccatcagcggcatttttatatcaatgatcgcaatatccggcggacagctgcggatctgttccaacagatcctgaccattctccgcaacatagatcagctcgcatccaagctcctcccagggaatcagcttttccaacccttcccggatatatggttcatcatctgcaatcatcactctccacatgactttcttccccctttttccaacggcagacacatcgttacacaagtacccgcacccggtgtactctcaatcttcatcgatgcttcttcaccgtatatcgtatgaagcatctgctgtgtattggtaagaccgatgtgcgtatgcttctcatcttccaccgcctgccctttgttcttcttctgctcttccacatcaaatccgactccgtcatctttgatctgaatccgcagcttcccattttcttcttttgcttccaccctgatatgaccgcttcccggtttcggttcgagaccgtgtgaaacagcgttttccaccaatggttccacactcagccgcggaattctggcatttttcacttcttcactgcaaagtatatcatatgtaatctttcctgcaaaccgctctccctgtaaaagcagataaaactcgatcaactccatctcctgaaataacgggatttcaatctctccgttccggaaaatctttccctgaatcagtctggaaaatgcgctcaaaagcttttgcagttctttgtttccctgcaatcctgctttcatactgagcatggataaaatgttaaacatgaaatgcggattgatctgagactgcaaatattttacctgagcctgtgtagcaagaagctgtttttcatagacttccgtgatcagatttttgatctgcccggtcatctcattaaaccgtgtgctgatctcatcaaactctcttgtatcaaattcccgcatctgcgcatccagtctgccgtttccaaatttccggatatcttctccgataaacttcagcggacgtgtcattctcatggataccgcaaatacgacaatcgccgtgattccgatcacgatcagaaaaatcactgcaaaaggctgtacggtggaacggatcgaggcatagatcagattcttgggaagtgccatcctcagttcaatcccaaacccggttttccctccataaaagagagtcatctgatttccgatcttttcctcactgcttcccaaatcctgaatttccagcatctgttttgcctgttcttttcccttttcatttgcaaacagaatctgtcctttttctcctgtgatcagccagctgctttccggatattcttttgttttggaaaacaacgtatccaccgcactttttccaagggaaataatgcagcagccggactcctccatctcctcattgtatacacgcatacatacatacgcgcgttcatcatgtgtcatataccagtattcattgctgcttttcaaaaaactggaattgatttctttataaatttgattctgaagctccatattttccactgtctccgggtagaaacgactgctcacccattctccgttttcattaaacagatagatgcagtcgataaacggagaggcggaatcaaccatattcatttccgaaaacaaatcggtactgtttgcaaactgctcccttgcttcttgctcattgtacgcttctcccgcgataaaatgtttcagcacattattatgccgcagagaaatcaccatattttccatatttttgattcttgtatcaaactgcccgcttgtattctcgagataaaattccaggtcagaacgagcctgtctcgaaaaatgaaaaacggacaacaccatctgtgcgattccaagaatcaatgtcgaaataatacaggccgacaaagtcagaaagatcagctttgtacgaaagcttggttttttcttccctttcttcataaaccacctcactgctgcgcccgaaaatactccataccaaataaaatatctcgatccacctgtgtttttaactcctccagagatgcaaatctgctctccggtctctcaaacgcacagaattcaatctccacatattttccgtatgcatctcccttataatcaaatacatacacctctgtcaaaatccgttttgcatccgttaccgtcggtttgatccccagattgccgattccgcaataccaggttccatccatttttactctgcatgcatatacgccaaaccggggggctgctttttcgggcttccatgcgacattcaaagtgggaaatcccagcgttctcccgagcttttgtccatgctctacaacgccctctgtacggtatcggtatcccaaaagcttttctgcaagttccacattgccgactttcagcgcctctctgatataggtactgctgatttccctttttcgatacactgccttttctacaatctccagctcatatccatagcgctttgcatactgtttcagcatacagatatctcctcgcttctgatgaccaaaatgaaaatctgttcccactgcaatgtatgcggcatgcagttgttcaatcaggatcttttcaataaattcctctgcttccatctcacggattgcctcagtaaacggacagatgatcagcgtatccacacatccttccagatatgctttcttttcctcgcctgtcatcaatgcttctttccccatatcaaatgcaaaaacaacactttccgctttttcctgatccgcaaatctttgaatccggctgatcagttcctgatgtcctcggtgaagaccgtcaaactttccgagtgtgacagctgtcctgttttctgtctgatatttgcttaagtctgttacgtactgcataatcatcctcttatttcttcctgatccagaaacatcttttccacagtaagttttttcctgtttttatcaaaacagaagataccgataaaatgattttccagatcgtatacacgtatccattcctgattttttctttcttccatatctgttacaaagcggattggaatctcatttccgttatacgcaagcgcctgcccctctttttttaccgtcacggcaggatattggaaaaacactgcatccagaggggttataatctctgaaagctttccttcctctctttttttctgtatttctgaaagcttcagactgctctcaatctcaaaacggctcacctttgtacgaagaagcgactccatacatccaaagcaacccagcttttcaccgatatcgtgacacaatgtccggatataggttcccttggaacaggaaacctccatcctcacacgcggcagtgccatttccaggatccggatctctttgatttcaactttgcggcttttgcgctcgattgtcttcccttcccgtgccagctcatacagctttttgccgtttactttcagtgcagaatacatgggcggtatctgatcatattcccccacaaaactcatcacacagtcttttacctgctcctgcgtgagtccttctgtctctcccactctcagcacagttcctgaaatatcctgggtatcggtctcttttccaagcaacaggaccgcctcgtatgttttatccttttccgtgagcatatcacatacctttgttgctcttcccagacaaacaggaagcacgccttccgcatccgggtccagcgtgcctgtatgtccgatcttcttctgccccacaattccacgcagctttgccactacatcatgggatgtgtatcctttttctttgtatacgttcagaattccatttaccataacaattcctgtctttctcttctatgcctcttttagctgcaatgtaatctgtctaagcagattgttgatcacatcgtgcgcagaacctttcattgtaacccctgctgcacgcacatgaccgcctccaccaaaatactgagcaatactgcttacattgactttgcccttggaacgcagactgaccttatactcccgggtgtccgtctcatgcagaaaaatcgccacttccacaccttttgtctgccgaagctgagccacgattccctccagatcgcttggaactgcctcgaaaaattccatctcttttctggatacaacagaaacgaccacctgtttttctaaaaccagcatgctttctaaaagcgctctccctaagatctgattctggatataggtcttctcaaaataagttttttcgataatctcactgccgtcaattccttttctaagcaactgtgcggctgcctccatcgtctccggagaggtacaggagtactgaaatactcccgtatcatgtgcgattcccatatacagtgcttccgcacatgccttactgatcttctcatcttccagaagtgtataaaccagctctgatgtagaacttgcctccgggcaaatgtaatttaactctgcaaatgcatcattgctcacatgatgatcgatacaaaccgtatgtgcagcctgtcgaagtaacggtgcaaacggtccgagccgctgttcgtccccacagtccagacagataaacagatcatatgccgtctcttctgaaagtgtatgtctgatttcctctgtacgcgagattatggaaaaggatgccggtatcttttccagatacagatcaacttctatttccggaaactgctctgtaagatacaggtacaatcccatcgacgatcctacacagtctccgtccggccgaacatgaccggagagcgcgatccgcttctttcccttcaaaatatcagataatacaattttcatgcttatttattcatcctcacttttcaaatctttggtcagatcattgatttttttcgtcatattgacaccgtattcaatggactgatccatgataaaccggatctccggtgtattgcgcatgttgatcgttcttgccagttcacgccggatatatccttctgcactctgaagtcctgtgatcgtatcttcctgggctttcttatctcccagcacgctgatgtatgccttacatgtcttcagatcaggtgctacttccaccgctaccacggaagtcatcggcgccactctcgggtccttgatgcctccgcgtaggatgttgctcagttctctttggacttcagtattgattcttgtgttttttatactgtttttcctcataactgctccttattttctttctatttctaccatcttgtatgcttctacaagatcgccttctttgatatcattatagttttcaaatacgaaaccgcactcgtatccggctctgacttctttcacatcatccttgaatcgtttcagagatgccagaggtccgtcaaagatcacaatgccgtcacgtgtcagacgaacagaacaatttcgttcaaaagtaccgtcctgtacataagaacctgcaatcgttcccactccggatgccttaaatgtctgacgtacttctgcgtgtcccagtaccttctcttcaaataccggatccagcatacctttcattgccgcttccacatcttcaatcgcattgtagatgactctgtaaagtcttaagtcaacgccttcacggtctgcaatctccttcgctgtcgcatccggacgcacgttaaatccgatgatgatcgcattggaagcagatgccagaatcacgtcggattcattgatcgcaccaactccgccgtgaatgatcttgatcacaacttcttcatttgacaatttgatcagactctgtttgattgcttccacagaaccctgtacatctgctttcactacgatgttgagttcttttaagtttccttcctgaatctgattgaacagatcatccagagacatcttggattttgtctcttcaagcatcttcactctgtgctgtgaaataaatgtctctgcaaagtttcttgcttctttttctgactcgcatcccacaaagacttctcctgcctgcggaacctcattcaatccgaggatttctaccggctgggacggacctgcttcttttacacgtcttcccctgtcatccatcatggctcttacttttccgtgtgcggatcctgctgcaatggcatctcccacacgaagggtacctttctgtacgagcactgtcgcaacagaaccttttcctttatccagctctgcctcgatcacaagtcctcttgccacacggttcggatttgctttgagctccatcacttctgctgtcagaagaaccatctcgagaagctcctgaattccttcttttgtatgcgcggataccggtacgaaaatcgtgcttccgccccagtcttccggaatcagttcatactctgtcagttcctgttttacacgctcaatatttgcacttggcttatcgatcttattgatcgctacgataatttcaattcccgctgctttggcatggttgatcgcctcgatcgtctgcggcatcacaccgtcatctgctgcaactacaagaatcgcaatatctgtagaatttgctcctctcatacgcattgcagtaaacgcctcatgtcccggtgtatccaggaatgtgatcttttctccgttgatctctactacagaagcaccgatgtgctgtgtgattccacctgcctcgcggtctgtcacactggtatcacggatcgcatccaacagagaagtctttccatggtcaacgtgtcccataacacatacaacaggaggacgttttaccatagtagcttcatcttcttcatcttctttgagaagctcttcaatgacatctacaacttcttctttttcacaaaggatctcaaattccattgcgatttcttctgctgtctcaaaatcaatttcctgattcactgttacgatcttgccctgcatgaacagtttctttacaatcacagacggtaccactttcatcttgtctgccagttcctgaattgtcagtacttccgggattgtgatctgtttgatttcctcttcctttttcacttccggctttggctgtggtctctgcacttctactgtcggcttctgctttctgccttttttgcccttgctttcaaatccttcttctctgttttcttttttcttgtaatctttttctttatcttttgctttattgcgctgcggtttctgctgctctaccaatggcgacggaattgaatttctgtcgtttctgtcatttctgtcgtttcttctggaatccggacgctgaccattttttgccccctcgtcctggcgacggtttcctctctgaccgtttggagcagaagacggacgctgcccgtttcttccatctgccggacgattctgacggaaaccgcctctctgtccctcttccggacgtcggtttcctgccgggcgtccttcctgtggtcttctgttctctctctctccatttgcctgcggccctctcgccggacgatcctgacgggatccattctgaccggaagccggacgctgtccgtttcttccgcctgccggacgatcctgacgggatgttccctgtgtgttctgtccatttcccggacgggatcctcccgggcggcggtttccgctcttcgaattctgtgggcggaatacctgtacgatatttttctttttcggagcatcttccgatgttccttttcctgcgtgcccgctgcgcagttctgctacgacctcatccggaatggagctcatggaagttttcgcctccacattctttttctccagaatctccatcaggtctttattttccatccccagctcttttgccagttcatgcactcttaatttcgtcatactcaaactacctcctctatgcaatcgtattattttttatttccagttgttttcgaattccttttgcaaatccttcgtccaatatcgccagagatgcacggaactcttttcccattgcatgccctaaggtatctttatctccgtaaaaataaattggaacctcataaaacttacacatatcccggaatttctttttggtgttatccgatgcatcttccgctacgatcaccagtgcagctttcccggattttgtctcattttctgtcatgaattcaccactggcacattttcctgcctttgtggccagcccgatcagggacagcactctatcttgcttcaaattgttccatctccttttccagccgttcatatacttcttttggaattgcctgcttaaacgaacgttccagccctttattttttgccgcctttgcaaaacactcacttgaaagacagacataagcaccccgtccgttttttctgccggtcgtatccaatacaaattcatcgtcttctgtccgcagaactctgagcagttcctttttggctttcatttctccacatccgacacatttgcgcatcggaattttctttttaccgttcaaatacctcacctctcaaaagagtttattcttcctctgcctctacacactcaatctcttcgtatgcatctgcatcttccggatatccgtctgtatagttgacagtttcctcataatcctctgcatatccgtcttcttccatcatgttcatctgatccatgtaatcctccgggagttctccggactcgatcgcctgtgtctcgctcttaatgtcgatcttatatcctgtcagacgcgctgccagccttgcattctgaccttcttttccgattgcaagagacaactggtaatccggcacaataacacttgccactttttcatccggatctgccataacagagatcacctttgcaggacttaaggcattctcgatcagaagagccgggttatcactccagttgatgatgtcgatcttttctcctctgagctcttccacaaccgcattgactctggcaccgttcattccgacacatgctccgaccggatctacattctcatcatttgaccatacagccatctttgtacgggatcctgcctcacgggcaatgctcttgatttcaacggttccgtccttcacctctgcaacttctgcttcaaacagacgtttcaccagttccggatgtgtacgggaaaccaggatctttggtcccttcggagtgttcttcacttctacaatgtacaatttaatgcggtctgtcggtttaaacacttctcctttgacctgctcattttctgtgagcatggcatctgctttacccagattgacactgatatttttgccaacataacgctgcacaatacctgttacaatgtctttctctttttcaaaatactgatcgtatactacttttctttcttcctcgcggatcttctgaagaatcaggtttttcgcattcattgttgcaatacgtccaaactctttggactgtaccggaacctgacaaacatctccgatctgcagtgcagaatcaatctcttccgcatcttccagtgtgatctcgattgccggatcaaacacttcctcaactacttctttttctgcgtaaacagcataatcacaggtctctctgttcatgatcaccttgatgttatccgatgtcccgaagtggtttttgcaggcactgatgagagagttttcaatcgcatccatcatggtatctctgctgatgttcttctctttttcaagaattgtcaaagcttccattaattctgtgttcattgtttcatttcctcctaatttaaaaatccaacgctaaacggataagtgcaatttcacttttttcaaatgtctgtgtactgtcatcttcatatgagatcgtcactgtgttctgatcaaattctttcagaattccaacaaattctttctgtctgttaatcgcacggtacgtacggatctccacttcctgtcccacgcttctgataaaatctttttctttcttcaaaggtcttccaagccctggagagctcacctcaaaaatataggaatcttcgatgtagtctttctcatccagaatgtctgaaaatcttctgcttaccacttcgcagtcatccactgtgatccctcccggcttgtcgatatatgctctcagataccagtttcctgcttcttttacatattctacatctaccagctcgaatccctgttctgctacgatcggctctaaaagttcttctgtctgtttttcatattcttctcttcttgacacgtcaaacttcctttctatctcacttttttattttccagtatcgttatcttctcccgcatgaccgcatgatatgtaaaaagccctatcatacaaagaagagtgaactctcgttcactcttctgccgaattgattatgtaactatagacagtatagcaccattatctggtgaaagcaagggataaatcaaatttatgttctttttatgttactgttcacaccaatccccacctatccatgcgcaatcgtcgtgcttgcgcactccagtgtcgcacttcgtgctagattgcttatgtattggtggtgactggttccaccggatgttaaatatagattctttcccttacatgcaagcatgacggttcagaacctatatttaacatccggtgtgaacagtaacttttttatcatttcctctgcttcgtcccgacaccgtctctcttagccagtttcagacggttcaaggtcacttctttttctccatatttcacttttgtatctgttccctcttcaaacagatagatctgctccagctcatccgttttctgaagcttgattccgcgcacgccgactgcaccttttttcttttccggaatctctgctgtcagaaatcttaagaaatatccatctcttgtctgcagcacaatattctgattctcctgaaccatcccaacatggatcagtgcatcctcttcctggagcttggttgctgcaatggttcgttttgccacctggaactcactgccgtctactcgcttgatcattccttgctttgtggcaaacaaaagcttctcaaacgcgatctgctgtgcgtcacagatcgtcacaatctgttcttcactgctgctgtaattgctcacattgtcaatcggaacgcctttatcccggaatcttccatatggcagatccatcactttgatctgatgcatttttccggtatccgtaaacagacagatttttccggtattcagacaatttacaacatatttattctcactgtctgccgcctctttgtttcgctcatacacactcacatccactgttttcgcatacccgaagcgatccatcaaaaagatcacttcctgctcttctactttcttttcttcaaacactgccgcctctgcattttcaatcgcagtacggcgctttcttccatactcttttttaaatgcatccagctcttccatgatcagcgttgccatggaatcataatgattcaaaatatcttcatagcgggcaatatttttcagcgttgtctcgtgttctttctgcagcgcttcaatttccagaccaatcagtttatacaaccgcatttccagaattgcagatgcctgtctttccgtaaaccggagcatagccgccatctttttcgaaatctgagatttaaacttgatgttctctgtgattccctgcgtcagacatgctttggcatctttgacagacttgcttccccgcagaatctcaatgatcagatcgatcacgtcacaggctttgatcaaaccttcctgcacttcttttttatccagttcttttgcgagaagcgttttgtattttctcgtggtcagctcaaactgaaaatccacatgatgctcaatgatcgcctttaatcccagcgtttccggccttccgtttgccacggccagcatattgactccgaatgtatcctccagacgcgtctttttgtagagcatatttttcagattttccacatccgcgccttttttcagttccagtacgatccggattccttctttggaagactggttggaaatatccacgatatctgttgtcttttttgtttctacaagattgcagacgtcattcaaaaactttccgattccggctccgatcatggtatatggaatttctgtaatgacaagctgttttttaccgccttttaaatcttctacttctacctttccgcggatcttgatcttcccctgtccggtctcatagatttcaggaagatcatctttattgaccacaataccgcctgtcggaaaatccggtcctttgatgtatttcatcagctgttttgtcgtaatggcgtcatttttcatataagcctttaccgcatcaatgacttctcccagattgtgtgtcgggatactcgttgccattccgactgcgattccttccgctccattgataagaagattcggaacccgcaccggaagtaccagaggttctttttctgtctcatcaaagttcggtccgaaatcaatgatatccttgtccagatccgcaaggtatgcctcctgagtaaacttggtcagacgtgcttctgtataacgcatggcagctgctccgtcgccttcgatggaaccaaaatttccatgtccgtccaccagcaccattccctttttgaattcctgtgccataaccactaaagactcataaatggaactatcaccatgaggatgatatttacccatcgtatctcccacgatacgggcacatttccggtatggcttgtcatagcggatccctaattcatacatatcgtaaagtgtccgtctctgtaccggtttcagtccgtctctcacatccggaagggcacgggatatgatgacactcatcgcataatcaatataggacttgcgcatcacatccgagtattctgttctgattatctgtgattcactgctcatatcttttctcctctaagcctgaacttctgctatatatccagttctgcctctgttgcattttcgtaaataaacgcccttctcggcgggacttccgtacccatcagcatctccgtcacaccggaggccattctggcatcctcgatctctaccagcttcaaaatccgggtttccggattcagcgtcgtttcccaaagctgatctgcatccatctctccaagacctttgtatctctgaagagtaaatccaccgtcatgtgtcctccggtacttttccagagctttgtcatcatacaggtactcttcctctccttttttcggcatcactttataaagcggcggcattgcaatatagacatgcccctcgtagatcaattccggcatgaaccggtagaatagcgtcagaagcaatgtcgaaatatgggctccatccacatccgcatctgccataatgatgatcttgtcatagcgaagctttgtaatgtcaaaatcattgccgtatccttcggaaaatccacatccaaatgcattgatcatggtcttgatctctgcgttggcaagcaccttgtcaatgctggccttctccacattcaggatctttcctctgatcggcaggattgcctggtagttccggtttctggctgtctttgccgaaccgcccgcagaatctccctctacgataaaaatctcacatttttttgcatcccggctctcacagtttgccagtttcccattgctgtcaaacgaatatttctgctttgtcagaagattcgtcttcgccttttcctccgtctttcggatctttgcagccttctccgcacaggacaatacttttttcagcgtctctacgttccggtcaaaatacagaacaatctcatctccggtcacttttccggtggcttttgctgcatccgggttgtccagctttgtcttggtctgcccttcaaaccgcggatccggatgcttgatggaaataatcgcggtcatcccgtttcggatatctgctcctgtaaaattcgaatccttctcttttaaaataccaagctctctggcatattgattcatgaccgtcgtaaatgttgtcttaaatccggtcagatgggttcccccttctgcattgtaaatattgttgcaaaatcccagcacgttctcatggaactcattgacatactgaaatgccgcttcgacttcgattccttctgctgttcccttgaagtagatcggatcgtgaagcacttcctttttctgattcagatcccggataaatcccagaattccatccggttcatgatattcaatatgttcctgcgaatccggacgtttgtcatcaaatacaatcgtcagctcgggattgagataagcagtttcatgaagacgacttttcacttcctctgcccggaattttgtcttctcaaaaatcgtatcgtccggtaaaaaattgaccttggttccggtctttcttgtctttccgatggttggaagcagtccatcctccaactccaccactggaactccgcgctcatagcggtcgtggtgaatatatccctctctgctgatctgcacatccatataaacggacagcgcattgacaaccgaagaaccaacaccgtgcagtcctccgctcgtcttataggcactatcgtcaaattttccgcctgcatgcaatgtcgtatatacaagacgtgccgcagagattcctttctgatgcatccccaccggaacgcctcgtccgtcatcctccaccgtagcagaaccgtccttttccagtgtcacatgaatatttttacaaaatcccgccagatgctcatccactgcattgtccacaatctcatagatcagatggttgagtccttttgtcgagacacttccaatatacattccaggtcttttgcgtacagcctccaacccttccagaacagaaatactgtccgcatcatatgtattgctttttcccatattttctctcctaatacaaacttcttccatttgtcgctaacgttcagaatatcatgttttccttcttttttcaaacacttttttcgaaagtacgttcttatccgatcacctgacacaacgtctccgccagtacttccatggcgtttttcatctcctgcaccgtattggtctgggcccctgcctcgatcagaagagattttggaagcagatgcagattatagcggtaagcacgcagataaatgtgtctggcaaatccgggaaacatcctctcagatgccagttccatctgaagagaaaaggcaagattatcctgaatgtacggatttggcagataggtgatatctccgtttgcccgtgttctgctcagtccgttaaaatacatgatcttcgctgtcggctttccattcacctcggtcacaagatgtgtcccctctgccacaccatctctgtgcagatcaatggctacctcaatggtcggatttgcttccagaatcgggcgcacacctgcctctgcatactcatacgcgttgcttctgtccagctgtccgttgatgatgtcatagacacctttatcatgaattgtttcaattcctttctgattcaaaagttctgtcagataatccccgattcctacaatactggtagaggggtcaccgggaatggaatctgcaaattcttcctgggaatgggtgtgaaaaattaaaattttcggccccttctgcttccggtcgatcttcatgctccttccaagaagatcatctgcattcaactgctccggtccgatcatcgtagaactgtctaccgtataaaaattgctcaaaagatagtcaaagtcccgcagtctttcaatcgacatatcgatggaagatttgttctcccccagatttgccggcacttccgcagtcttgctctctcccaccagattcccatctgcatccacaacgctttcatcgttggcctgcttctccagtattttcgccagcgtctcctcatcctccacttcctgctccagattctccctgtcagaaacatattttaccaaaggcagccaggaaagtgctttttcccgaaaccagtctttcgaacttctggtctcatccgctctctgataggccaccccgggcatgtacatcttttccgtatactcctgtaacacctgcctgctttcatatctgaatgccctccaaaattcttttcctccgatcagggccgccagaagcacaagcactgccatcagcatccatgcccggctttgttctctcttcatatctacaccagtcctttgcacgatttctgccaacacacctggggtatttatatgagacaaattttccttttatgactcttctgcgttagaaaaaagcagatttaaaccttccgaaatcgtatagctgatctgtttcaccatttcatccacgtcttttggcgtcacaaacatcccgtttaaatgcggagcgatcagttctttgatcagttcatacttttctgccgcattgtaagaacggagcacttcccccacactttttaatgcctcagaagattccagcgccaaaatcaggttctccatcgtatcattgacaatggttgccgcatccacaactgtcggaactccgatcccgatcaccggaactccgatggattctctggtaattccgtttctgtgatttcccactccggaacccggatggattccggtatctgcgatctggatcgtacggtttaatctccgactgtttcttgctgccagcgcatccactgcaatcacaagatccggtttcgtttcttttaccacaccacggaccacctctacagtttccattcccgtctgtcccatcacacccggagccagtgtgctgaccagattcacatgctgcattcccatcgcatattttccgtactccttgacaatatgccttgtcgcacacagattgtctgtcacataaggaccaagcgcatccggtgtcacctgacggtttccgagccctacaatcagaacggaaagttcttctgtttttacattctgcgcttttaagagctcctgcacaaatcccgcaattttctctgaaacctctctatggtagtctgtgtccggcactgccatattcggcgcttctaatgtaatgtaggtacccaccggtttccccattgcttttgcacctttttccgtctcaatctttacccgggtgatccggatttctttttccttatcatagtcctcctccagaatcactccctgtatctcgacatgatccgactcaaaacgctccttttcctccagtgccaaatctgtacgaacactatacttttccaacattttcgctcaacctcgctttttctccatttgccgataatatttccaataatttgagaaatatgtattgacaaccctgaccagttggaataaaataaatgagtatgttccgttagaacgtccgtgtccgagtctggcgggattatgaattcactatttgaaaatatttcatactatttggaggtgtacagattggctaacattaaatctgctaaaaaaagaattttagttaacgaaacaaaagctgctaaaaacaaagcaatcaaatcaagagtaaagacttctgtaaagaaagtagaagctgcagttgctcagaaagatatggaagctgcaaaaacagctctcaaagcagcaatcggagagatcagcaaagcaggaagcaaaggtgtttaccacaaaaaaactgtttccagaaagatttcccgtcttacaaaagctgtaaacggaattgcttaatttttgatataaatatgaatcataaaaagacatccgctaccgtcatggcgaatgtcttttttgtttatgctcccgcattctgaagcagatcagaattttacaagaccgaatgtattgacaattccatccagtttctgcccctccctgcacagcgggcagtctttggctgcatatcctttataatccggcagatcagaaaccgtaaagattgacctgacatccatacctgctgcccggttgaccgcactgaatactgcacagataccacatacacgtccaccgtaatacagcactgcttccacggcttttgcaagcaaagcaccggtcgtcacagaatctgtcaggatcagtacctgcttcccttcgatcatacgctggttactgtcccgaaacagtatctgtcccatggtatcaaactccggtgtcacaaccgaaatattatttcctgcactcatggaaatcctgcctgtatccgccagatgttctgccataaatgcgccgatcacttctgtatttttcagacatacgatggtttctaccatagtaccggttttgtactcttctgccaatgtagctgccgtctctcttgcattattatgccgtgtcttgacagtagacatatcaatatacgtgttcacgtgcgaattcatcgtcgcaaaatgtccacccatcaatttgatacgtgctttcggattttttctggaacgaaggtttacaaattcttctgtcatagtatccactcctctcattgaaagattttcgtgtaagttatgacattattttagcatatttcatttgatttttcattaaattctgaatatttcgttttattcttcattctgcgcgcctaatgtatccaggtagacacgttcaatatgcattgccaggtaaccgacttccattttttccagcctgatcttgcagccgcgttcaattttttcacagatcgctgctgccagcgcaaatgactccggatgtttttcttccatatattcattcatatccaacttgatgctctctccccgcactgcccgcataaccatgtatttcacatgattcatcagacggttatatgcaagagacatgacatcgatcttttttccactctcccgctccagaacctgcacacattcccggattgctcctgccatctgcattgctgccgatacactctcatcctcgattgctgagtgaatatgaagcgctacatatccgatttcatgtgcatcaatctcaattcccagtcttttctgaagaatttcttttaattgggatgcaacctcatactcgctgtggaacaataccctgatgtcctctgtcaatggattactgatctgttccccacttaagatacgatctgctgcaaaagaaatatgatctgccagcggaaacaggattctcctgtcaatcgtgccaaatttcatctctgctttttgcagaatttcatctgcgatctccagatattccggagaaatgctttttgccagttcttttgcactcccccgttccgtatcttctttcaaagaataccgggtgcagttatccggcgcttcaaatctctggctgatttttttcccaaaaccaattccttttcccagcagcacatattctatattttcttccatattaatcgcgatcacgccattgttattcaacactttacttactctgtacatgacattcccccggtttttgttttctgataacagggtatcaaaatattgccaaaaagtaaagcggacctgaacggtccgctcattttttatttttcggttggtgattgatgcggacagtaacattttccgcaatcaatactatgcttcataaacatccacggcaaacaatggttctcccgcctttatctctccttctttcaaaagacgaaccttctgattgtctcctaattctgtacacagaaccggtgaacaaagagacggtgcatgttctttcagataggaaatatcgattttcatcaacggctccccttttttcactttctgtccgttttccacaaaaacttcaaatccctgtccgttcagtgccactgtatcgattccgatatgcagcagaagtgccatttgggaatctgtctggaatcccagcgcatgcttggtctcaaacacaaacacaacctcaccgtcttccggcgcaaggatcatcccgtctgtcggaattactgctgctccgtctcccatcatttttccggcaaatccctcatccggaacctctgaaagctccactgcatttcccgtaatcgggctggatatgatcacagtttcctttacttttttctctgaatcctgctcttttgaacttgtagtctgcacctcttccggttcagaagctgcttcttctgcgaaagcagttgtttctcccagaggcatatcttctgcggtttccagatagtcctccagattcgctttgatcacagttacatgcggcccatagattacctgtactccctggcctttttttacaattcctctggatcctgtctgcttgaggatctcatcttttacctttcctgcatcctttactgtgatacgaagtcttgtggcacagcaatccacatcactgatattgctctttccaccaagaccttctgtaatcatagcactgacaggatctgcagctgctcctgcatctccttttttactgctttcttttcttgcattgacatctgcttttgtatacagctttgtcgctgtatcatcgtcttcacgtcccggtgtcttaaaatcaaattttttgatcaggaacgtaaaaatcacataatacaaaataaagtaaataattcccaccggaatcacccgcatccagcttgtcttctcatttccctgcaaaataccaaacaggaagaaatccaaaaatccaccggagaatgtcagtcctactgcgatattcagcatatgcgcgatcatataagccgaacctgccagtacaacctgaaccgcaaataatgccggtgctacaaacaggaaggaaaactctaatggctctgtgatacctgtaagcatacaagccaatgctgcggaaagcaacaatccacctgccgcttttttcttttccggctttgcacagcggtacattgcaagagctgcacccggaagtccaaagatcataaagataaactcaccggaaaaatatctggtcgcatctgcgctgaaatgcactacattggctgaatccgccagctgggcaaagaaaatattctgacctccctgtaccatctgtccggcaacttccatgctgcctcccacggcagtctgccagaacggcatataaaatacatgatgcagtccaaatgggatcagcgcacgtttgataataccgaaaatcaacgttcccacatatccgcttcctgtgaccagaccacccaaagcgtaaattccattctggaccggtggccagataaagtacattccgatacctacaaacatgtatacaattgtagaaatgatcggtacaaaccgggaaccgccgaaaaatgataatgcgttcgggagcacgatcttgtgaaaccgattatgcagcgccgcaacaccaagccctacgataataccgccgaacactcccatctgaagagactgtatcccgcagacagaagcaacggttccttccagcacattttttgcgatttctccgtctgccgtgatttctccgtttactacaagcataccattgatcgctacattcattacaaaatatgcaatcagtgcagacagtgcagatacttctttctcctttttcgccattccgatcgctacacctaccgcgaaaatcaacggcagattatcgaacaccgcacttccgaccttgttcatgatcgtaagaagtgcatggagcactgtaccgtctcccaatatcttttgaagtccatacgttgcaatggttgtctcattcgtaaaagaacttccaattcccagcagcagacctgctaccggaagaatcgcgatcggaagcataaaggatcttccgattcgctgtaaaacaccaaaaatcttgtctttcattttccacttctccttttctctgtttttgatgcatttgatcttgatggatagtatttcagatttcatgcccgtgcatcctatttccagagaaaaacagaaaaaaagacaccaacccacataaacatctaaaataaagtccatgtaaggttaatgcctgccgtacagttacacacctgatataaattcattatagtcagtgtccctttgattgtcaatttctttttttgccatattatcgattttttctgtttggggattcaaaatttaacttgaactaatt

SEQ ID NO: 6977 - DNA, 56477 bp, Unknown
  gut microbiota DNA sequence
gcacagtttgtagatgcagcaggaacagtcgtagcaggtggagactactttgtagatgcagatggagatggagttttcaatgtgagtgaacttccggtaccagaaggatacaaagcagagacagttggagatttctctacaaaagattacgcggacacagcactccaggtaacagttgataaaattgcaaaagcatctgttgtaaaagcacagtttgtagatgcagcaggaacagtcgtagcaggtggagactactttgtagatgcagatggagatggagttttcaatgtgagtgaacttccggtaccagaaggatacaaaccaatggttcttggagatttctttgtagcggattacaaagactgtccattacagatcaaagtagagaagattgcaaaagaatcaatcgtgaagattcagtttgtagatgctgaaacagatgaagtcgtagcaggcggagactattttgtagatgcagacggagatggaatcttcaatcatacagaagtattagagtgggtaccggaaggatatgaattacaggaatttggagatttccaggtagagttttataaagaaactccattgcagcttagtgtgacaaagattgcagaagagccagagaatccagatccggaagatccaaacaaaccagagaaaccagaagatacaggaaaagaagacacaaataaaaaagacgacaaaaaagaggatactaagaaagaagataagaagaaaacttctccaaagactggagatgagacaagtgcagcaaccgcagcattacctgtaggtgtgagccttgcagcaattcttgcagtattagtgaaaaaatttaaataatctgaaaaacgcatagacggatttaggttataaaaaatggaaatattgccaaaaatgcattgcgtttttggcaatatttttctatggggagtacatgaaagacaggggtataagccaggtggcgaaaggaacaaggattacaatgagaaaatacataagattggtattgatgatatgtatattgggaattctgacatgtggatgtgggaaaaaagataaggaagaaaaaacagtaccgttgacaatatatgaacagctgaaagttacagaggagtcccttccagatgaagaaacaaaagtaatacaaaaaggtgtcaatagttgggcaaaagcatttttggcggtaaatagtgatgctcaagataaagaaataacagatcagagtttgtatcaaagtattgcaaatacagaacatagaagattattaaaagaagaaagagatgctttttataaagaaagcgtggttaatatcaatgaagtgtctacacaagtaaaaagtgcaaagaaagcgcaatatggtaaaacagatgtaggtgttgtggaatgtgatatagatgtgaaaggcacaagaaatgaccaggcatttgaaaagatatatactatgcagatggtagtcaattatcagacaaatgttgtatcagtgtatgaggttgaggatattacgtgggaataagaaataccggtaaagggatatcagttttggagagatatcaggttaccggtattttttatgacaaagaatataaaaaatgcagcaatttttcatagaatattggaaagtattgacaaaaaaaagattcgaatatacactagaagtgtttaggtagcaaacgttacggaaatttgaaatggtttgttatttaaggggaaactaaaagttataataggaggaaagtagtatgtacaggaaaaaattaatgcgcgtatgcctgacgggtgttatggttgtttcaattgcaacagcgaacgttgcaccagtgtttgcagcagagccagtggaaaaggtggagacggagagcgatagttgggatagtatttctggtgaaattaattttagagatacagacaacaatgaatctatctttgtgcaatttaacaatgaaaaagtggaggattatcgttggggtgatgatccgaaagatacatatgaagtattgccggcagaaactgtgaaaaaatatcttccagaaggatatgaattggtagaaggtatctattcggtagcaggtggagagacacaggattcttattttgtatatgccgaggtaaagaaagtacttgtcgaagaaacacaggatgtgaaaatcaattattatgatgaagcagctggaaaacaggtagcagaagtgccggtacaggtatcaattgatacatcgtgtgtaaatatggcaatcctgacaagatacctgccagaaggatatacacttgaaggttctgattgtatcatcagagacggatatgtatatgtatccgtagcgccagcagaagaagtacagaatgtaaaaatcaattactatgatgaagcagcaaagaaacaggtagcagaagtaccggtacaggtatcaattgatacatcatgtgtaaatatggcaatcctgacaagatatcttccagaaggatatacaatcgaaggtacagactgtatcatcagagacggatatgtatatgtttctgtaaagaaagatgtagagatcagagaagcagtgcttcacattacatttgaaactccgaacggagaagttgttacaacagaaacagtaacagcagaaggcgctgatggagaagacgcggtattcagacttggtgtagacttcaatcttccaacaggatacaagctgtccaacgacagagatcaggtaacagaaatcacaattccatttggatccacaggcggacatacaatggttgtagaaaaaggtgacctttcttccatcgtaaaaatccagtttgtagatgctgagaataatgatgaagtggtagcaggtggagattactttgttgatggtgatggagacggaatcttccacacaagagagatcacagagtgggtaccggaaggatatgagttacaggaagttggagatttccaggtagagctgtacaaagagacaccattacagctgagcgtaacaaagatcaaagaggataaaccggaaactccggatccagaggagccaaataaaccagagaaaccagaagatcctgacaaagaagacacaaataataaagacgacaaaaaagaggatactaagaaagaagataagaagaaaaattctccaaagaccggagatgagacaagtgcagcagctgcagcattaccggcaggtgtcagtcttgcagcaatccttgcagtattagtaaaaaaattcaaataatctgaaaaacgaatagacggttttcggttataagaaatgagaatattgccaaaaatgcagtgcgtttttggcaatatttttttaaaattttcagattgtactaaatcaaatacaaacgagaatcattcctgttttctcttgtctttcttttaacataatggtatactaaagctcgtaagaaagagaaaattattcatgtacattgaaggaggattttaaacgatggcacagtttgaacagtggtcaggatttaacggaagactctggaaagaggaagttaacgttcgtgacttcatccagaacaactacacaccatatgaaggtgatgaatctttcctggttggacctacagaggcaactgacaaattatggggagagcttcagaaactgcagaaagaagagcgtgcaaaaggcggcgttctggatatggagacagaagtagtttctggactgacagcatatggcccgggatatattaacgaagaaatgaaagatttagagcaggttgttggtcttcagacagacaaaccgctgaagagagcatttatgccatacggtggtattaaaatggctgagcaggcttgtacaacatacggatatgagccaagcccgaaactgcacgagatctttacaaaatatcataaaacacacaatcagggagtattcgatatctacacacctgagatgaaaaaagctcgtcacagcaagatcatcacaggacttccggacacatacggaagaggacgtatcgtaggtgactaccgccgtgtagctctttacggaatcgattacctgatcgagcagaaacagaacgattttatcgaaggcgaaagacacggaatgaaaggaacagatttccgtcttcgtgaagaaatcgctgatcagatcaaagcattaaaagaaatgaaagaaatggcagctgtttacggatttgatatttccagaccagctacaaatgcaaaagaagctgtacagtggctgtacttcggataccttgcagcaatcaagactcagaacggtgctgcgatgagtgttggacgtatttctacattccttgacatttatattgaaagagacttaaagaacggaacattgacagagtcagaggctcaggagctgatcgaccacatcgttatgaagttcagaatggttaaattcgccagagttccatcttacaacgaactgttctcaggagacccggtatgggctacactggaaatgggtggtatcggaatggacggacgttctatggttacaaagagcgactatcgtttccttcacacactggagaacatgggaccttcaccagagccgaacctgacagtattatattcttccaatctgccagagaacttcaagaaatattcttcttatatttctatcaagacaagttctgtacagtacgagaacgatgatgtaatgcgtccggtatggggagatgactattctatctgctgctgcgtatctgcaacacagacaggaaaagagatccagttcttcggagcacgtgcaaaccttgcaaaatgtctgctttacgcaatcaacggtggtgttgatgagaagacaaaaacacaggttgctccaaaatacagcccaatcacatcagagtatcttgactatgatgaagtaatggacaaatatgaccagatgatggaatggctgtctaaactgtatgtagatacattgaacatgatccactacatgcacgacaaatactactatgaagcagcagagatggctctgatcgatacaaatgtaagacgtacattcgccacaggtatcgctggattctctcacgtagtagactccttaagtgcgatcaaatatgcaaaagttaaagtaatccgtgatgaaaacggacttgctgttgactatgagacagagggagacttcccaagatacggtaacgatgatgaccgtgctgatgagattgctgtatggctgttaagaacattcatgagcaaactgaaaaaatgccacacatacagagactctgagccaacaacatctatccttacaattacatctaacgttgtatatggtaaggctacaggatctcttccagacggaagaaaagctggggaaccactttcaccaggagcaaacccatcttacggtgcagagcagaatggtctgttagcttctctgaactcagttgcaaaacttccatacgaagaagcactggacggaatttctaatacacagacaatcagccctggagcacttggacatgatgacgatgagagaaaagtaaatctggctaacgtaatggacggatactttgatcagggagcacatcacctgaacgtaaacgtattcggaacagagaaactcatcgatgctatggagcacccagagaaagaagaatatgcaaacttcacaatccgtgtatcaggatacgctgttaaattcatcgacctgacacgtgagcagcagttagacgtaattgcaagaacatgccataaagcactgtaatttgtaattcacagggacgtagtacaaacaggatgctacgtccctttttaaatatcaagagaaagggaatcaagcaaatgaaaggatatatacactcaacagagagttttggatccgtagacggaccgggagtccgttttcttatttttgtgagcggatgtccaatgcgctgtcagttctgccataatccggatacatggagtatgaagacaggaacgcagatgtcagcagatgaattgttggacaaagcatggaaataccgcagttattggggaaaatccggtggaattacagtcagcggaggcgagccgcttttgcagatcgacttcttattggaattgtttaagaaagcaaaagaaaaaggaatccacacaacaatcgatacaagtggagcaccttttacaagagaagaaccgttttttagtaagtttgaggaactgatgaaatatacagatctgcttcttttggatatcaaacatattgacgatgagcagcacaagattttgactggtcatacgaatcagaatattctggatttggcgagatatttaagtgacatcaataaaccggtgtggattcgtcacgtactggttccggagagaagtgataatgatgaatatctgaaaaagctggatgcattcattcagacactctccaatgtagagaaagtggaagtacttccgtaccatacattgggagagtataagtggaaagaactggggatggaatatccgctggaggggatcgagcctccgacagaagagcggatccgcaatgcgaatgaattgcttcatacaggaaaataaaaaagaaatcgctcatcatccgcctgagatgatgagcgatactttttatgcattattctgtttcaacaaatgcgtcttttccaagtccgcacagtggacataaccagtcttccgggatatcttcaaaagctgttccagcctctacaccgttgtctggatcgcctacttcaggatcataaatgtatccacatgcttcacataaatattttttcataaaaatagtcctcctttaatttttaacgaaagcatttaacatatgtattataaccaaaacaaaacgataagtctactaaaaaatagaaatttgtaattaattataataatagtaattattattgatataagaagagctaataaaataatggaacagtaacagaatggagtaataggagcatggtaaatagaaaacaatattgacatccatacaggctgtccatataatataattagcagttgtatcaaagggttctggttgttgcaggaccctttcttatattctggagggagaaatttattatgaataaaaaagaagtattagaaatccgtaagcagtttacaccggcaaattgcgcgatcacaagaattgccggctgctatgtggatcatgagaaaaataaaaagatggaatcaaaatcggcatttttatctttgcctgaggaagaggcgtttaaatattttgacatttttaaaaagacactttccgggacgatggggaaaaatatgttgaatatggaattcccgatcgaccaggagatgccaggcgggacacaggaatttttaatgaaactaaaagccagtaagctggaagatgacatgctcctggaagaattttatgacaaagtaatcgctacatatgagtatgcggagaattattatattattttaatccatgcaatgtatgatgtgccgggcagatcgtctgacaatatggagatgtttgacgcatccgatgaagtgtatgagtatttggtgtgcagtatctgtccggtttcgttgtcaaaggcaggattaagttacaatgcagagagcaattgtattcaggatcgtatccgggactgggtggtagatatgccggacaagggatttttgtttccggcttttaatgacagaagcacggatattcatggagtactctattatacgaagaaatcagaggatttgcagccggagttgattgagcagctgctgggagcaaggatgccgatgtcagccaacacgcagaaggagacatttcagatgctgatcgaggatactctgggagaagacggagattatgagacgatccgcaatatccatgatactttgaatgacatgattgaggaacataaagaagaaccggaaccgctgcagctggataagaccgatgtacgcaaggtatttgaaaagagcggcatttcttcggaaaaaatggagtgttttgatcagaattatgaagaaacagcgggggaaaagacttctcttcttgcaaccaatattacggagacaaaaaagtttcagattgaaacgccggatattgtgattaaagtcaatccggaacgggcggatctgattgaaacgagagtgatagatggaaggcagtgtctggtcattgctgtagatgatcatattgaagttaatggagtaaatgtaaggactctgaagcgcaaaaaaagcacagaagaagaggaataaaatagaacataacgggatttttatccggcggtctcagatgttgatctgagactgcttttttacgaaatgaaaataattaaatatctaactagtttattggcataaatattaaaaaaatgtgaaaaattatattaatgcttgatttttttggaagataatactaatatatcgattagatatctaactaattaaaaaggaggtatagcaatgcgctgtgatctggataaggttccaagtgtcggactctttgggatggtggttcatcagggcggactgcgggcacagaagatgtttgacaagtatgggttgaataagagtcaggcaggcatcctttttatgctgcatcatgaggaagctgtttctcaaaagcctctttctcagaaggagctggcaaaaaagttgaatgtgacggcgccgtctattacatctgcgattcagaagatggagaaggctggatttatcaaacggcagccggatgaaaaggatcaaagaatcatgcgtctgtatctggatgaaaagggaaaggcctgcattgaacatgtaaaggaagtggccatgcagatggatgaaatcatgttccgaggcatcagtcaggaagagaagcttcttttgcgaagaattatgattcagatttttgacaacttaaaagaagaaccaaggtttcatacatcaggagaaagtaaaacagagagataaggcaggaaaggagagcgtatgaaaaatttatttaaatttatcggacattactggaaagcggtcatcgcgattgttgcgatactggcagtacaggcttattgtgacctgtcacttccggcttatacatccgatattgtcaacgtgggaatccagcaaggcggaattgaagataaagtgccggctgcgatttcagaagaagagtggaataaggtgatgttgtttgtatcacaaaaggaccaggacacggtgaaggatgcatatgaaaaagacgagagttcttatgataagaccgccttcgttttgaaggatttcgtcaaggaagatgagacagcgctgaagaaagtagaagatgttttagcgcttccgatgatggtaacttccggttttgagtccggaagcaagcagactcagaaaatggagaagaaactgaaaaaacagattccaaaggagatgctcacagaagatactacggtgtttgatattttacagatgatgccgcaggaatccagagaggaactggtaaaagagatcaaaaaagaaatgaaagacatgccggatatgattctggagcaggcagcagtaagctatgcaaagactgcatatcaggatctgggtatggatgtagatcagatgcagtatcattatctgtttaccacaggtggtaagatggttgcacttgcgtttctcggaatggcagccagtgttttagtctgttatctggcttcccgggtgggagcaagagtcggacgggatctcagaggaagagtgttccgaaaggtagttggattttccaacaacgaatttgatcatttttcgactgcatcattgattacaagaagtaccaatgatattcagcaggtacagtttttggcagttatggttctgcgaatggtattgtatgcaccgattctcgcgttgggaggtgtttataaagtattccagaccaatgtttcgatgtcatggatcattgcattggcagtcgtactgattttatgtgttgtactggtactgtttgtagtggctatgccaaaattcaagagtctgcagaaactggtagacaaactgaatctggtgaccagagaaattctgacagggcttccggttattcgtgcgtttagtacagagaaacacgaagaggagcggtttgatgcggcaaataagaatctgacgaaaacaaacttatttgtcaaccgtgcaatgacttttatgatgccgacaatgatgttgattatgaatggtgtttctgtattgatcgtatggaatggagctcatggaatcagtgacggacagatgcaggtcggagatatgatggcatttatccagtatacgatgcagattattatgggattcttgatgatctgtatgatttcgatcatgcttccgagagcaggagtatctgcagatcgtatccaggaaattttgaaaagcgagactgttattttggatccgaaagagacaaaagagttccggaatgaagaaaaaggagttctgaagtttgaacatgtatcattccgttatccgggagcagacgaagatgtgctccatgatattcattttacggcaagaccgggagagacgacagcgattatcggaagtaccggaagcggaaaatccacgctggtcaatctgattccgagattttatgatgtgtcagaaggagtgatcacactggatggtgtggatatccgggaggtttcccagcatgcgctgcgggataagatcggatatgttccgcagaaaggcgtgcttttctcaggggatattgcctccaacattctgtttggaaatccggaaggcggcgaatcggtgatgcgtgaggcggctcagattgcacaggcagaagagtttatcgaagagaagaaaaagaaatatcaaagtcatattgcacagggcggttcgaatgtgtccggaggacagaagcagagactttctattgcaagagcaatcgcaaaacatccggaattgtttatttttgatgacagtttctccgcactggattataagacagatgttgctttgcgaaaagcgctgaagaaaaagacacaggatagtacagttctgatcgtggcacagcgtatcagcacgattcttcatgcagagcagatcattgtgctggatgaaggcaaaatcgccggaatcggaacgcacagagaacttctggaaaactgtgaagtttatcgtcagattgcagcttctcagctttcagagtcagagttaagttcgagtggaaaggaggctaaagccaatgcctagaccgatgggacagggaggaacaactgaaaaagcaaaggatctcaagggaacgctgaaaaagctgctccattatatgagtgtttttaaagtgcagatgttcttcattgttatttttgcaatctgcggaactgcttttactattgtaggaccgaagattttaggaaaagcaactacggaaatttttaatggactggtcagtaaagtgtccggcggaagtgggatggattttgacaaaatcggtcagatcctcctgatgacattagggttatatttgatcagtgcattgtgttcgtttatccagggatatctgatgacgggagtttcgcagaaaacaacgtaccgtttgcgtaaggagatttccgagaagatcaaccggatgccgatgaattattttgacacaaaaccggtcggagaagtactctccagagtgaccaatgatatagatactttgggacagagtctgaatcagagtgctacacagatgattcaatccgtgacaacgatcatcggtgtgctgatcatgatgcttacgatcagtcctctgatgacactggtcacattagtcattctgccggtctctatggttttgatctcgtttgtaatgaaacgttctcagaaatatttccgcggacagcaggaatatctgggaaatgtgaacggacaggtggaagaaatctacagtggacataatatcatcaaagcctttaataaagaagaggatgtgattcaggaatttgatacaacgaatgacaaattgtacgattctgcatggcgttctcagttcttttccggaatgatgatgccgattatgcagtttatcggaaacctcggttatgtggcagtagccatcctgggaggatttctgacgatcaagaaaacgattgaagtgggagatattcagtctttcattcaatatgtcagaagttttacacagccgatccagcagatcgcacaggttgcaaacatgctgcagatgacagctgcggcgtccgagagagtgtttgaatttctggaggaagaagaggaagatcagactgtggagcatccggtatcggtagaaaatctggaaggaaatgtaagctttgatcatgttcattttggatacaatgcggataggatcattgtcaatgacttctcagcagaagtaaaagaggggcagaaaattgcaattgtaggaccgaccggagcaggaaagacaacgatgatcaagcttctgatgcgattctacgatgtaaacagcggtgcgatcaagattgacggacatgacgtcagagatttcaacagaagtgaactgcgtgaaatgttcggaatggtgctgcaggatacctggctgttcaatggaagtatctgggacaacatcaaatacggaaaactggatgcaacggatgaagaagtgatccaggcagccaaggcagctcatgtgcatcagtttgtgaagacactgccgggcggatatgatatggaactgaatgaagaagcaaacaatgtgtctcagggtcagaaacagctgttgacgatcgcgagggcaattctggcagatccgaagatcctgattctggatgaggcgacaagttctgtagatacaaggacagaggtattgatccagaaagccatggataacctgatgaagggacgtaccagctttgtgattgctcatcgtctgtcaacgattcgggatgcagatatgatccttgttatgaaagacggagatatcgtagagcagggaaatcacgaagaacttctggcaaaaggcggattctatgcggatctgtataactcacagtttgagaaaacaacggaagtggcataatataagaaccggcaggagaggagactttcctgtcggttttgtgtttcgtgaaaaaatatgttatactaaaaaatatgacaaaaaagggggcaaaagagtatgccgttgacacattttgatgcggagggaaaagcccgcatggtagacgtgacagagaaaaaagagacggtaagagaagcaacagcaaccggaaagatcaaagtcagccgggacgtgtatgatgcgattgaagccggaacggtcggaaaaggcgatgtgctttctgtggcgaccacagccgggatcatgggtgtgaaacggacggcggatctgattccgatgtgtcatatcctgccgatcacgaactgtaagatccgttttgaaaaggatcctaaaaatctggagatcacctgcttttgtacggtaaaagtgaccggaaagaccggagtggagatggaggcgctgacaggtgtcagtgtggcgcttctgacgatttatgatatgtgtaaggctctggataaatttatggaaatacaggatatttatctttgtaaaaagaccggaggaaagagtggagagatcgtaaatccgagaatggaagacagaggagaagagggaagatgaaggcagcagttgtgacattgagcgacaagggatttcgaaacgaacgggaagataaaagcggagagctggtacagatgatgttgaaagaagccggatatgaagtggcggaatacaggttacttccggatgagcagacgcagatcgagacggtattaaaagagttgagtgatgagaaagagatggatctgatcctcacgacaggaggaaccgggttttcgcaaagagactgtacaccggaagcaacgatgaatgtagctacccgaaatgcgccggggattgcagaagcaatgcggtatgcgtcactggctattacccccagagcgatgttgagccgcggggtatcggtgattcgaaatcagacactgatcattaaccttccgggtagtccgaaagcggtgaaagaaaatctggagtatattttgcctacactgtcacatggactggaaattttaaaaggagtgacaggagaatgcgggatcagtttgaaagaaacataaattatatgagagtatccgtcacggacttgtgcaatctgcgctgtgtgtattgcatgccgaaagagggaatcagacagatttctcacgatgagatccttacgtttgatgagatcgcaagggtgtgccggatcggggcagaacttgggatttccaggatcaagctgacaggcggcgaaccgctggtgcgaaagggtattgaagaccttgcagagatgatctgccggattccgggaatcgagcaggtgacgctgacgacaaacggaatcctgttaaaagatcaattgcctgcactcaaaaaggctgggatttctgcggttaacatcagtctggatacgatggacagagcgcagtatcaggaattgacaggaaaggactgtttgttgcaggtaatggaaggcattcgggcggcactggagcaggggatgcgtgtgaaaataaactgcgtggcgctgaatgaatgtaatgagtttcagtggggaaagcttgcagcattggcaaaagagtatccgctggatgtgcgttttattgaaatgatgccgatcggtcttggaaaagcttatcagggaagtatgcaggaagtgatacagaagaacctggaaaatatatatggtgcagcaaagccggattcaggggcagtgcgtggaaatggtccggcagtatactgggagtttccggagtttcagggaaagattggatttatcagtgcgatctcccataagttctgcaaagactgcaaccggattcggatgacggctgaaggttttgtgaagccctgtctgcagttcgcacagggagtggatatgagatcccttttaagagggcagacggatgatgaagaactgaagcaggtattcgagcagttgatttatgaaaagccgcgctgccatcagtttgaaacagaaaaagcggacgaaagtctcgaacagcgtgagatgtcaaaaatcggaggataggttgaaatgggaattgtaagagcagtgtgtacgagcctggcaaagggaacgcaaaagacgaacgtgaaaagtgcggaatttatagaagattttggaatcaaagaggatgcccatgcgggaaagtggcatcgtcagatcagtcttctttcctatgaaaagattgaggcgtttcgggcaagaggagcagaggttgcagatggtgcatttggagaaaatctggtggtagagggatttgactttaaaaatcttccggtgggaacccggtttcagtgcaacgaagttattttagagatgacacagattggaaaggaatgtcatcacggatgtgagatttttcagaagatgggagactgcatcatgccaagagaaggtgtatttgcaagggtcattcacggcggacggatttcctgcggggatgagatgtacattttgggtcaaggtgagcagtaaccatttcgatacgaagtgagagaagattttcttgcagaaataaaagaaacgtaatatagtgtaaaaagcaaaagtaaacggaggaacaaatatgaaatggaataaatttcgtctgacaacgacaacagaggcggaggatattgtcagcagtatgcttatggatctgggaatccagggggtcgagattgaagataaagttccgctgacacagtcggacaaagagcagatgttcgttgatatcctgccggagacagaggcagatgacggtgtggcatacctgagtttttatctggaggaggatgaagataaagaaaaggtacttgctgatgtgcgtgtagaattacaggatatggcatcctatttgaacgtgggggcgtgtacgatcgaagagtctcagacagaggatgtggactgggtaaataactggaagcagtattttcatcagttctatgtggatgacattctgattatcccatcctgggaggaagtaaaaccggaagacaatgataaaatggtgatccatatcgatccggggactgcattcggaacaggaatgcatgagacaacccagctttgtatccggcagatccgcaaatatacaacgccggagacaacaatccttgatgtgggatgcggaagcggtattctgggaatgctggctttgaaattcggcgcaaaatattccgttggaacagatctggatccatgtgcgatcgaggcaacttatgagaacatggaagtcaacggaatcagtaaagagatgtacgaagtgatgatcggaaatgtcattgatgacaaagacgtgcaggacaaagttggttatggaaaatatgacattgtcgttgcaaatattctggcagatgttttggtcgcactgacaccggtgatcgtggatcagctcaaagacggtggaatctacatcaccagcggaattattgatgacaaagaagagacagtggtagaggcagttaaagcagcaggtctggaagtcctggaagtgacgtatcagggcgagtgggtttctgtgacggcgagaaagaacggataaggaaggattaagatccatgcagaatttttttgtatatgactctcaggtgcagggggaaaacatttatatagagggaaccgatgtaaaccacatcgtacatgttcttcgtatgaaggttggagaggaagtcagtgtacacgatgatgtgaaccggaaatacctgtgccggatcgagaaactgctggaagaaagagtggtgctttctattgtggagcagcaggagtcggacacggaactttcctgcccgatctatctgttccagggtcttccaaagggagataagatggaatggatcattcagaagtgtgtagagcttggcgtacacgcaatcgtgccggtcgcgacgaagcgggcggttgtaaagctggacgagaagaaagcgcagaaaaaagtgaacagatggaatgccatcgcagagagtgcggcgaagcagtccggaagagggatcgttccggaagtacttccggtgatgaaatggaaggaggcgctggaatacgcgcgtcagctggatgttaagatgatcccttatgagaaggcagcagggataaacgccacaaagcagctgatcgcctctgtttcttttggacagtcagtcgggatttttatcggtccggaaggcggctttgaagaggcagaagtggaagctgcaaaagagataggggcagtttcggtgactctgggaagaagaatcttacgaacagagacagcggggatgacgatcctgtcaattctgatgtatcatctggaaagagagtaacatagtttaatattgagaagaagtgaaaaggaaggtatcatggaagtatatttggacaattcggcgactaccagaggttacacagaggtgggagaactggtatataaagtgatgtgtcaggactatggaaatccgtcttccatgcaccgtaaaggtgtggatgcggagcattatatcaaggatgcaaaagaaattctggcaaaaattctgaaggtcaatgcaaaagaaatttattttacgtccggcggtacagaaagtgacaatctggcgatcattggaacagcaaaagcaaacaaaagaagaggaaatcatctgatcacatcatctatagagcatccggcgattttgaatacgatgcgttatctggaagaggaagaaggctttcgtgtgacctatcttccggtggacagcatgggacgcatcaagctggaagctctgaaagaggcgttgtgtgacgagacaattctggtttccgtcatgtatgtgaataacgaagtaggagcagtgcagccgatcgatgaggctgtccggattgtgaaggaatataatccggatattctgttccattcggatgccgtacagggattcggaaagtataagatttatccgaagcgtcagaagatcgatctgctgacaggaagcggacataagatccacggaccgaaaggaactggatttttatatgtcagtgagaaagttaagatcaaaccaatcgtgtttggcggagaacagcagaaaaatgtccgttccggtacagagaacgttccggggattgcaggactcgggttagcggcaaagatgatctaccatgatctggatatgaagactgcactgatgcgggaactcaaagagtattttattggaggaatcgcgaagattgaaaatacaaccgttcacgggatgaccgatgaaaacagtgcaccgcatatcatcagtgtgggctttgcagggattcgaagtgaagtgcttctgcatacactggaagagaaaggaatttacgtatcctcaggttctgcatgtgcgtccaaccatccggcaatcagcggggtgttaaagggcatcggagcaggaaaagagtatctggatgcgacgatccgtttcagcatgtctgaatttacaaccagagaagaaattgactatacattggaaacgctatataattgtgtaccgatgctgagaagatatacaagacattgatgcttgataaagagtccaaaagaaaaggataaataaaggagaatatcatgagatttcattcatttttgattaaatacggagaaatcgggatcaaaggaaagaaccggtatctgtttgaagacgctctggtgcgtcagatccgttttgcattgaaggatgtggacggagaatttaatgtacacaaagcacaggggagagtgtatgtggactgtgaaggcgaatacgattacgaagagactgtggaaagtttgaaacgagtgtttggtatcgtaggaatctgcccggttgtgcgtctgcaggacaatggatttgaacagctgaaaaaagatgtggaaaaatatatcggagaagtgtaccctgagaaaaaccagacatttaagattgaagcaagaagaagcagaaagtcttatccgttgaattctatggaattgaactgtgagttgggcggtgtgatcctggatgcgtacccggagatgaaagtagacgtacacaatccgcagattcgtctgaatgtggaagtacgggaagagatttatctgtactcagagattattccggggccgggcggaatgccggtaggaactaacggaagtgccatgctcctgctctccggtggtatcgacagcccggttgccggatatatgatcgcaaaacgcggtgtcgctctggaagcaacgtatttccatgcaccaccgtatacgagtgaacgtgcaaaagaaaaagtggtggatctggcaagactggtttccaggtattccggcccgatcaagctcaacgtagtcaactttacagacattcagctgtatatctatgagaagtgtccgcatgaagaactgacgattattatgcgaagatacatgatgaagatcgcagagcattttgcaaaacaggatggctgcctgggactgatcaccggagaaagtatcggacaggttgcgagccagacgatgcagagccttatggcaaccaatgcagcatgtacgcttccggtctaccgtccgctgatcggatttgataaaaaagaaatcgtggatatttctgaaaagattgatacgtacgagacatcgatccagccgtatgaagactgctgtacgatttttgttgccaagcatccggtgacaaaaccgaatctggagcgtattgagaaatccgagagaaatctggatgagaagattgatgagctgatgcagacagcaatcgatacggttgaaacgatcatggtaaaataggacaataaaaaggctgcctcataaagagacagcctaaaaataaatgatttcattatttgatgatgtaagaatccagtgcagctaggatgtcatccagattagaatcagcgtgaatattcagatcgatcggtttagaaagatccaaactgaaaattcccataattgatttggcatctatcacatatcttccggacactaaatcaaaatcgttgtcatattttgtgatttcgtttacaaatgattttactttgtcgattgagtttaaagaaatctgtactgttttcattataaaagtccctccttgatatacaatgcttcgagtatctgtactctaggtatattctacgagaagtaactgcaaaagtcaaggaacaaacaggaaaaacaaggaaaaccaggagaatatttttatgaaaaaagtcgcgttacacaatctgggatgtaaggtaaatgcatatgagacagaagccatgcaggaaatgctggaacatgccggatatgagatcgttccgtttcaggaaggagcggacatttatgtgatcaatacatgcacagtgaccaatattgcggaccgcaaatcaagacagatgctgcatcgggcaagaaagatgaatccggatgctgttgtggtcgcagccggctgttatgtgcaggcacaggctgaaaagcaggtgatcgatccatgtattgatattgtactcggaaacaataaaaagcaggatcttctgacagcgctgcaggcatatgaagaagcacacggtgatttgcgggaagtgatcgatatcaatcatacaaaagaatatgagaatctgcatctgacaaaacagggggagcatacgagagcatatatcaaggtgcaggatggctgcaaccagttttgttcttactgtattatcccgtatgcgagaggaagagtcagaagcagggcaaaagaagatgtagtagcagaagtgacagatctggcgaaaaacggataccaggaagtcgtgctgacgggaattcatctgagctcctatggcattgattttgaaaatgaagacaatctgctcagtctgattcgtgcagtgcatgagattgaaggaatcaaaaggattcgtctgggatctctggaaccaaggatcatcacagaagagtttgtacaggcgatcgcagcgcttccgaagatgtgcccgcacttccatctgtcattgcagagtggctgcaatgaaaccttaaagaggatgaaccgcagatatacaagtgaagagttttatgaaaagtgtgagatattaagaaagtattttgaaaaaccggcgctgacaacagatgtgatcgtgggatttccgcaggaaacagaggaagaatttgaaacaacgtatgaatttctgaaaaagatctgcttctatgagactcatattttcaaatattccaaacgagaaggcacgaaagcggcagtgatgcagggacagatcccggagcagatcaaggcaaaaagaagcgccagactgatcgaactgggggagaaaaaccgcagagcatatgaagaatcgttccttggaaaaacagtggaagtgctggtggaagaaaaatcggatgtgaacggaaaagaaatgtggacagggcacacaaaagagtatatgaaaattgcactagagtcagagaaaaatcttcagaattgtattctaaacgtgcaaattaaagatggccgggaaattattcattgaattttaaaatagattatattagaatgataagtaggatactaacgcaattatgctgattccggggaatcagatctgcgcgtgaataaaagaaaaatggaggagatacgatgagcgatttgagtaatacacagttctttcaggtagaaccgggaccacagatttctgcaaaagatattctggaaatcgtgtataaggcactgaaagaaaaaggatacaacccggttaaccagatcgtgggatacattatgtcaggagatcctacttacattaccagctataatggagcaagaagcctgattatgaaggtggaaagggatgaattggtcgaagaactgttaaaagcgtatatcgagcataattcatgggaataatcgactatgcggatcatgggactggattatggcacgaagactgtaggggttgcgatcagcgatgctcttggtctgactgcgcaggggatagagaccattcagagaaaagaggaaaacaagctgcgccgtacactcgcccggattgaagagctggtaagggaatatgaagtggatacgatcgtgcttggttttccgaagcatatgaataacgatgtgggtgaacgtgcaaaaaagtctctggaattcaaagagatgctggtgcgcaggacaggacttgatgtggtgatgtgggacgagcggcttactaccgtggaggcagagcgtacattgatcgagagtcaggtgcggcgcgagaacagaaagcagtatattgacaagatcgcagctgtttttatcctgcagggatatctggattcgatttatttgaaaaagaaagccgaagaggaaaactagaagctgcccacaggaggaagaacgcatggaaaagattaaattttgttttgacgagtcgggagacagcgttgaattttttgtactggaacagacaaagatcaacggggcatcctatattcttgtgacagattcacaggaggatgacgcggagtgtctgatcttaaaagaaggtgaatctcaggacgcgaaagagagtgtctatgagatcgtagaggacgacgtagaattacaggcggtttccaaagtatttgaggaactgctggaagatgtagagattgaaatgtaacttagaatattactttaccgcaggggacgtggaggatgacagtagaacaagaaaaagtacaggggatgctcaaggaaaagctcagagaaaaaggctggaaagtgaccagacagagactttctattttgcagaccctggcagaacataaagggcagcatctggcggcggaagacatttttgagctgatgaaggatgaatatccggaaatggggcttgcgaccgtgtaccgtacgctgcagcttttgtatgagattcagctgatcgaccggattcatttcaatgatggatgtatccggtatgagatcggtcatatatttgacggagactccaaacacagtcatcatcatctgatctgcagaacatgtgggcgtgtgatgccgtttgaagatgattttttggaggatctggaggcacagatcgaagccgataccggttttcatgtgttggatcatgaactgaaattttatggtcagtgtaaggaatgtgccgaagcttccatgcggaaagagaatacataaaaaactcatggaggtgtatatttttgaaaaaagaaaatcgtggaaaattaaaaatcattcctttgggaggtcttgagcagatcggtatgaatattactgctttcgaatatgaagacagtatcattgtggtagactgcgggcttgcattcccggaggatgacatgctcggaatcgatctggtcattccggatgtgacttatctgaaggataatatatccaaagtaaaaggatttgtgatcacccatggtcatgaagatcatatcggagctttgccgtatgtacttaaggagatcaatcttccaatctatactacaaagctgacaatgggaatcatcgagaacaagttaaaagagcataatctgctccgtacgacaaagagaaaagtggtgcgtcatggacagtccatcaatcttggacagttccgaattgaatttatcaagacgaaccacagtattcaggatgcttccgcactggcgatctattcaccggcaggaactgttgtgcataccggagacttcaaggtggattatacaccggtattcggagatgccattgatctgcagcgttttgcggagatcggaaagaaaggtgtgctggctctgatgtcagacagcacgaatgcagagcggaaaggatttacccagtcagagcgtacggtgggaattacgtttgatcatatttttgcagagcatcagaacacaagaatcatcatcgcgacatttgcatcgaacgtagaccgtgtgcagcagatcatcaactctgcatataagtacggaagaaaagttgtggtagaaggacgcagcatggtaaatatcatcacgacagcatctgagcttgggtatctgaatgttccggagaatacactgatcgagatcgatcagttgaagaactatccaccggagaagaccgttctgatcacaacaggaagccagggagaatccatggctgcactttccagaatggcaggggatgtacaccgtaaagtgacgattcagccgaatgacacgatcattttcagttcgaatccgattcctggaaatgagaaggcagtatcccgtgtgatcaatgagctttctgcaaagggtgcgaacgtgatattccaggatgcgcatgtttccggacatgcctgtcaggaagagttaaagctgatctattcgctggtaaaaccaaagtatgccattccggtgcatggtgagtaccgccacttaaaagcaaatgcggagatcgcgcagtctctgggaattccgaaagagaatatctttatcatccagagcggagatgtgatcgagctgagtgatgcagaagcaaaaatagtggataaagtccatacaggagcgattctggtagatggtctgggtgtcggtgatgtcggaaatatcgtattgcgagacagacagcatctggcagaggacggaattctgatcgttgttctgacactggaaaaaggcagcaacaatctgctggcaggaccggatatcgtatccagaggatttgtctatgtaagagaatccgaaggactgatggaagaagccagaaaggttgtgacagacagtctggataaatgtctttccggaagacatgcggactggaataagatcaagatgacgatccgtgacacaatgaacgattttatctggaagaagacaaagagaagaccaatggtcattccgattattatggatgtgtaagatatgatagtagatgaacgtatcgtgacattcatcaattccttagagacagagaacagtgaaatactcgaagcagtggaacaggaagctctgagcacatatgtgccgatcatacgaaaagaaatgcagagtttcctgaaagtgcttctgatgatacaaaaacctatgtgcatcctggaagtagggaccgcagtaggtttctctgcgttattgatgagtgaagcggcaccagaagggtgcaggatcacaacaattgaaaattacgaaaagagaattccgatcgccagggagaatttcagacgggcagggaaagaagagcagatcacgctcatagagggagatgctatggatgtgctgaaaacactggagggcagctttgattttatttttatggatgctgcaaagggacagtatatccggtatatgccccaggtgctgcgtttgcttcgtccgggcggaactcttgtgacagataatgtactgcaggatggggatattatcgaatcccgttttgcggtggaacggagaaaccgaacgattcattccagaatgcgggagtatctgtacgaattaaaacaccatgaactgctgacaacgtccattattccgcttggggatggagtggctgtcagtgtgaagaaacaggaaggagaataaaatggcaagacatcctgaacttttgataccggcaagcagcctggaagtattaaagacagcagtcatttttggagcagatgcggtttatatcggaggagaagcatttggactccgcgcaaaagcgaagaacttttccatggaggacatgaaagaaggaatcgcatttgcgcatgaacatgatgtgaaagtgtatgtaacagccaatatcctggcacacaatgaggatctgccgggagtgcgtaaatattttgaggaactcaaggaaatcaagccggatgctcttattattgcggatccgggagtgtttgagatcgcaaaagaagtgtgtcctgagattgagagacatatcagtactcaggcaaacaatacaaactatggaacctataatttctggtataaacaaggcgcgagccgcgtggtttccgccagagagctgtctctggaagaaatcaaagagctgcgcgcgaatattccggaggatctggaaatcgagacatttgtacatggagcgatgtgtatttcttattccggaagatgccttctgagcaactatttcacaggcagagatgcgaacaggggggcatgtacccacccgtgccgctggaaatatgcggttgtggaggagaagagaccgggagagtatctgccggtttatgagaatgaaagaggaacttatattttcaactccaaggatctgtgcatgatccagtatatcccggagattctggacgcgggtattgacagtctgaaaatcgaaggacgtatgaaaaccgcgctctatgtggcaacagttgcaagaacctacagaaaggcgatcgatgactatcagaaggatccggaattatataaaaagaatatgccgtggtatctggagcagatctccaattgtacgtaccgccagtttacgacaggattcttctttggaaaaccggatgagacaacacagatctatgacagcaacacgtatgtgaaagagtatacctatctcggaattatcggagaggtcagggacggtctgtgccggatcgaacagcgcaacaagttttctgtgggtgagatcattgagatcatgaagccgaacggggaaaatgtggaagcgaaagtagagcgtatccttaatgaagaaggagaggagcaggagagtgctcctcactcaaaacaggtgttatatgtggcgctggatcagaaggcggacaaatatgatatcttacgaagagcagaaaaagacgcgtagcttttcgaccgcgctcttttctatccgggatacataagaacgggagatccccagttgtttggcgacttccctctgcgtgtattcctcgccgccataaagtccataccgcatttttaaaacgagtttttcccgctgggagagctcgttttctactttttcatacagcttctggatattttctttcaggcatacccgttccgggatgtcgtcttcatccgtttcgataatatcgtataatttgatctcgtttccttcccggtccgtaccgatgggttcatataaagaaatctcttttgacatctttttccgtgcgcgcaaatgcatcaggatttcgttttccacacacttggaggcataagctgccagccggtttcctttgcttggattaaaggtgacaatggctttgatcaaaccgatggttccgattgagatcagatcttcgggatcttcgtccacatactgatattttttgatcacatgtgcaacgagccgcagattccgttcaatcagaatgtgttttgcctgcaggtcaccctcagtatatttttgaatatattctttttcttcggaaggggtgaggggatttggaaatgatttcaagacagcacctcaaagcacatttgataacagtgtatgtaaagaaggcatgatttgtgcttttccacttgaaaagaggacgggcagaaaaaagtagttgacaaacagcgggtaggagagatatagtaagactacattcccggagcgatccgctctggagagtataagatctattgattcaaaaggccgtatcggccaacgttttcaagttacaaatttattagaagatcagttatgtggggactgaacgtaccggctcttggaaaaggagtgtgtgatgagtttttgctcagtattatctgcagcagtgatcgggctgcgggtagaatttattcatgtggaagctgacgtcagcaacgggcttccggtatttcatatggtgggatacctttcttctgaagtgaaggaggcagcagagcgtgtgcgcacagcaatcagaaacagtggagtttcatttccagccaagcggacgatcgtcaatctggcgccggcaaatgtaagaaagagaggagcgtcgtttgatcttcccattgcagtggcagtgatgattgcattgggatgtcagatttcagagggggtaaggcatacgctttttataggagaactgggactggatggcagtgtgctggaagtaccgggtgttctgccgatcgttctggaggcaaaaaaggcgggagtgaaacgctgcattgtaccagaagcaaatgaggcggaaggcgcacttgtaaaaggaatcgagatcattggggtaaagcatcttaagcagattacaaagattctttcaggagagagaaaaaaagaaaaagcaaggaatcaagccaaaaagcagacggtaaaaaatccgcagccggatttttctgaaatgcagggtcaggcagccgtcaagcgtgcagcggagattgcagtggcaggcggacataatcttcttttgatcggccccccgggaagcggaaagaccatggcagcggaacggattgccggaattctgccgcctctgacattagaagagagcatggagattacaaaaatatacagtattatgggacttcttgatgagaaagaaccgctgatccagagccggccttttcgcagtgtacaccatacggccacaagggcagcactggctggaggcgggatgatcccgacgccgggagagatcacactcgcacacggcggtgttttgtttttggatgaattgccggagttttcgaaaagtgtgatcgaggtactgagacagccgcttgaagagcaccagatgcggattgcgagaacacacggaaattatgtatttccagcggattttattttgatcgcggcgatgaatccatgtccctgcggatgctatccggatatgcagaaatgtacctgtacgcctgtgcagattcagaattatttaggaaggatcagtcagccgtttctggatcggatcgatctgtgtgtagaggcgccccgggtggaatatgactcactggtggagaagaaagcacaggaatcttcggaagcaatccggcagagagtatgtgaagtgcgaaatctgcagagaatgcgttatggaggaacaaaggtaaatgcaagactggacagccgggagacagaagaattctgccgtctgggagagccggaaaacgaagtgatgaagcaggcatttgctgcctttggatttacagcacgtacttatcataaagtgttaaaggtggcgagaacgatcgcagatctggacggaagtcaggaaattctaaagcagcatttgtgtgaggcaatcggctatcggacgccggataagaagtactggaaacgataggaggaagaacgcatgaagtatgaatactggtttgccggaatccgaaatattccggatcggacaaaaataaaattaaaagaaaaagcagggacagcagaagccatttattatatagaagaaactgcactcagaaagatgcagctgctcaaggaacaggaaatttggaagctgctggaggcgaaaaagaaagaggagctggacagaaattatgaagcaatgagacaaaaaggaatctcggtgatcccgtggggagaaaaggaatatccaggtcgtttaaaagaaatctatgatccgccgtatgcgttgtatgtgaaaggaaagctgccggataatactgcgcgtgcggcagccattgtgggagcgagaagctgtactccctatggagaaaaatatgcgctggaatatgggaaaaaactggcggaatgtggaattcaggtgatcagcggacttgcgcgcggcgtagacgggatcggacagagaggtgctctgctgggaggtggaaagacctttgctgttttggggagcggggtagatgtctgttatccgaaaaaccatatgggattatatctggatatcctggagcaggaaggcgggatcctttcagaactcccgcccggcacaccgccgcttccgcagcattttccgaggcgaaaccggatcatcagcgcgctgtcagatattgtgctcgttatggaggcaagagagaggagtggatcactgatcacggcagatctggcactggagcagggaaaggatgtctatgcgctgccggggcctgttaacagcagcttaagtcaagggtgtaaccgcctgatctttcagggggccggaattcttttaagcccggaaaatctgctggatgagatgggcattgcatatagcggggaatgtgaaaaatcagacaaaaatgaaaaaatgcttgaaagtcctgaatatatggtgtatagttgtgtcggtctgtatccaaagagcgtggggcagctgacagaagaaacaaagctgcgcccggaggaagttttaaagcttttagtgtctttggaattacagggatatatcagagaaatctcaaaaaattattatataaaagtgaaatgacggcgtgagggcgccggatggaggaaatgtttcaatggcacattatctggtaattgtggagtcaccggcgaaagtgaagacgatcaaaaaatttcttggaaagaactatacagtagcggcatcaaacgggcatgtcagagatttgccgaaaagtcagctcggaatcgatgtggagcatgactttgagcccaaatatattaccattcggggaaaaggggagattctcgcaaacctgagaaaggaagcgaagaaagccgacaaagtatatctggcgaccgaccccgaccgtgaaggagaggcaatttcatggcatcttgcagcagcgctgaaattggatgagaaaaaaatgcgccgtattacattcaacgagatcacaaagaatgcagtcaaggcgtcattaaaaacaccaagagatattgatatggatctggtggacgcacagcaggcaagacgtgttctggacagaatggtaggatatcggatcagtccgcttttgtgggcaaaagtaaaacggggattgagcgccggacgcgtgcagtctgtagcacttcgtatcattgcggaccgggaggaagagatcaatgcatttattccggaagaatactggagtctggatgcaatcttaaaggtgaaaggagagaaaagaccgctcactgccaagttctatggaaccgagaaaaagaagatgacgatccattccaaagaggagctggatgagattttacaggctttggaaaaagaaacatacgaagtaaaagatatcaaaaagggagagcgtatccgaagagcgccgcttccgtttacaaccagcactttgcagcaggaggcagcaaaggtgctcaacttcggtacacagaagacgatgcgtattgcacagcagctgtatgaaggaattgacgtaaagggcagcggtacgatcggtgtgatcacgtatctgcgtactgattctacccgtatttcagaggaagcagatgcagcggcgagagcgtacatcacagagaattacggcgcagagtattcagcagcaggagaaacaaataaaaagactgagaagaagatacaggacgcgcatgaggcaatccgaccgacggacatttccatgacaccggcttcgttgaaagagtctctctccagagatcagttccgtctgtatcagctgatctggaaacggtttgccgcaagccggatgcagcctgcaaaatatgagacgacttctgtgaagatcggagcgggagaatacatgtttaccgtagcgacatctaaagtggcatttgagggattccgtacggtatatacagaggcggatgaagaaaaagaagtgagcaatgttctggtcaacggattgagcatggattcggaactgacgaaagaagagtttgataccaaacagcatttcacacagcctccggcacactatacagaggcaacacttgtaaaggcactggaggagcttggaatcggacgtccgagtacctatgcaccaacaatctccacaattctcggaagacgttatattaccaaagaagccaagaatctgtatatcacagagatcggagaagtagtcaacaatattatgaagcagtcgtttcctagtattgtggatgtcaactttacggccaacatggaagggcttctggatatggtggaagaaggaaaagtgcagtggaaagttgtcgtaagtaacttctatccggatctggatgaagcagtgaaaactgcggagaaagaattagagagcgtgaagatcgaggatgaagtaacggatgtaatctgtgaagagtgtggaagaaacatggtgatcaaatacggtcctcacggaaaattcctggcctgtccgggatttccggattgccgcaacacaaaaccgtacctggagaagatcggtgttgcctgcccggtctgtggaaaagaagttgtgatccgcaagacgaagaagggaagaaagtattacggatgtgaaaataatccggaatgtgattttatgtcatggcagaaaccgtccaaagaaaaatgtccggaatgtggcggatacatggtggaaaaagggaataaactggtctgcgcaaacgagcagtgtggatatgtccgaaatttgaagggaaattagaaggatttcgaataaaaacaagaggaaattgcaacaatttcattgaaaattcgtgaattgtatgataacatgagggtgtctattgaataggaacgagttgtatatacaattgagtctggaggagacggatgagcgtacagttattagataagacaagaaaaataaataaattattgcataataataattccagcaaagtggtgtttaatgatatttgtgctgtcctcacagagatcctgaactccaatgtcctggtagtcagtaaaaaaggaaagatcctcggagtcagcaaaagtgcgcatgtagatgcaatcaatgaactgatcgtagagtctgtgggagcgcatatcgatgagatgctcaatgagcgtctgctcaatgtactttctaccaaagagaatgtgaatttggagacacttggtttttcatcggaaaaagtgcagggatatcaggcaattatcgtccccattgatattgcgggagaacgccttggaacactctttatttataagcagaatgagttgtattccattgatgatatcatcttaagtgagtatgggacagcagttgtcggactggagatgctccggtctgtgaatgaggagagtgcagaggagacgagaaaggaacatatcgtacagtcagcgatcagcacactttcattctctgaactggaggcgatcattcatatttttgaagagttggatggaacagagggaattctggtggcaagcaagattgcagaccgtgtaggaatcacaagatccgtgatcgtcaatgcacttcgaaaatttgagagtgccggagtgatcgaatcccgttcctccggaatgaagggaacatacattaaggtgttgaatgactatgtctttaccgaattggaaaagatcaaaaaagaacgtttgtaaaaatcgtacagaagataaaagggtatcagcaagctgatgccctttctctgactacaggtaagaagagcaggaggaaaagaacatgtatgaaggcaatgcagtagatcttcagatggagaaagtgatcgcggcagatgcgatcctggatgatgagacacatcactgtcaggtttttcgttatgatatggaagaggattacatatacttacaattaaaggaggacgatctgacagcaatctcgctggatgcaaagtatcagtgctatatttccacaaggacagagcttttgttctgcacgggcgtggtacaggagcgatatcagtgtgaacacgggaaaattttggtctttcatattgagaatggattctatacaatttcggatatgaaaggacctgtaaaaagaaaataaactaaatataaaatttttgaatctctgttgacaaatagaaaacagagtgctattttatattcatgaggtttagcactcgatatgaacgagtgctaataacgtataaaataaggaggatttaccatgaaattagtaccattaggcgataaaatcgtattaaagcaattagaagcagaagagacaacaaagtcaggaatcgttttgcctggtcaggcaaaagaaaaaccacaggaagcagaggtaattgcagtcggacctggtggaatggtagacgggaaagaagtgacaatgcaggtagctgtaggagataaagtaatctattctaaatatgcaggaacagatgtagagctggatggagaagagtacattatcgtaaaacagaatgatatccttgcagttgtaaaatagaagaaagagacaattttttggaaacagtcaacagacgaagtataacaggagtgtgaatgaaaatggcaaaggaaattaaatatggagcagaggcaagagccgctctggaaaaaggtgtaaaccagcttgcagatactgtaagagtaactttgggaccaaaaggaagaaacgttgttctggataaatcgttcggaacaccattgatcacaaatgacggtgtgacgatcgcaaaagaaatcgaactggaagatggatttgaaaatatgggagcacagctcatccgtgaagttgcagcgaagacaaacgatgtggccggagacggaacaacaacagcgactgttctggcacaggcaatggtaaatgaaggaatgaagaaccttgcagcaggagcaaacccgatcgtactgcgtaaaggtatgaaaaaagcgacagatgcagcagtggaagcaattgcaaatatgagccgtcaggtaacaggaaaagaccagatcgcaaaagttgcagcagtatcttccggtgatgaagcggttggaaatatggttgcagatgcaatggagaaagtttccaaagatggtgttatcacgatcgaagaatccaagacaatgcagacagagctggatctggtagaaggtatgcagtttgaccgcggatatatttctgcatatatggcgacagatatggagaagatggaagcagttctggatgatccgtacatcctgatcacagataagaagatttccaatattcaggatctccttccattgctggagcagatcgtacagtcaggagcaagacttctgatcattgcagaggatattgaaggagaagctcttacaactctgatcgtaaacaaactgcgcggaacatttaatgttgttgcagtaaaagctcctggatacggggacagaagaaaagaaatgctcaatgatattgcaatcctgacaggcggacaggtaatttccgatgaacttggaatggacctgaaagaagcaacaatggatctgctcggacgtgcaaaatctgtaaaagttcagaaagagaacacagtcattgttgatggatgcggagataagaaagcaatcgaagacagagtggctcagatcaaaaaacagatcgaggagacaacatctgaatttgacagagaaaaattacaggaaagacttgcaaaactggcaggcggtgttgcagtgattcgtgtgggagcagcgacagaaactgagatgaaagaagcaaaactgcgtatggaagatgcactcaatgcgacaagagcagcagtagaggaaggtatcatcgcaggcggtggatctgcatatatccatgcttctaaagaagttgcaaaacttgcagagactctggaaggtgatgagaagacaggtgcgaatatcatcctgaaagctctggaggctccattgttccatattgcaacaaatgcaggtctggaaggtgcagtgatcatcaataaagtaagagaatcagaacctggagtcggatttgatgcttacaaagaagaatatgtagatatggtaagtgaaggaattctggatcctgccaaagtgacaagaagcgcactgcagaatgcaaacagtgttgcatctactctgctgacaacagaatctgttgtttctacgattaaagaagagacaccggcaatgccggcagcacctggtggaatgggaatgatgtaatgataagaggtttcccggatatctgttttgatacagatacccggggctctttttttattttcgggatttcggcagtaatagacaaaagaattatagaaaaactgagaaattatgtaaaaattatgaatgagacattatctataagtattgcttaataatgggagttaaaataaatcaggataaaaataaattgtaagtgggaataggcttgacaagtggtgggaatttttgtaccataacagataatctatggacatacatattagagaaagagaggaaataaatcatgggaaaaataatcggagaaggtattacatttgacgatgtcctgttagtaccggcatattcacaggtcattccaaatcaggtggacttatccacatatctgacaaagacgattaaactgaacattccgatgatgagtgctggtatggatacagttactgagcaccgcatggcgatcgccatggcacgtcagggaggaatcggtatcattcataaaaacatgacgatcgagcagcaggcagaagaggtagacaaagtaaagagatcagagaatggggttatcacagatccgttttctctttctccggatcatacactggcggacgccaatgatctgatggcaaaattcagaatttccggagtgccgatcacagaagggaaaaagctggttggaattattacaaaccgtgatttgaaatttgaggaagatttctctaagaaaataaaagaatccatgacttcagaagggctgatcacagcaccggaaggaatcacactggaagatgcaaagaagatccttgcaaaggcaagaaaagaaaaacttccgatcgtggacaaagatggaaatttaaaaggtctgatcacgatcaaagacattgagaaacagatcaaatatccactgtcagcgaaagacggtcagggaagacttctctgcggagcggcgatcggaatcacagcaaactgtctggagcgtgtagaggcgctggtgaatgcgaaggtagacgtgatcgtgatggactctgcacatggacattctgagaatgttctgcgcacagtgcgtatggtcaaagaaaaatatccaaatcttccggtcattgcaggaaatgttgctacaggggaggcgacaagagccttgatcgaagccggtgtggatgccgtaaaagttggtatcggacctggatcaatctgtacgactcgtgtggttgcaggtatcggtgtaccacaggtaacagctgttatggactgctatgcagtggcaaaagagtacggaattccggttatcgcagacggtggtatcaagtattccggagatatgacaaaggcgattgcagcaggagcgaatgtttgtatgatgggaagtatctttgccggatgtgacgagagcccgggaacatttgaattataccagggaagaaaatacaaagtataccgtggtatgggatctatcgcagctatggaaaacggaagcaaggatcgttacttccaggcagatgcaaagaaattagttccggaaggtgtggaaggacgtgttgcatacaaaggaacagtagaagataccgtattccagctcatgggaggcctccgtgcaggaatgggatactgcggaactgcaaatattgaggcactgaaagagaacggacagtttgttaagatttcagctgcatccttgaaagaaagtcatccacatgacattcatattacaaaagaagcacctaactacagtgtagatgaataaagtgaaggagtgccggagcaggaaactgttccggcatttttgaaatcaggagttcagatgaaaataagatccaacagaagaaaaagaagaagatatggacggggaagaagtgacaggaaagtattctatgcaagagccggactggcagcgctgctgttattgacaatagtgctgatcttaaggtcatgcatctcaaaaaagcaaggagagatgcgggcggatgtggatgcgtccagaccggagattgatgtacagcttctggatatcaatgagtactccagaccggaaatcgagtcagacgggatcacaggaatcgtgattcattatacggcgaatccgggctctactgcacaggagaacagagattattttgaaggacttaaggacacccatgagacatcagcaagcagtaattttgtcgtgggactggaaggagagatcattcagtgtgtgcccacatgggaggtggcatatgcatccaacgagcggaataaggataccatttcgatcgaatgctgtcatccggatgaaacaggaaagtttacagaagaaacctatcagtcgatggtgcagctgaccgcatggctttgcagaaagtacagtctgactgcggatacagtgatccgccactatgatgtgaccggaaaaaattgtccgaaatactttgtggaaaatgaagaggcatgggcgaatttcaaagaggatgtggcgaatgcactggcgaaaggcggtacggattaaaggaaacgaaaaagtatatctcttgcggtctgaaacaatgcttgttataataaacggacaaaagagttaaagggaaagagcagagggcgaaaatatgaatgaattgatgataaaaaagtttcgggaatcatgtgattataatatcgtactgatcggatttatgggagctggaaaatcgacggtggcaagaactctgggagaatggtttgacatggagattgtggaaatggatgaactcatctcggatcgtcagaggatgagtattccggagatttttgaaaagcacggagaagagtatttccggaatcttgagacgaatcttctgattgagctgcaaaaaacaagtcggacgattatttcctgcggcggcggtgctgcaatgcgcagtcagaatgtaagtgaaatgaaaaaaaatggatatgtggttctgctgacagctactccaaagacgattctggaacgtgtcaaagagaatgatgacagacctctgctgaagaatcataagaatgtggaatatatcgcagaactgatggaaaagcgccgggagaaatatgagacggcagcagatttgatcgtgcagacagacgagaagaatgtgcaggaaatctgcaaagagatgattacaaaattgatggagatggatagtagagatgtttgataaattttttccggatgaatacctggcatccacttatgtgattccttttgaagagctgtatgagaagggataccggggagtcatctttgatatcgacaatacactggtaccacacggagcaccggcagatgaaagggcaaaaaagctgtttacgcgtttaaacaaaatcggattttcctcctgccttctgtcaaataatcagaaaccgcgtgtggagatgtttaatcaggagatacagactgcttatatctataatgctcacaagccttcaatcaagaattatgagaaggcaatgaagattatggggacaacaaaggagcgcaccctgtttgttggcgatcagctgtttaccgatgtatggggggcaaagagaaccgggattcacagtattttggtgaagccgatccatccaaaagaggagattcagatcgttttgaagcgttatttggagaaaattgttcttcatttttataaaaagaagcggaaactggataaaaaaggttgaaaaaagacagaatctattatagaattataaacagtcgagaaaaggcagcgcataaagtgcgcatttgaaggaggattacagatgatttcagcaggagattttaaaaatggtgttaccgttgagattgacggaaatatctatcagatcttagaattccagcacgtaaaacctggaaaaggtgcagcatttgttagaacaaaattaaaaaatatcatcagtggcggtgttgttgagaaaactttcagaccaactgaaaaattcccgaaagcacatattgacagaaaagacatgcagtatctttacagagacggagatctgttcaactttatggacgtagagacatatgatcagatcgctctgaacgaagatgttgtaggagattctctgaaatttgtaaaagagaacgaagtagtaaagatctgttcacacaatggaaatgtattctcagtagagccacctctgttcgtagagcttgcgatcacagagacagagcctggattcaagggagatacagcacagggagctacaaaacctgcaactgtagagacaggagcaattgttatggtaccattgttcgtagaacagggagatgtactgaagattgatacacgttcaggagaatatctctcacgtgtttaatacgaaggagacgcctcagggcgtctttttcttttggtaaggttgtttcatttatagaatctttatagatagttcatataaagttcgttgtatttcgcatcagagtcggatataatcaagaaacataatattgttcacatcagatttcaaaggcacattcgtgccgcatttctcaaaaagatgagcacacaatcaggaaggagacagtatggaatatagagaatttgtgtgcgcagcaattgaaacaatgaatcaaaaggaggggaaaaacgggatacaggcaagagaacacagagcagtaaaaaacaatgggaagattcgtgttggactgttgcttcaggaaacgggatccaatctgtttccgacaatctatctggaggaatattatgagaagtttcaaaaaggggaaactctggaacagattgtgtcggagatcagccagctttatcaaaagatcaaggcaaaaaatatcatagatgtggattctttttttaatctggaatcatggaagaataagctggggatcaaagtgataaaaacggagaaaaacagggaattactggaagaaatcccgcatttggatgtgctggatctttcgctgaccttttatgtcattttagaccggcaatgtgagggaagcgcaacaatgcagatcacaaatgagtatatgaggcaatggaatcttgaaacagaggaattatatgaaatggccatgcgaagtgctgtcagactgcttccggcggaattctgctcacttcccgatatgatccgcaggataaccggaattgaagtggaggcaatccgcggcatgcagagagaatgtcagatgtatgtactgacgaattccagcaagatccagggggcagcctgtatgttttatccgcatgttcttgagatgatcggtgaaattttgaaagaggatttttatattctcccgagcagtatccatgaagtgatcattttgccgaaatcaagagaaattgcaaaagaggaactggatgctatgatacaggatatcaatcatacacaggtagacacagaagaagtgctcagtgatcatgcatatctttatgaaagaggattggggaaaatacaaatggccttttaaaaagaaaagatggaatgagaaatttgaaagaaatgctctttacaagattgtaaaattgtgctaggatatataaagtgtccggttgaaattcaaaggacacaaaagattatgcgtctgtagctcagtggatagagcgatgccctccggaggcatgtgcggcggttcgactccgcccagacgtgtattttttatatcgaaaagagatcagtaaaagggattgagcggcatccgggcggatgtgcttcaatcccttcttttaaatcaaattcacttttctttgcaaaatccgataagtaataaagtatcctgcaatggcaagtactgtcgtagtacaggttccgatcaggagcatctgaaagaaatactctgaaaagctggtctgtgcaggagaaaaaacataatcaggaaagacactggtgatgatggatactcctatgctgataatctgagtaatgagattcagaataaaatatacagcaatggatacaatgatccgatgtgcgggaaccagctgtccgattgcaatacttgtataaataaatagcacgcaggaaagaattccgacaaatgaaaaaaatacaacaagaccgcaaaaggaagagaaggacataccaagtgcagcctgaaagtcaggtttgatcctttccagagcagactgtatattgtctcccgaaatcaaaaaccacgcagcggcaaagcagattgtaagatccagcacataccagatggaggcagacagaatcttcgcccagagctgggtcagcggtgacgccggaagcgtccaggtgatgtatccctcatctgtaaacaggttcttataaaaccggacggcatacatgatacagcatccaaaggaaatcgcagaaaacagcattgtgagcacgacgatcaaaagggcgataaccggagcaaattcttcaggagctgctgaaaagtcaagatgatcgattacaaggaagcgtgcgatcagacagccgatgatcagaatgatatgcaggactgcaaacatacgtactccatattttaaatcatgtttgatcaatttttttaacatcgaaatacctcccggaataaagcatctaccgattttttgtgtccgctgcggatctcatcgacagaggcgttgagtgtaatctgcccgttttgcagaaataaaacccgatccagaacattttctacatctgcgatcaaatgggtacagatcaaaacagacgcatcttcgttgtagtttgtcaggatggttcggagaatataatctctggctgcaggatctacaccgccgatcggttcatctaatacgtaaagctgtgcattccggctcatgacaaggatgagctggactttttcttttgtcccctttgagagtgttttcagacgaagcgaaggatcgatatccagatcctttaacatcgtatgagcacgggagacatcaaaatcggagtaaaagtcactgtaataggaaatcagctctgaaatcctgcggcgttcatccagacatccgcgctccggaagataggaaacgattttcttcgtctctacaccgggaactgatccgtttactgtgatctgtccgtcagttggtaaaagaagcccgttgatcagtttgatcagagtcgtctttccgcttccgtttggtccaagcaggccgatgatctctccacgttccagagtcagatcaacattggaaagtgcaaaaaagtgattgaattttcgggtcagccctttgcattcgagaatgggattcataggtctacctccttgagtgctttttgtatcaacgcagcagtttcttctttctgaaagccgagctgtttcatcttttcaagaaactgcaggatatgttcggatgcgagactggtcttcatttcatccagcagctgggtatcttctgtaataaaacgtccgcttgttcgctgagaatataccagtccgctccgttccagttcggagagtgctttttgcattgtgttcggattcacggcagcttctacggcgagatcccggacagagggaagtctgtcaccgggtttgtagataccggatacgatatcctgctgaatacgctccatcaactgtagatagatgggacggtcattgtccaattcccatggcatttgatcacctcgttttctatgaaaaactaactgtactatatatataatacaatcgtataatgaagttgcggatttgtcaagttacttttcatttgccgcaagaatttcggcaggcagttccgggtgaaagatcccttcctttaacatacgaatctcatatttgtaaggcgcataggatttcttctctttgacagccgatggaatgtacggtgtttccagaattttcgggatatccataaaatctttgtggtgtacgatatggtgtatcgcgtcaaatccgatatgtccgaaaccgatattggcatgccggtcttttgcggctcccggaatatttttactgtcattaatgtgaaagacggcaatctgatcttttccgatcaggcggtcgaactcatcgatcacatcatcgaaatggtggatgatatcatatccgctgtcactggtatggcaggtgtcaaagcagactctcagcttgtcattgtatacaacgccgtcataaatctgtgcaagctcttcaaatgtgcggccgatttcggaaccttttccggccatggtttccaatgcgatatgacagggagtatctgctgtcaggacagagttgagtcctttgatgatctggcggattccggcgtcagttccggctcctacatgagaacccggatgaagtaccagagtatggcttttgcaggcggcagtgcgctcaatctcctttgccaggaattcgactgcaagttcaaatgtttcaggttttacagaatttcccagattgatgatatagggagcatgtacgatgatttcgtcaatgccatgttctttcatatattcccaggcaggtgaaatatttagttcactgatttctttgcgccgtgtgttctgcggagctcctgtatagaacataaatgtgtttgcgccgtaggaaacggcttcttttgcggaaccaagcagcatctctttaccgctcatgcccacgtgtgatcctaatttcataacatatatcctcttctttccttattatataaatcctttcggatgcgtgtacaaacagcttgccgtaaagcattatacatgataaaatagcaaaatgaaagaaaaatagaacggagagtggaacagaagtgaaaacattgttggaactgattacaatagaaatgaaagaagcctttgaggcagccggttatgatgcggcatttgcgaaagtgaccttgtcaaaccgtccggatctgtgtgaataccagtgcaacggagcaatggcagcagcaaaaacttacaaaaaggcaccgatcatgatcgcaaatgatgtggtggcaggactgcaggaaaaagactgttttgaaatggcagaagcggtgaatccgggatttatcaatctgaaagtaaaaccatcctttgcagcagcatttctcaatgagatggcagcgagtgaaaagctgggagtggaagagatggagacaccaaagacgatcatggtggattacggcggaccgaatgtggcaaaaccgctgcatgtaggacatttgcgttctgcgatcatcggagagagtgtaaagcggattctgcgttataaaggaaacaaagtaattggtgatattcatctgggagactggggatatcagatggggctgatcattacagaattgcagaagagaaaacctgagcttccatattttgatgaaaacttcaccggagaatatccgaaagaggcgccgtttacgatcggagagcttgaggaaatctacccgacagccagtgcttatgcaaaagaacatgaagagtatcgtgaaaaagcactgcaggcgacgttccttttgcagaacggacatccgggattccgtgcgatctggaatcacattatggcagtttctgtagcagatttgaagaaaaactatgcaaatctgaacgtgtctttcgatctctggaagggagaggcagatgcccagaaatatattccggatatggtggagatgctcaaagaaaaaggatatgcgcactatgatgaaggtgctcttgtagtggatgtacaggaagagacagacaaaaaagaagtgcctccgtgtatgatcttaaagtcagacggggctgcactgtatgacacgacagatctggcgacactggtagagagagaagaactgtaccagccggacgaagtgatttatgtggtagataagcgtcaggagcttcactttgtacaggtattccgctgtgcaaagaagaccggaatcgtaaaaccggagacagaactggaatttttaggattcggtacgatgaacggaaaagacggcaagccgtttaagacaagagaaggcggcgtgatgcgtctggaaaatctgattcgtgaaatcaacgaagagatgtacaagaagatcatggacaaccgtacggtttccgaggaagaggcaaagaagactgcacagatggtaggacttgctgcgatcaaatatggtgatctttccaatcaggcatccaaggattatgtctttgatgtagaccgctttacttcctttgaaggaaatacgggaccgtacattctgtacacaattgtccggatcaagtcgatcctgaataaataccaggaagaaaacagtctggaggatctggtgatcagagaggcatccagtgaatttgaaaaagcactgatgctggaatgtgcaaaattcaatgatgtgatcgagacagtttatgaagagacagcgccgcacaagctgtgtgcatatatttatgatctggccaacgcatttaataaattctatcatgagacaaagatcctttcagaggaagacgcagagaagaagaaaggttatatcgcgcttttgaaactgacaaaagaggttctggagagttgtatcgatctgcttggatttgaagcgccggagaggatgtaggatatgacggaaaaattgttttatctggacagtcatctgcagagattttctgcgcaggtagagcagtgtgtcccggatggagaaaactggcagatcgtgctggatcggactgccttttttccggaagggggaggacagtatgcggatacagggatacttggcagtgcgcgagtgctggatgtgcaggaaaaggatggtgtgatttttcacaggacagatgcgcctctttcggttggagactgtgtagagggaaggattgactgggatcttcgttttatgaagatgcagcagcataccggagagcatatcgtttccgggttggttcataaaaggtttgggtatcagaatgtgggattccatctgggaagtgaagactgcacgatggatttcaacggagagattaccaaagaggagattcgcgagattgaatgggaagccaatcgggcagtggtgcgaaatctggaagtggaagtgacctatccggatcagaaagtacttcagacgcttgtataccgcagtaagattgagattgaaggtcaggtacggatcgtgacgatcccggaatatgatgtgtgtgcgtgctgtgcgccgcatgtgaaacaaacaggggagatcgggcagatccgtctgacgggagtgcagcgttataaaggcggcgtccgtgtgaccatgctctgtggattccgtgcgttggaggattaccgcaggaaagcagagagtacagggtgtatttcttctgctctgtgtgtgaaagaagaagacgtggcgcagggggtagaaaaattaaaaaatgactgtacagaatggaagcaaagatatgcgcagttaaagcgagacatgcttgccattcgtgcagaaaggctggccgggcaatcggaggatgtgattgtgtttgcggatgatctggagggagaagagctgaggattctgatgaatcttgttctggatcatggcaaacggatctgtgcagcatttggcggagatgaggagcatggtttccgttatgtgatcggaagcagaatattggatatgagaccgcttgcaaaagaactgaatgagacatttcatggcagaggcggcggaaaaccggagatggttcagggcagtgtgcagggaaatgagagtgagatgagggcatggatacaggagaaagcgagggaaatgaatggatagaaattcagaaccggtgaaattctggcatgtatgtggtccgctcttattgtattgggtgattcagtttgttgcccggttagtggcagagcttgcagtaatgattccgcatatcggtcaggttatggattatgacgcactggaaaagagcactacgacagaagagatgaccgaggcgattatgagcagtgtgcagggaatgtacgagattgtgggtaaatatattatgccgattcttgcgttcagtgcgctttgtacgttgtttttgacggtaccgctgtttttgaaagaccggaagaaggaacgaatacttcataaacagtcagtgaaagttccgggagtcaagaagtatctggtcgttttcggactgggaagtgcattttgtatcggattaaattgtctgatgatgttgtctgccctggcgttgtcctccttagcgtacagcgatgtggatatgcagacgaatgtggtcgtgcagttgatttgtatggggatcatcgtgccggttgcggaagagttgatgttcagggggcttgtttttaaaagattccgtgaaaagagcacattctttagtgcggcgctgctttcgtctttgattttcggattgatgaacgggaatctgctgcaaatcctctatgtcggagcgatgggaatggtgcttgcctattcctatgagatttgtgggacgatcaaggtgccgatcctgcttcatattacagtaaatgtgatgggaattcttctgacagacagtgcactgggagcctggatccaaggtgatatcatgcgtcttggaggggcggttatagtcagcgcctttgtcggttcttccatgtatgtgcttttgagggggatgaagaagcaggaagtaccgcctgttgaataaagcttttaggaaaaagattacggtttacgccggtgggggtgaatcgtaatttttttgtttattaatatttaagaatttatacattgactttcaggagtcagagacgtataattcatacataacttaatcgacggaagttcttccggcagaggttataagttccatggatcgtaatgagatccagtcaagaaatcaagtgttaatttctaacagatttcagttattttaagtgttttataatgaatcatatatggcaatagtctgtagaagatacaggctcagttctgatattcctgtctgagaaaatcatttctatttttatcttacgatcttacagatttccggaatgcagaaaataattatcgatttaaactttcaaagtttaaataatacaacaatataaaatcggcaatatatgtgcagaaaaagaaaggaggaagtctgatgagaagagaaaaagatgaaaaaggctgaaattctataaaaatccggtaaaaagtaaacaaaatcatgaaaaagaatcaaaaggagtagaaaagtatgaaagcatttatggaagaatatggagtaatcgtagtagcagcaatcgtcatcatgatcattgtagtagcagcatcaccaatcggagacagcattaaaagcggaattatggaagcagtacagaaattgacgaacgcacttgcagatgcaaatggagtcagctaatgaaaatatccagggaagcatgggatttgaaagaggagtgcttcggaccgctgctcccatatgtaaaagatcagcaggttacagacatcaattataacgggactgatgtgtggatcgaacatttaaaatatgggattcgaaaagctccggtgaatctgacaccggagttcgcaggccgatttagcgttctgatttctaatattgtgagtgaacaaatcaataaatttaataatgttctggaagcggagacggacactctcaggatttcgatcattcatccaagcgtgacaaatacagggtattccatctctattcgaaaaacaccggcggttatgcgtatgacagaagaaaaaatgctggccgatggatactgttccagagaggtgcttctgtttctgagaaattgtatggaagcaaaattgaatatggtcttttgcgggtgtccgggagcaggaaaaacagaattgctgaaatttttaacacaatttataccgaagcacgaaaaggtgatgaccattgaagataaccttgagattcattatcgggatattaatccgggggcaaactgtgtggaactgaaagtagatgaagaatttttctcctatacgaaagcaatcaaatctgcacttcggcaaaatccgcaatgggtgcttctgtcagaagcgcgttctacagaagtgaagtatcttttagaatgcttttcgacaggtcttcacggactgacgacactacacacagatgatacgaggaagattcctgaccggattcagaatatgatgcaggattcttacgcggcatccagaatggaaaatgacatctatagttttttgaatgtaggaatattgctctgcaaaaaggcaaccggaaatggaaaggtctttcggtttgtcgatcagatctgcctgtttgacagaatcggagaagaaaaccgaaagtatctgatcgtggaaaatggaaaagtagtgtccagagaaatttctgagaatattagaaaaaaatttcaatgggcaggaataagatccccctttttgggagaaagtgaggggaaaatggtgtgcaggtaaaacaaaaaaagaaaaggcgaaaaaggcacatgtttcactattggaatccgaaactgctgaatctggagattcagcggtgtggatacacattcagtgcttcgtcctatgtgaaatatctgttggcggtctatctgggaattgcaggatttgcctatctttttcaactgcaggttttcttttcagtgattgtaatggcagcggcatcgatatttgtgccaacggtatttttaatgaattataaaaatctgtatgaagaaaagaagtttgaagatctgactgcctatatggaacagcttttatattcgtttaaacgcagggcaaagattttaacggcgctggaagatacaaaattattgttccgtcagggagagagccgtttatacaatggaatcgaatatgcagtagagcatatccagtccgcacaaagtgagggaaacatttatcaggaggcgttttcagaaattgaaaaagagtatggatgtaaaagattgtataagatccatgattttttgatgcaggtagagcagtcgggaggaagcccggatgcagcaattgagattttgctgaatgacagaaaaatgtggattgagaggatttatggtctgcagaaagaaaaaaagaatatcaaggtcaaggtaacgatcgggaccgggctgtcttttctgatctgtgccatgagtattctgatgctgccaaaagagtttgatatcacacagaatccaatttctcaggcggtcacgacaggagtggtgattctcaatatgctgatctggtatgcagcgcagaaaaaactttccggcagtctgatcttatcagatgaagatgtcgatgaagcggaaattcgagaaaaatataagtatgttgtgaagggaaaccgggaaaaggaaaggtttaaatatagtatcattggatgtatcttcggtgtgacggcgatcttactggggaatactgtggggatgacggcagcaggtgcggcgggtgcagcagcaatctggatgttgacgcaggagaagcgaaaatataaacatgccagaaaacgtgtattacgtgaggtggaaaaacaatttccggaatggctgatgaatctgtccctgcagcttcagacggataatgtgcatgtatctttaaagaagacaataccggacgcaccgtttatcttaaaacaggatttaacacgactggtagaagaaatcgaacagcagccgaatgcacttcagccgtatatccgctttatgagagagttccagattccggatgtgctttctgcaatgaagatcttgtattccatggcagaatttggaattagagatatgggagggcagattgatgcgctggtacagagaaataccgttatgatggatcgggcagagcgtttgaaggaagaagatctgatggcaggtgttgggtttcttgtactgcttccaatgatcacgggagtcgtaaaaatgctcgcagatctggtactggtcattttggggattttgtctgttgtaaatacaatttagaaggtttgagagaaaagagggcgatatcatgaaagaatttttggaagaatacggttcgatcatcgtaatttcaatcatcggatatgcggtcatgtccggtttatggaagattttaatacaggtaagttctgtttgagaaggagaatagcggaatgaaagaatttatggaagagtatggcggtgtgatcgtgacgtgtatactgggaatcatgctgcttggacttttgtattcgctgcttgcttcaggaggtcagctgcataggctggcagagctgttttttgacgggatagggataaaaatgtcaggagggcagatgtgaagagctggatcggagaatatggaaaaatcgcagcaatggcaattatcctggccgtattatttgcatttgtttggaatcgtactgatcatggatatctgggcgcgctttcaaaggcagagccaaaatcatttttaaaagcaaccgataattccgattttcttgtacagttgaaaccgagaccggatccggtcttgacggtatctgtcagtaaactgaagtatcaaagaagatatgaccttcttcatggaaaagaaatcagtgccagggctgtggacgcggatggaagagagcttccggtcagcgtgataaaactgatcgctccagatggaagtcagctggaaaaggaactaaatccagaggcgttttggacagcgcagagaggtgtttatgagattacttatcaggcagaggaaaactatcagggggcttatattagaaaagtaacaaaggtatgtcgggttacagtagattaaagtgaggttgaaaggaaaagaaaaatgaaaggtgcgatcgaaacaatggtgggagttgtactgattgccttcatggcagtgctgagtactgcctatatcagcgcatcgttgaatacacagaaggcacaggcttatcattctacagttgtaacagagattgaagcgagtgattataatgcagaggttctggagaaatgtaaaaagaaagcgctggaaaacggatatgaaaatctggatattcaggttgtgaccagtgcggcaggaagcaaatatgcaaaagtgacattggcataccggtacacgattccacttttgaatatgcttttggagcatcagatcacaggatatgcaaaatagaaaaaaggggaaaggagagtatgccaggaacggatgagacatgcagtgatgggattttttattttaattatgctgatttttgcaggagcatcgatttatacggcggagacaaagacgatgcatcagaatgagctggacagtattctgggagcagcaatggaagaatcgatggagattctgacagtgaatccgacatattcgatcgggaaagaggtggaaggaaaagagctggcagcagattttattcagaatatgctcatgcgaacaaccagcaaatcgacatttgaagtagagatactgacagcagatgcacagaaaggtttgctggatgtgcgggtgacggaatattatcggcagatatggggaaatggaaaggcggttgccagaaaaactgtgatattggatgatgtagaaggaaaagaagaggttttctctaagatatcattctggaaatcatacaaaaataataaagtcgaggaaaaacgtattgtaaagcaggtggtagttccggaggggattttgctgccaaaggaaatactgccggttgaaaatgaaagtggagatgagaaagtgaaaggctggagagctgtcggccagtcggaaaacaccatatatacaaaagaaaatatcgggacagtgcaggcgaaaggcgatatggattttgaagctgtttatgagaaaaccggcagtaaggcagattaaaaaggaaaaatattacaaaaatattaaaaagttattgctttttcatcacgtatcgaatataattcttattgtatgattaaacttggcgataataccacacaatcctttcaaaataccacaaactgtattgaaaaagtgcggaaaatcaggtattatgtagaatatgtggggacataaataagaatattaaggataggtgaaagtatgaaaatgaaaaaagtacgaagtgtactgcttgcggcagcattaacgtgttccatgatagttacacctgttatggcggcaccagatgatacaacaagtcttcagaatcagaaagaatcagctcagaatgaagtgaacggtcttcaggcacagctgaatgaattgtttacaaagacaaatgatctggaaacacagctgatcaacaaagggcaggagattaccaaggctcaggaagacctggctgtagcagaagagaaaaagcagcagcagtatgaagatatgaagcttcgtattaaatacatgtatgaggaaggcgatacttcagcattagaacgtattgtagcttccggaagtatctcagagatgcttactcagacggaatatgtggagaaagtacatacatatgaccgtgataagttgcgggaatatgcagagacagttcaggaagtagaagatctgaagacatctctggaatcagatatgacaaaattgcagaatctggatgaggagtacaagacacagacagcagagctgtcaagtacgattgagtccaagagagcagaagtgtctaacttggatgcaatgattcaggaagctgcaagagcggcagtagaagctgcgaaaaaggaacaggaaaagaacaacacggtaaataatgaaaataccaatacaccgtcaggcggtggagataatagcggtggaactgtaacgccggcaccagagccgacaccgacaccaactccggatccgacaccaactccgacaccgacaccaactccggatccgacaccaactccgacaccgacaccggaaccaaattacaatccgtctaccggaaatgcagtcgtggatcgtgcatacagctgggtaggaaaagcggaatatgtatggggagcatgcagtccgggagcgtttgactgttccggttttgtagcgtattgtctgactggcaattatgctcgtcttggtacaacgtatacattccttggatggccgcaggtaagcaacccgcagccgggagatgtggcagtaaatgcagagcattgtggaatctacatcggcggtggccagatgatccatgcagcagattatggaatcggtgttattgtaggaccggttcagagcggtatgatctacgttcgttactaaagaaaaattcatatacaaagtacaaaagaaaagccctgatggtcatcgtgtcatcagggctttaagattcttagatcagtttttggggaacaatttcaagccagtatccatccggatcagagatgaagtaaattcccattcccggattttcgtagcagatacatcccatttctttgtgctttttgtgagctgcatcgaaatcatccacttcaaacgcaagatggatctcattgtctcccaggttgtaagggcgatccatatcgcgcagccaggtcagctctaaaagatgtggagtagttccgtctccaaggtagaccagggtaaagcttccatcctcagcgtcttttctgcgaacttccgtcagatccagagcttctttgtaaaatgcaagagatttatccagatccagtacatttaaattgttgtgtgcaaatgtaaatttcatagagtacatcctttctttttcttttccatcagcataccatagaaagtccttgcaatccagtattttctatgatatactactagcgttgcgaaaaaacacgtatgcgtggtatcactgaaggtgcctaagtttgacgataagacaagccggtctcagtgtaaagaaagtatacggaagtaaaaaaccaatttggaggaaaaaacatgagcgttatttcaatgaaacaacttttagaagcaggtgttcatttcggacatcagacaagaagatggaaccctaaaatggctccatatatctacacagagagaaatggtatttacatcatcgacctgcagaaatctgtaggaatggttgacgatgcttacaaagcagtttctgatattgcagcagaaggcggcacaatccttttcgtaggaacaaagaaacaggctcaggatgcaatcaaaacagaagcagagcgttgtggaatgttctacgtaaacgagagatggttaggtggaatgctgacaaacttcaagacaatccagagccgtatcgcacgtctgaaagacatcgagagaatggcagaagacggaacatttgatgtacttcctaaaaaagaagtaatcgagctgaaaaaagagtgggaaaaactggagaagaaccttggcggaatcaaagaaatgaaaaagattccggatgcgatcttcatcgtagatcctaaaaaagaaagaatctgtgtacaggaagcacacactctgggaattccgctgatcggaatctgtgatacaaactgtgatccggaagaactggattacgtaatcccaggtaacgatgatgcgatcagagcagtaaaattaatcgtttccaaaatggctgatgctgttatcgaagcaaatcagggagcagcagaagatgcatattatgaggaagctgaagaagcagtagctgaagagactgtagaagcagaataattatgaacgtaaatgcttcagcctgaacatcaggttggagcatttttggtaaactatttcaattcatggaggaaaaaatcatggcaatcacagcaagcatggtaaaagagttaagagagatgacaggtgcaggaatgatggactgcaaaaaagctctgaatgaaacaaacggagatatggacgcagcaatcgagttcttaagaaagaacggacaggcaaaagctgagaaaaaagctggaagaattgcggcagaaggtatcgtaaaagctgttgttaaagacgacaaagtagcagcaatcgtagaagtaaactctgagacagatttcgttgctaagaacgaagaattccagggatttgtagatgcagttgtgaatcaggttgcagattctgatgcagctgacatggatgcatttatggcagaagcatgggcagctgatacaacaaagactgtaaaagatgctcttgttgaaaaagtagcagtaatcggagaaaacctgaacatcagaagatttgaaaagatcgtaacagacggatgtgttgtagattatatccacggcggcggacgtatcggtgttctga

SEQ ID NO: 6978 - DNA, 229 bp, Unknown
  gut microbiota DNA sequence
gggaacatcggactgcaattgactgggcagaagaaatcaaatatcttgccgatgtcatgtatccagatgtagaaaaaataattcttgtaatggataatcttaatacacataaaccagcatcattgtacaaacgttaccctgctgatgaagccagaagaatcatgaaacggttggagattcactacacaccaaaacatggcagctggcttgatattgcagaaatcgaact

SEQ ID NO: 6979 - DNA, 2607 bp, Unknown
  gut microbiota DNA sequence
gtaatgttaaatatcaacgatacatcacactagagcggacatcggacgctatgtccacacttacaactttgaacgatgtcattctgcccttgattataaaacactggctgaatgctactatccggcaatgattctgccttatgtagcttaatgcatatatgggtcaggcaaatgtgataccattctccctggttccttagtaactataaaccatatcagttcattataagaatcttagatttttgtcttgacaactaaaccactatagagtatatttgtgtgttaaaggaattaaatatgaacatcactgaaatagaaacatatcgaaaagctccatcacctgcaagttttttagcaatcgatgatgccaaagaaaaagaaattgatcggcaaattcaaaagttaaaaaatattaaaaccgtaatgcaagaaaagaaagagaaaattgttctttgtgaaactttataagatcaggaaatcagggttgaagtatgcaaagcagaaaaactattactttatccatataatttttcagaagatgatatatcaaaagccatttatcacttaaaagatacatggggaattgaacagatccggatgggaatgggaagttttatttctcttgataatgtgtataagacgaatttctacagatacgaaggactctatacaactactctgaacgcaaaaatgtcttcagattgttttacaaagtctggaagaaaatatctctgcagataccagaaaggtacttgggatagattgccggttctatatcaaaaaatgctggattatgccagaaaaataatttacagcttaatggttatgcttatgaagcaggattaaatgattttgtaatctctgacgaagaggattatataactaagatcatgattaagattgatgaaatttcatgatggatgattatgtgtgaatttgaaacaaaacaaaagaagtgtgctatactattgttcagcaaaaatcttattgacatatttcgaattatttaggaggataaacgtttatgtgtacagcagcaacttataaaacaaaagatttttattttggaagaacactcgattatgaattctcttatggtgatcagatagtaattacaccacgtaattattcgtttcactttcgtcatgttggtgatatggaacatcattatgcaattattggaatggcccatgtagcagaggattatcctttgtactatgatgcgatgaatgaaaaaggagtagcaatggcaggattgaattttgtcggaaatgctgcttattctgaggttcagtctaatgtggaaaatattgcacagtttgaatttatttcgtggattttaagtcagtgtgcttctttagtagaagttcgtgagcttcttgatcgaattaatattgttaatactcctttcagtgaacaactgccattagcacaattgcattggattatctctgatgaaaatgaatcaattactgtagaatctatgtcagatggtctgcatatttatgataatccggtaggagtgcttacgaataatccgccatttccacaacagatgtttcaattaaacaattatatgtatttatccccaaagcaaccagaaaacactttttgcgaaaatttggctcttgatgcatatagtagaggtatgggtggattaggtcttccgggagatctttcatcttcctctcgttttgtgcgtgtagcttttacaaaagtaaatgcaatttcaggtgaatcagaggcagaaagtgttagtcagttcttccatattcttggatctgtggatcagcaacgtggatgttgtgaggtggctgatggaaaatgtgaaatcactttgtatacgtcttgttgtaatgtggcaaaaggtatctattattataatacttatgaaaatcatcagatcagtgcagtagatatgcatgtggaaaatctggataataacaaattgatttgttatccggtaattcaaggagaacgaatcaattatcaaaataaatagtattataatggtctcataaattaagacactttttcggaaattttttaatgaatctgatatactaaaatcagtatgaaagagaggattcataattatgtccagacaaagaagaaactttagtgccaaatttaaatctgacctagtaatctagtgtgctgtatcgttgatatttaacattactactgcatcttattcagatgcagtagtaaatgtcggatacaaggaattcaatttaattcttgcatcctccgttcgaaattgccagtttacctttgcggctacggtatttcgttcaacttcccatgctgataattccttacgaagatttgaaatattatcaatccttctgttcaaacattgtctggtcatgacgttaagttcgatttctgcaatatcaagccagctgccatgttttggtgtgtagtgaatctccaaccgtttcatgattcttctggcttcatcagcagggtaacgtttgtacaatgatgctagtttatgtgtattaagattatccattacaagaattattttttctacatctggatacatgacatcggcaagatatttgatttcttctgcccagtcaattgcagtccgatgttccc

SEQ ID NO: 6980 - DNA, 15958 bp, Unknown
  gut microbiota DNA sequence
ctctacatgatgctcttttgcaagtgctcttgcctgttccagtgtctccacttcgttccagtccacacctgcatattttttcactgcatctaccattgtgattctctcaaacggttttcctaaatccatctgcacaccgttgtactcgatcacagttgttccaagtacttcctgtgcaacgtgacggtacagattctctgtcagatccatcattccgttatagtctgtatacgcctggtacagctccatcaatgtaaattccggattatgtcttgtgtcaagaccttcgttacggaatacacgtccgatctcgtatacgcgctccattcctccgacaatcagtctcttcaagtacagctcaagagagatgcggagtttgaaatcttcatccagtgcgttgaagtgtgtttcgaacggtcttgcagcagcacctccggcattggatacgagcatcggtgtctctacttccaggaatccctgtccgtccagatatcttctgatcgcgcttaaaatcttagagcggttgataaatgtctgttttacatccggattcatgatcagatccacgtatctctgacggtagcggatatctgtatttgtcagtccgtggaacttctccggcagaatctgaagactcttggagagcaatgtcacggaagaagcgtggatggatttttctcctgtctttgtctcaaacacttctcctgtgattccgatcacatcgccgacatccatcttcttaaactctttgtaagcttcttctccgatgctgtctcttgcaacgtaagactgaatatttccctgcaaatcctgtacattgcagaaagatgcttttcccatcacacgtttggacatcatacgtcctgcgatagaaacttcttttcctgcaagctcttcaaaattctctttgatctccagactgtgatgtgtctggtcatattttgtgatcacaaacggatcttttccgtttgcctgtaaatccgccagtttttcgcggcgaacttttctcaactgatttaaatctggttcctgctgtgcttttttctgctgttcggacacgatattttctccttccttttcaggcatccggtacacttttatgtgttccctaaatgcgaattaagaccccttgtaataaaggggtctggtttctactacatagaacggctgatatcaagtactttgtactggatcactcctgcctgtgtttctacatctacagtatctccgacttttttacccatcagagcctgaccaaccggcgactcattggaaatctttccttccaggctgttcacctctgtagaacctacaatgttgaattccatctcttcgtcaaatgtgatgtcaaatacttttactttacatcctacattgatcttgtctaaatcaacttcatcctctactacaacttctgcgtttttcaaaatgccttccagctcttcgatacgggcttcgatatctctctgctcatcttttgccgcatcgtattctgcgttctctgaaaggtctccctgctctctggcttctttgatctttcctgccacttctttacgttttacaactttcagattttccagttcatcctccagcgctttcaatcctgcataagtaagtaatctcttctttgcctctgccatacctgtctgcttcctttctttcctgatcttgctcttttatttaaaactttatcttcggctttttcctgtatttacaggacatttctgcctgtccatatctctaattcaagtatatttcacaatttcaatattatactcaatcgttataacgatgtcaagagattttccagttctgcatagctctcaacctgattgatctgatcccgcagacgggctgccccatgcagtccttttgtataccatgccacatgttttcgcatctcccggattcctgtaaaatcacctttatactcgatctggagtctggcatgccgaagcattgtctgcttgatttcttccacatccggtctgtcaggaagccgtcctgttctttcatattctaaaagctccgaaaagatccatggattcccctgagcacctctggcgatcatcaccccgtcacacccggtctgctcacgcatggcgattgctttttccccggaagtcacatctccgtttccgatcaccgggatggaaactgcctcttttacctgacggatgatctcccagtccgcttttccggaataatactgttctcttgttcttccgtgtacggctactgctgccgcacctgcttcttcaatgatcttcgcgatttccaccgcattgatatgttcatcatcgaaccctttccggatcttaacggtaaccggctttttgattgcttttaccgtcgcactgaccagttcgtataccagcttcggattcttcatcagtgcagacccttctccgtttcgcacgacctttggcaccggacatcccatgttgatatccagaatggaaaacggacgttcctcgacccgtttcgccatctcgctgacgatcttcggatctgaaccaaaaaactgcagcgataccggcacttcctcgggatgaatctgaagcagactttccgtattcttattattatagaaaataccttttgcactgaccatctccatacacagaagacccgctccctgctccttgcaaagcaagcgaaatggcaggtctgttacgcctgccataggtccgagtacataagaattttccagtaaaacatttcctattttcaactgtttcattttcacactctaactctttctctcgtttcttttctcaggatctgtactctactcttcttccagatcaacctcttctcccagataaaacaccttataaaacaattccagtgactcgaacagctcctgttttgtctgctgcagctgtttgatcttcaaaacactgccgatctcatcaaacgaaaaatcattctcctcgtgatctacccgaaactccagatttccatcctcatcatagaaaaccatcaagatcccgcctacatcttctgtgtagagtacacacataatattcaattcctgcttgatactttcaggcagcatttcaaactcgggattcagatagtatttctgctcataagagttcgccgcacaaagcacaatttcttcttccattttcagtttcctttcttatatgactaaacatatccgtaaataccgcgcacggaaacttctcccgcatagaccgctgtttcacttccatccgcttttcttacaagcagctcaccaccgttattgattccaagagcttctgcctgccattctccctttggctccagaacccggacctcacgtccgcaattcacaagcaattcattgtatgctttttggattcccgaaagatcttccgttttcatgaattcggcatatgctttttcaaaccaccgcataattgctgcaatgagtggactgcgtctgatactgtgtcctgcttcaatccgaagtgatgtggcagtctgctttagttcttccggaaattgttcaatattagtattgatcccgattccaatgacaacataattgatataatcaatctctgtgctcatttccgtcaggattccgcagatttttttcccgttgataaccagatcattgggccacttaatctgtacatccagacccgtacattcccgaagcgccattgcagccgcatatgccataaccagagtcaacatgggtgctttgaccggtgcgatctccggacgcaaaagaagtgacatataaatattctgatccgccggagactcccaggttcttcctcttctgccttttccggcagtctgctgtcctgctgctgccagagttccgtgaggcgccccctgatctcccattcttttcgcctgaatattggtggaatctgtttctgtaaaataatacacgttttgtcctgcccagacagtatctatctgactgacgatctcctcccgggagagaatatccggaagagaagagaggcgataccctctgttgcgtaccgcttccacttcatacccttcctctttcagttgtttgatcaccttccagactgcagttctggatacctggaaccgctcacagatctgctgcccggaaacatagtcctgactctcccgcagcatttttaaaatttccgctttcaattacatctctcccagtgtcgctgccatcacagctttgatcgtatgcatccggttttctgcttcatcaaatactttggactgtgcggattcaaatacttcatccgtcacttccatatctgtaatgccaaaccgttctcccatctcttttccgatctttgtcttcagatcatggaatgccggcaggcagtgtaaaaagatcgcagactcttttgcatttgccatcacttcttttgtcactttatatggagacaattcacggattctctcttcccagacttcatccggctctcccatagatacccagacatcggtatagataacatccgcatcctttgttccttcttctacattctctgtcagtgtgatcgttgctcctgactcttttgcatatccgcggcatgtctctaccagttcctcattcgggaaatacttttctgttgtacaagccacaaaatccagtcccaacttcgcgcaggcgatcatcagagaatttcccatgttatatcttgcatcacccatgtacaccagtttcagaccttttaaagtaccgaaattctcacggatcgtgagcatatctgccagcatctgtgtcggatgatattcattggtcagaccgttccataccggaaccccggcatattttgcaagttcctccacgatctcctgtccatatccgcggtattcgattccatcatacattcttcccagtactcttgcagtatcctcgatactttccttctttccgatctgagaaccggtcggatccagataggtagaacccatgcccagatcatgtgccgcaacttcaaatgcacagcgtgttcttgtactggtcttctcaaagatcagtgcaatatttttgcccctgtagaaatcaaccggctggccgtttttcttcttctctttcagatctgctgccagattcagaagatatgtgatctcttccggtgtaaaatctttgagtgtcaaaaaatttcttccttttaagttcatagttctgttcctttctatctgaatcaatgtgtgtgtaaatctcggaagatgcatctgatcttccagtttctcataatgttcctgtaccagatcacggagctgatccacagtatagatctgatatttgggaatgcgaagcagcttggcgcttgcttccagcattgccagatacagctctttggcagaacacccaatgggaagcttcagtacaaatgccatctcggctttctccagatccggaatctcgcataatctgtcttcataccacgtctcctcatgggtctgctccagataatatataactccttccagaccatagagcatccgttttgcatcataatacccgatcttcagattctgccggcttcttttgctgtcaaattccagaatacttcccagccgcactctcgggctgatctcatgaacctcaccgtcttccggaatatttgccctgggctctcttcccggtccatggatccggatggtaataatatccttatacccacggtttaacagggagttcaacggaacattgttgatcacgcctccgtcaatataacgctttccctgcaacctttcatttttaaatccaagcagataagcactggcaagcaaaaaatcttccagagcgccttcaggaatatcttccagcgaaagatccagctctttcatatccgtcacagaaaatgtcagaagacagaactcctttcccgaatgtcggattttctcttcatccaccatttcgtggatcagatttcgaagcggggtaatatccacacctccatctgaaagttttttccagagttcagaaaatacttcctttatttttccatctttgctgaacagatgctgcatccactcatcatccacatccatgactctggaaaacttcatctctgcccagatcttctgtgcattctccacactgtccatgcagatcagagcaccgtttaatgctcctacagaagtccctgccaccgcgcagaccttcacgcctgcttcctcaagcgctgtccacgcaccgatctgataggctcctcttgccccgccgccatccagcaccagaccatattcttttgtcagatctaacaatggttccatactatcacccctgtcaatttctgaaaacgtgttatcctctccgctgtctgctgacttcaaacatcagaactgttgctgccaccgccgcatttaatgactccacctgtccacacatcgggattcggatccaagtgtcggcacactgtgcgatctcttctctgagcccatttccttcatttccaatcaggaaagcagttccctgtctatagtcttctttatcataggtatttttcccatccagatgtgccgcatagcttttgatattctgttctttcaacgtgtggatcgtctctttcagatcatccacatacaaaaacggcatccggtaaagtgctcccatggtggagcggatcgtctttgggttgtaaatatccacgcaatcccggctcattatgatacctgtcactccggcagcctccgctgttcgaaagattgttcccagattgcccggatcctgcagattgtctaagatcatcaaatgcggaatagctccctctgtcatctgacccaaagtatattccatctgatgcacaactgccagtactccctgcggcgtcttggtatcagacacataagaaaataccgcatcagacaagatttccgtctttttgcggatctgctcccggacttttaagtctccccctgaaatcacatccagcacttcttttccatactttttttcaaaactctccgaaaagtacagacctaccaggcgctcatgaggtgtttctctgaccatgcggattccttccgcaataaagattccttcgcggctgcgtattttactttttttctgtatttgagataattcttttactctttgattacttgtacttgtgatcatctttcttacttccatgtatgaaatttttccaaaaccgaagtggctccgatcagaatcagaatcgctccctccggaagcggctcatacggatccagtgtaacatccacctgcactccctgaatgattccaaccacattgatcccgtactgctcacggatcttcaattcgcttaagcttcttccgacccatttttccggaatcaccacttctgccatgctgtattcggaggacaattcgatccagtctgcaaatgccgtggacatcaggctttttgccacccgttcccccatatcgcactctggataggcaatggcatctgcccccaccttttcgaggattgcgccctgcagctcatctttcgcctttgcgagcacatacgggattcccatctctttggagataatcgtggccataatgctcgcttccagactttcagagactgcaacgactgctccgtccagatttcttcctcccagtgcatgaagtgcatcaggatccgatacatccgcccgcatcgcataagagaccatatctgaaatctcctggatcttttcatatgatttatctactaccactacatcgcatcccagattttccagtgtcagggcaacactccgcccaaaacttcccaatccgaacactgcaaattgttttttcatgtctttctaccccttctatcctaacataatccgtttttccggcaaatccctgaattttgcctgcatatcttctcttccggcaaataccagcgccatggtgatcggcccgattcgccccacatacatgaggatcatcaggatcacatgactgcctcttgtcagcgacggcgtcagatctgcggaaagtcccaccgttccgatcgcggaggtcgcctcgtacatcaagtcgataaaccgctcatcaggctctaaaacagcaagtccgaacagacctgtcagccagattgcaaatgtaagaaatacaatcgcaatcccggaacgtacattggattctgcaagccgtcttccgaaacactccgttgattttcttccccggatcactgcagcacaggtgagcagcaagatggccattgtcgtcgtcttgataccgcccgccgtacctcccggagaacctccgataaacatcagaatacatccaaacaacttggatgccgaagtcagttctgcctgagaaactgtagcaaatccagctgttctcgtcgtcacggactgaaatccggatgccagaagcttttcaccaaatccaagctttccgatggttgcatcattgtgatactccagcagaaaatatcccagcgttcctatcatgatcaatcccgctgtcatgacgatcaccatcttggactgaagatgcaatctcgtaaacaagcgttttaaggggcgtttctgtcctgccacatcctgcaggttcattcgcacatcatgccagactgtgaatccgagtcctcccgcaacgatcaaaaacatcgtagtcagactgacaagaggtgagcttacatactccataaagctggaagtgccaagcacgtcaattcctgcattacaaaatgcagaaacagaatgaaaaatcccgtatgctacacctttgataaatccatactcaggaacaaaatgaaacgcaaataacaccgctccgatgccctctacaagaactgttcccttcagaatccggataataaaccgtaccattccgctcaacgtctccagattgtatgtctgctggatcataaccctgctcttcatggtgatcttcttgcgaattgccagaaataccgccatcgtacatgcgatgacacccagtcctccgatctggatcagccccagcagtactacctttccaaacaaggtaaactgtgcagccggaaatacagtgaccagccctgtcacacacacggccgaaaccgatacgaacagtgcgtccagatacgcaatcggctcctgattactgatcggaagatataacaggatacttccgagaaaaatcactcctaaaaatccaaacgcaatgatctgcatcgtgttaaatgttactttttttcttttttcctgaactttactgtgcacattctgccaatctgttttcatctttttacaccttaaaccggtatcctactccccatattgtctctatatactgcggatgtgatgtatcatattcaatcttttctctgattttcttaatatgcaccgtcacagtcgcaatatcccctacagattccatatcccagatttcccggaacaactcttcttttgtatatacatgattcggatgtcctgcaaggaacgttaaaagatcaaattcttttgtcgtaaaggaacgttcttctccattcacccacacccttctcgctgtcgtatcgatcttcagaccacggatctcgatcacatcattttcttctacattgcttccgatcagacgctcatagcgggacaaatgcgccttcactcttgccaccagctcactcgggctgaatggctttgtcatataatcgtctgctcccagtccgagaccacggatcttgtcaatgtcatccttctttgcagataccataatgatcggtgtatttttctgactccgcacttcacggcagatttcaaacccatccactcccggaagcatcagatccagaatgatcagatcaaactcctctttcattgccttgttaagccctgtctctccgtcatttgccacttctacctgaaatccgctcaactccagatagtcccgctctaaatctgcaatactttcctcatcttctacaatcaatattcgtttactcattcattggtacctcctgatattttctgattacaaagtacatggttgtcccgacgccctcttcactggtagcccagatctttccgccatgctcttctacaatttttttcacgatcgaaagcccgatcccgcttccgcctttggaagaattccgtgacgcatctgtccggtaaaaccggtcaaatatattcggaagatctttcgccgcaatcccttttccgttgtctcccagttcaatctgaacaaaatctcctacatcctttaaatccatggtaatggaaggatctgacttatccatatattttacagaattccctacaatattgctgatcactcttcgaagctgctccggatccacaatcaccttagaatctgtctccagataatttctataccgaaactgtacgccctttgcctccagttccataaacaaatcctctgcacagtcaccaaaatactgctttgctgaaatcgtcgtaaaattatacggaatacggttcgtatcgatcttggaatagaatgtcagttcattgatcagaagatccatttcattcgccttattgtagatggtcttgatatatctgtccatcttctccggagtgtctgcaactccatccataattccttccacataacctttgatagccgtgatcggtgtcttcagatcatgggaaatattactgatcaattctttgttctctttatcgtatgccaccttttcttctgcgtttgccttcagtctcaaacgcatctcttcaaaatcctgacagagctgtccgatttcatcattggtctcattcttaatttcaaaatccagattgccctctttgatattgcgggccgctgcctgcagttttgcaagcggcagtgaaaccgtcctgtaaatccagaagatcagagctgatgccgtgcaaaatacaatgatcagatataattcctgaatatcattcaccgcttttggcgcaaatgccgtcatcgctacagttgtaaacaatgtaggcagaatcatcacgatcataaacgcaagaatcagcttggtttttaatttcatcttcatcgcctcccatcctgcatgctctaatacagaaaagaggacagtccctggtgcaggtccctgtccttcttttttattttccgcacctctttcgtattactataaaccaaaagaggcattccgtctactgttataaatattttttcaatacttctgctttgtccagtttttcccacggaagattcagatcgtttcttccaaagtgtccgtaagaagaagtctgtttgtagatcggacgtcttaaatccagcattttgatgattcctgccggacgaagatcaaagttctcacgcacgatctccaccagtttttcttcggatacttttcctgttccgaatgtatctaccataatggaagtcggctgagcaacaccgatcgcataagaaagctgaatttcgcacttgtcagccagtcctgctgccacaatgttctttgctgcataacgtgctgcatatgccgcagaacggtctacctttgtacagtcttttccggagaatgccccgccgccgtgacgtgccattccgccgtaagtatctacaataatctttcttcctgtcagaccgctgtctccgtgtggtccgccgatcacaaaacggcctgtcggattgatgaagaattttgtatgttcatctaccatctcagccgggatgatctcgtcaaatacatatttcttgatatctgcgtggatctgttcctgtgtcacatccggatcatgctgtgtagaaagtaccactgcatccagacgtttcggagttccattctcatcatactctactgttacctgtgtctttccgtccggacgcaggtaagagagcgttccgtccttgcgcacttttgtcagctgaagggcaagtttgtgtgccattgcgatcggatacggcataaattctgctgtttcgttggatgcatatccaaacatcataccctgatctcctgctccgattgcttccagttcattatcggacattttattttcttttgcttccaatgccttgtctacaccaagtgcaatatctgccgactgctcatcgatcgttgtcagcacgctgcatgtatctgcatcaaatccgaactttcctcttgtgtatccgatctcacgcactgtatctcttacaattctcggaatatctacatatgcttttgttgtaatctctcccatgaccatgaccataccggttgtcacgcaagtctcacatgcaacacggctcatcggatcctgctccatcaaagcgtccaggatcgcatctgaaatcgcatcacagatcttatccggatgtccctctgtaacagattccgatgtaaataataatttttccattttgttcctccttctttgtttctttctctcttttcggactgcatctcttctaataaaaacagcccgccaaaaagcggactgttctttaccaaaacaatcctcttattgttcgattgctcgctcaggttggcaccttccttgacggggttgccgcagcttcataggtcctttgtacctccactgctctgaataagagaaagtttgcatcattcatttgtaacaataggactttacaccgtattgcctgaaatgtcaatatcatttctattttttcctgaaaattttacagatcacgatcactataataagaagggatactcctgccacgatcaaaagcagcgtcagcccttgcccggattcatcaccggtctggataatcccattattttgacctgcatccggatcagagggactgacacttacgatttcgtccccatcctgctgtgcgctaaaataccatttcacaggaaactctctgcctgccacttcatttcccagtgacgtcgggactttcagcactgctttcagttggattgacgtcttatcggaaacggttcccaacttcacattttccaggatcagtccattttcaacgacaagccggtcattcgcatagagatccattctcacatcttttaaaatctcccgcgtctcatcgtcacactctgctctcaaatagaaacttgtttcatgcgtaatatttttggctttcaggatcatctcctgttcacgcacatcgcccggcatcagatttttgaacccctgaaacagatcggttccatcggtgtttttaaaagtaatgctttgctcttttccatgataactcacttcaggaactgcatttttgccagaagcggactgtatggaagcatgtacagacatcggctgcatgaccagctgcatcagcactgcaaacagcataacactcacagccacttttttctttgggaatacggtcttttggaagattccaatcttgttccgtctctttttcctcatctttatcttcctctctttctgcccgcttaattctgctgtttcagctcaagcgttccgtctgctttcaccgaaacctgactttcccacgcatcttccaccgcagtagtcggttctgcctgaatggcctccgcaagaatgtcaacaacaagatgacgattctctttttctgtttcccgacattcttgaatcagcacatctgttgcatcaccactctttaccggagctgcgtaataataatatccattgctgcttttcagccattgcgcgctgtctccccagtctatctgatagtccattccttctgccggaacttctccaacaatatttccttcgttgtcttcatagtaaatcagaatctttgcccggagatattcgtcaactgttcctgtatttttcaagaatacattactctttacagccccatcaaaattctcctgcacttccgtttccacaattcctgtttcaaatgtgttcacaagttttgcttcgcgctgtaagtatgcaactgcacccacaacgaaaacacaagcaatcagaacgatactgagaacggccactccgactcgttcctgaagccggagtctgtttttctttttttgtctttttctatctgccatgatcaatttcctcctgcctgtacttcactgccgaatacatttttcatttcacagaaatcagagaaccatttttcattctgtcttgcattaccatatacaatgatttcagactgcaagatatcaatcgtcacatctgtcgttccactctgatcaaaacctgtctgtgcctgaccattcagcatcacactgtctgcctgatctcgccatgcccaggtcatgtcttctgaaactcgatagtttccaagcggcagtttcacttctgtcctgccttctccgtctttcactgcaagcggcacactaaataaagctccatccggatttccggagtcatccagcttctgaacatttacaagtaccattccgtctgttttcaatccaatataagacttgcgaacaaccagacgtccatacagcttatgtactgccataccattctcatctgtcagaacgcttccctcactggcgcttacatacgttggattgccctctttatccggctcacctgacatgtatacattggttcgaataccctggattcccttcttcattatatctggcgtgtcatgctgacctgcaacttcttccactgcaatcttgatttcaggctgtgtatattttttggtaaatagtgtattcagctctcttgttccatcttcaccttcactcacagaatagaccataccgtcatacacactctcttctgagtctaaaaacgtaattgcatatgccaccggatataaattcatagactgcgtaacctctgtgtctttaaactcttcccagctcacatatttttgtttcgcctcgttccaccagcgccactcaacgaatttcaggttcgtgccacttgcttcctgtatctcttttatcttttcttcaatctgtacaaatgcttctgtatcgatcggaacttctttctttggatcctcaggatctttgctcacaaatgtccgattctcatcggctgtcgtctttgctgtgtagataatatttccgttaaaatcataataattgatatctatcgactgtgcatatactgctgtgtattttccatttgcaaacagttcagactccggaatcagatatgtactctcttccgtcagtaatgttccaggattttcatcagatacatatccggtgtaccatcctttaaacgcatagcctgcatactcttttgctacaagagaaaatacattgtgatcattttgtacataacgcacggttgccggatctccaccgttctcctgaatagtctggtcaatattactgtttacctctgcagaaacctgaacaaataccggccacagatccatggaatgctcgacagtcgttttctcgtttacaagtggaagcggcgtctgatcatatgcttcttttgaagcatagtagtgataccatccattcggcttctcttccgtccagccaatcatatatgcattcttaagttcttctggcattctgtcgtaatttatttccggcatcagtcctaacggctgtcctacatttcttgtctccagatgcgtactgtcttccaggccctgaccatccatatgatatacaacgaaagccggattataaatagacataaatgtatacgattttcccgcttctacggtcatctggaaggtgtagctatttccatttggagtacctgttccccacagatctgtaacctttccgtctgataaggtacacttgaatccgacaagttcatatttcgcatcttcgccttctcttaccggagtaacatttgtctctgcggtcaatgttattgttgcagttccttttcctgtattttcatccattaccaactcatatgacggtacatttggatactgaactccgtttggaagttctgccatctgatgaatattcgttgtcgtcttgatgtcatattttacatataccggataaagttccattgtctccgtaacaactgcatcatccttaagaagatatggcaatgccttgtctgcatcagaagtacaatacgggtcattttctacatcgtagatataattccactctgcaccgccttttacaatacctccgttttcctgtgaattaacctcttttgcctggatccatccgaggaattcatatgtaacacctgcttc

SEQ ID NO: 6981 - DNA, 68205 bp, Unknown
  gut microbiota DNA sequence
caaatatggattttctatttatcttctgatcatcattgcttcataaggtctgagcaccccagtctctcctttttccttataattccagatcagtacctctccgtctttccattcactcaaaagatcgcacgctgccggtgtttcactgaaatttgcacataccatgacttctgtatcgccttcttttcttatataggcaaacacctgcggatcctcttccatcaaaagtgtaaactctccgtttacaaacacggaatgttcttttctcagccggatcagcttctgataatagtagaatacagaatcgggatcggatagttccgactcggcattgatcttcgtataattcggattcacttccaaccatggggttccctttgtaaatcctgcattcacctcaccactccactgcatcggcgttcttgcattgtccctgccctttgcataaatggagttcatgatttcttccttgctgtatccttcatccagacgctctttgtacatattcagtgtctcaatatcctgatactggctgatatctgcaaagcgcacatttgtcatacccagttcttctccctgatagatataaggagttccctgcattccatgcagcaaggtagcaagcatctttgcagattccacgcggtatttctgatcatttccccaacgggacacgattcttggcagatcgtgattgttccagaacagactgttccatccacatccgtgcagttctctctgccattttgcaagcacctgttttaatttcactactggaagcggcgccacatcccatttcgactttccttcctgctgatccagaccaatatgctcgaactggaacaccatagaaaactcgcttccatccggattgctgtacaatttggcgcgttcaatatctgcgccccatgcctctcctactgtgatcagatctcccttttggaatgtttccctgctcagttcctgaataaactcatggagtctcggtccgttgtttgtgatcttttgatccggctccttggcaatctgatcgatcacatccagacggaatccacccgctcctttttccatccaccagaggatcatatcatagatctcacggcgcacttttggattctcccagttcagatccggctgttttaccgaaaactggtgaaaatagtactgttccagttccggcacccattcccaggcaggtcccccaaatacggatctcatatcattcggatacacgccctctttcccatctctccagacataatagtcatggtacgggttatccttgcttttctttgcctcctgaaaccagcgatgctcatcagaagaatggtttaacacaagatccatgataatccggatatttctctttttggcttcttttatcagctcttccatgtcatccagacttccgaacataggatcgatatcctgataatcagagatgtcatatccattgtcatcctgcggggatttgcagaccggagacagccagatcgcatcgattcccagctcttttaaataatccagtctctgaatgatccctcgcagatctccgatcccatctccattgctgtcctgaaagctgcgtggataaatctgatagatcaccgcatccctccaccagtgttcttttcttgtcccttccattgacgttctcctttatttctttcttctgatcaaagttccgtttttcttcaatacaccctgctcaaatctgcgggaaaacaaaacttctccctcttcttttactgataccgattcctcagaacagtttaagagtacttccagctgattgccgtcctgatccagtttgatatactccacaagacgtctcttctcatactcattcggaaaatggaaatacagacttttgcaggctgcttcctgtttccgcattgcgatcagcttttgcatgatctggattttttcctggttttcggatgaatccagttcctgccacggcatacatctgcggcagtccggatcaaaaccgccttccattgcaatctctgttccataataaatgcaggcacttcccggcattgtaaacaacacggcaagctgctggtaaaacagatccagatcatcaaaccgactcatcaaacgctgcgtgtcatgagaatccagaagattgaacatcacattgttgctctgctgcatatacatcgtataacagcggttcaccatatactcaaattcttctttttccattccccgatctaagaagaaatcatggattccgctcatcagaggatagttcattacagaatcgtactcatctcccagaagccactgacttgcatcatgccagatttcacccagtaagtacagatccggtttcatctgttttaaatgctcccggatttttttcagaaaacggtgggaaacttcatttcccacgtcaaaccggattccgtcaatatcgaatttgcggatccagtcttcgcatattttacagaagtattgaattacttcttcgttatttgtattcagctttggcattccatcagtaaatgcaaatgaataaaaccgtccgtctctcgtatctgcccgtttttcgactgtttcccagtcatggatcataaaccagtctgcatacgcagatttttcttttttctccagaacatccagccatggtgcaaactttcttccacaatgattgaacacagcatccaccatgatccgaatcccatgctgatgtgcctcttctaccagatctttaaattcttcctccgttccaaaatgaggatcgatcaccgtataatctgtggtgtcatatttgtggttggattctgctttcataatgggattcaggtagattcccgtgattccgagcccttccagataaggaattttttcccggattccatttaaatttccgccaaacctctcttcattggtcacagtaccagtgcgccacttcgtcacaccggcctcttccttcgtatctgctcccctgcagaaccggtccggaaaaatctgataccatactgtctcgttgacccagtctggtgtcacattaatatccgcaggattcatccacggtacggtaaagcactgcagcatccttccgtccatctgcatctgttcttctgtcagaaatccatcctcaaaataataccagacttcttcctctgtatgtaattcaaaataatatttgcagcgtttatactttggaaccaatgtcgttgtccaccagagctggtgacgcaaacgtttcttaaaacagatttcctctctctttccggtccatttctcgtttccgccaaggattcccgattcaaacggatctccataatgaatgaatacccgtctgacatcatatcctgttcttaagtttacgatcagctcattttcatttaacgcataactcatctgttctgatgttttatgaaaaattccagcaaattgcatgttgtctctcctttagttccggaatgtgatcagatttttatatcgtttcagttctttcccggcaagtgtaaagtccggcattctccactcccagttcggagaaccgactgtccccggtgtattcagatgcccttcttttccctgccctaaaatatccgccatcggaatgatcgcatattctgccttgctctttaatgtataagcaagcagacggtctttgacacttccctgcctgattccctcacgtgtgagaaatctgcgcactttacgcttcgccgcgcaggtcagattatgataccactccatcaaagtatcattgtcatgcgttcctgtatacacgatcatattttctacatcgcggaagctgtcatatgcatattttccttttgtctcaatcgaaaatacaaggatcttcatgcctttcagatgatagtgatccttcaattccagtacttccggtctgagatctcccagatcttccgccaccagatttacacccgggatcttctctttgagcgtgtcaatcacttcatatcccggcgcctcaatccactcgccttccacagctgtcggacaacttgccggaattttccagaaggtgtcaaacgcccggaagtgatcgatccggataatgtcaaacagcttgctgctgtatccgatccggtccacccagaactgatagttgttttcttttaaatattcccagttgtagattggattgccccatctctgaccggtcgcactgaaataatccggcggaactcctgcaataaagatcggccttccgtctgtatccagaaggaaattgtcttttgctgcccacacgtccacagaatctacccccacataaaacggcacatctcccatgatctgaatatcatacgcattggccttttctttcagtttcatccactgactgaaaaatacatactgtaaaaacatatgatactgcacttctgtttctaactcaggcgccaaatccgttctcgcatccggccacattttatcttcctgtttccattcattccagcagcatcccccgtttgcctttttcagcgcacggaaagcaccatattcatatacccagctctgatctgcaaactcctgatagtcttttgtctcacagccgccacttgtaagaaatgtctgaaaagcttctcttaaataaggctctttgtgcagacgcacagcatcataatcgactttcgtcgcatattcgtgaaacccttctggtctttcttttaacagcccttcctcatacagcgtatccaaactgatatataactcatcccctgcacaggaagaatatggctgatacggggagtttccgtatcctaccggattcatcggcaaaatctgccagatctttataccgctttcttttaacaatgtcagaaaatgatatgcttctgcccccatctctcccactcccgttcgagacgggagggaagatacaggcatcaaaattcctgtttttctcattttactctctcctttggcttttgccatatcctacagatgccagatgtctctgttatactctgcaatcgttctgtcggaagagaaaaatccggctttggcaatgttcaccagcatttttttctcccacgctttttcatcttcataatcagaaagcatctgctcttttgttctgatataatctttcacatccaaaagtgccatgaaccagtctttgcctacgatttctttgtacagacgtcccaggttcaccggatctccgatgcggatcaaatctttactgataataaagtctaccagctcttctaccatcggatcgttttcgtaaatatctttcgaacagtattctcctgtttcatacagcttgatgatcttttcagatttttctccgaaaatgtaaatattgtcatcgccgacaagctgatggatctccacatttgctccgtcttctgttccgagcgtcacagcgccgttgagcataaatttcatatttccggttccggaagcctctttggaagccagagaaatctgctcggaaatatcacatgcagggatcagtttctctgcctttgtcacattgtagttttctaccatcacgatcttcatgtacgggcttacctgcggatcattgtcaatgagctgctgcaggcagaggatcagatgaatgatatctttggcaatcgtatatgccggtgctgcctttgctccgaagatcattgtgagcggacgtttcggcagatttccttttttgatctctttgtatttgtagatcgcatacagtgcgttcatctgctgtctcttatactcatggagacgtttgatctggatatcaaatacagaattttcatcaatctccacattctgtgtcatcttgagatatttctttaattctgcttttgcttcttttttaatctctttcagttttgcgagaacattctcatcatcctgatatgccagaagtttttccagttcttctgcattctccatatatccaggtccgatcagttcttttaagtactctgccagattgtgattgcagtgtaccagccatctgcggaatgtgattccgttggtcttgttgttgaacttctgcggataaatatcgtagaacggtttcagctcagattcttttaaaatctctgtgtgaagcgctgccacaccgtttactgcatatccgaaatgaatatcaatgtgtgccatgtgcacgcggtccatctcatcaatgatatacactctcggatcgtggaaatctcttctcactcttcgatccagttcgcggatgatcggcatcagatgcggtaccactttctccagataagagatcggccatttttccagcgcctctgccaggatcgtatggtttgtatacgcacaagtcttgctcaccacgtccactgcagtatcgatattaaatcctttttgttctgtcaggatacggatcagttccggaatgaccatagtcggatgtgtatcattgatctggatgcacacatgctcatgcaggtgatacagattcaccccacgatcctcggcttctttgaggatcagctgtgctgcattgctgaccatgaaatactgctgataaatacgcagaagctgtcctgcttcatcactgtcatccggatagaggaacaatgtcaggtttttatggatctcctgtttgtcgaactggattccatttccaatgatgctctcatctacactgtccagatcaaacaggtgcagtttgttgcagccgctctgatatcccggtacgtcaatgtcatacatggtagatttcagggtaaaatctttaaacggaacctcaaaactcacatctgtttttgtcagccagctcttttctgtgatccatggatttttctcttcccactgtttgttatcagaaaatttctgaaggaataatccgtcgtgatagttcagtcccacaccgtctccattgagtccgagtgttgcgatggaatccaggaaacatgctgccagacgtcccagtcctccgtttccaagagatggttccaattctacttcttcaatctctgtcagatcgtgtccgtgttttttcagcacttctctgacttcttcaaatacacccagattgatcaggttgttggacaagagtttccctaccagaaattctgcggaaatgtagtacagttttctgtctccctcgttgtgtttcataccattcattttttctttggaccactgaagaagcgctgcgtagatctcttcactggatgcctcttttattcctttgctgcaaactgtctgtaacatctgctctaattctttttccattgtcattctcctttcagattccatgttctatttcttctttttttcaatctgttcatatacacggagcaattctccgacactccatgcctgtgcaaaacagcctttggaagacactgggtttttcccgtcgtagatttccggcagctgtccaatgcacccttccttaagtgcgcactccagaacttccagctgctcttttacgtcctgttttgcgcgttcactgtatgcgtgaaccttgagatacgccagatagtaagcccccagtgggaacgtccatacagtgccctgatggtatgccatatcccgcttttccatcgctccttcatagtatggatgaaattccggatctgcttcttccagtgtacgcatcccataaaaagtatacagcttttcaaaaacagtttccactatcttccgctctttttccggctccagcatcgtaaacggcatggagagtgcccagatctgattgcagcggatctgggtatctgcctctgttccggaaaccaggtctttcagacaatttttctgcgacatccagaatttttctgtaaacgaatcccttaccttttctgccagttgcgcgtagtatctgcttgtttctgtttcttctgtaaatgtttccataatttttaaggcattgtaccagtaggcattgatctccaccggctttccgtgtcttggagtcggcagaatctctcccacacgtacgtccatccaggtcacctgagcaagaccttcccctgcacagatcagcccgtctgtatccatgtggatcccaaactttgtcccgctctgatatccatccatgatccgctccatcaccggatacacttcccggacaaactccatatcttttgttgcttcataatacaaatacacgcaattgataaacaacagtgccgcatcgactgtattgtacagcggttcgtttcctccctctggaaacagattcggcatcagaccgtctctctcattctgtgcaaaggttcgcagaatcctttttgcagtctcaaactgtccggtagaaatgcagattcccggaagtgcaatcatcgtatctctgccccagtcttcaaaaaacggatatcctgccaaaatcgtatctccccccgtggattcccgttttgaaacaaactgtctggcactttttgaaagcattttcccagcctccgaagtaaatccggctgtttcctccagctgttttctgtctgctttcgtctgctcaatgatcgtctgtgcactgttttttgatggttccatctcatagactacttccaggaccacctgttttccagcctctgcctgcagacggatctgatggttggctcttgcgtgtccatacgccctgcgtccgtcacagacatcatagcggtaaaaataaacttcctctgtctctgcgatctcttttatcattccgtttgtacgaagatgcagtgtcattccttcactttccactgctccttttgtaaatacgatttcctgatccggcaagagatcggctccctttggtacgaactgaaaaaatggagtcagcacaaattccacattccggctgctgcggtttttgatttcataacgaagcgccactgtattttcttcctgtggcattccaatctcttttttgatctccacaccatttacaaggaatctccagatcggagtatcttcataggaaaatgccgccagatgaagatatccatcctccggtgtctgctcctcaaactcctgtgtggacagtgtaagcacgtctcctgtttctgtcagaagttcttcctttaagcggtgtatcatattgtatctgcagtttggcgctgttgtacaggccatcaacagtgcatggtcatttcttgacactgcccccgtcatcgtcatggaggaaaatccccccagtccgttggtcatcaaataacagttttccagtccccgctctcttgttttccagtcttgttttccatacatccatttcatcacactttacctgctctcttccttttttccaagtatcaaaatactgaccggagaaactttcatatgttccgctgcaatctgtggatgtttccataaaaagctgtcctctccgtctgcaagaacttcccatgtccctttcaaaagtttcacttcctgctgtttttcactgccgttatatacaatacagagtgttttccacagttctgctttttcttttgtctggttatccacatacaagcccacacaaccatctgttttccacgtttttaagatgcgttttgccgcctgtgcgcttttatcccacaatcccggcagcatttttcgcagtgtgatcagtccccggtaatattccaccagctcctgttccttgtatgcctgttcccaatccagacgattgatggtgatcggtgcattatacgtgttatccctgccgccttttgtccgtgcgaactcctctccagataacaaaaacggaattccctgacaggtcagatacattcccgctgccagacggtactgttttcttctcaattcttctgacgctgttgtttcacacagtttatcccagagtgtatgattatcatgggcagacacatacgtgatcacctgggatggtgctttcactttcggctccttttgtccgcaccaggctttcacagaggccaggatctgctcttccagatctttccctccatttgcaaatcccggttcttctgcctcaaagaccgaacctttgatggcatctctcgtatcgtccgaaaacatccctacctgttcatccagaagatggatatgtgctttatccgccaggagagcatttccttccacagccgtttcatccgctctccacggctctccaaaaaccagcttttccccggttccatagcgggcatccagttcctttcgaatcctgttcatcagctccacatccagaagtcccatcaggtcaaagcggaatccatccatatggtactcttcggcccagtacagcacagactccaaaatgtatttggcacacattgcctgctcacttgccacatcatttccacaggcagatccattggaaacactgccgtcttcccacacccggtagaaataccacggcatcgtcttctgaagccaggaatccagcgaataggtgtggttataaaccacatccataatgacccgaaatccctgtctgtgcagagcctggatcgcttctttcagctcccggatccgaacttccccatgaaatggatctgtggaataagaaccttccggcacattataattcagtggatcatatccccagttgaatccatccgctctgcccgcctcatctacagatccatagtcatacaccggcatcagctgtacataattgaccccgagatttttcagataagaaagtcctgtcggatgttttccatctccatacaaagaagtatctttgcaacaaaatgccggatatttccctcttacctctactggaaatccgccggatgcatcccaggaaaactctttgacatgcagctcatagattatttgctctgcttctttttccggcgctttatctgattcccacatcacaggatccgtttttctcaaatccaccgccatactgcgaaggccgttcacaccacaagcttttgcataagggtctgcactttgaacctgctctccctctatcttcagtagaaaatcataatagattccatgaagagactgctttgtctcatagttccatattccatgctcctgcagctgcatcggatggatctcaaatgcacttccggcctctccgttcttgtaaaaacagatctgtacttcctctgccactggcgaccagagccgaaatgaagtccgcccacttgtgcactccattccaagcttttctgccggatcacaatactgtttctgaaattcttcttttcggtaaaagtctttccattgctttgctgtctttcccatccttttactccatctatcctttgactgcaccggaaacaccgtccacataaaatctctgcatacacaggaacagaattgcgatcggtattgagatcaatactgcccctgcggcaaagctggtgtaccagctgtcaatatattctttttccaacattttccacagcccgattgcaatcgtatactggtctgaatttgcccggcagatcacctttgcaaaaatgaaatcgagccacggtcccataaacgatgtcagaacggtgtagataataatcggtttactaagaggcagtgtgatctttgtaaaaatctgccatctggtacatccgtccagaagcgccgcctcatcaatggcgatcggaatcgtatcaaagaatcctttcgcaatctgaaatcccagtcccgctcctccggaatacaccaggatcaatgccagacggatcagatttccctctgtcagccccatcgcctttaaaataaaatacacggcgatcatagacataaatccagggaacaatcccaggatcattgccatgttcatgtagggttttcgcagcttgaaccgcagtctggacagacagtaagagactgccagcacataaaaagtggccagaatacaggagcataccgcaatgatcagcgtgttgccaaacattttcgggaaattcaaaatcgaagtatctgtaaataatcttgtatagttatccagtgtaaaggactgtgggaagaaggtggatacataagaacctttttccgcacggaagcttgtgagcacaacccagatgatcgggaatatccaaattgccgcaagcacagccagaacaatatgaacgatcgtattgttaatcatccgttttctttttgctgaatgaaatttcttctcgcccatgcctagaatcctccttcttctttgtaagatttacttcttctgtatgtaaacagtgcaccaactgcaagaatgataaaggtcagaataccaatgactgcaccaatgttatagtactgtttgtcaaccgtcagcttatacagccatgtaacaagcaggtctgtacttcccgccgtggaagacagatccgtgatcggatctcctccggacaacagataaataatattgaagttgttcacatttcctgtaaatgtcgcgatcagatacggtgtcgtcacatacaacatataaggcagtgtgatcttgaagaaaatctgaatggaatttgccccgtctaccctggctgcctcataaagatctgccgggatattctgaagaacacctgtcagctgaagcagtgtatacggaacacctacccagatattgaccacgatcacagtcactctcgcccaggtcggatctgtgaaaaacgggagacttgcatcctgcgcgatccaccctaagtttcttaacagtacattgaccgcaccttccggctgcagcatggtacgcatgatcaaaagagatacaaacatcggcactgcacaggaaagtacaaaacaaaatctccagaatccctttgcctttgtatctttccggttgatcatgattgcaaggatcattccgaaaatatagtttgtaaaggttgcaaagaatgcccataccagtgtccatacgagtacagaccagaatgtacttccaaggatactgctggaatcaaacagtgccttgaaattatccagtcccacccagtcaaacagcatcagatgattgtcgatcttgctgtaattcgtaaatgccatacagatcatgaagatcagcggcaggatcgtaaagccgaaaataaaaatcatcggtggtgtcatcagaagtctgtgcagattttcatgaagcagagattttaaatcttccccgaatgtattgacatgttttccttcttttgcaagacattctgccttatatgcactctgaagcgcacctctccaggcaaataccatcagcacgctcacaaggatggttgccactccatataacaggatcaggatcgactgatccccttttgtgtacagataaacctgactcgcttcgtcccacacttctttctgcggcacgcttccaaggcctcccagcatacttaaaaatgtaattccattcactgccataaatacgatatatgctacttcaaccgccagatataacaggccttttattttctgtccgtgtacaaagtttccaagtcccattaagatcatggataactttgtctccggtccgcccttttgtatcgcattcctacatgtatacggcgttggaaattcattgactcgttttgtaactattcccatcttcttcacctcttctagattccatcactgttcattgcctcgttcatcgatcccgtctgctcttttgcattctcatgcgtgatatttccatttcggattccttttcccatgttttctaccggtacccagcagttattcatctttgatacaaacggctgcaggatcgatgtccggttaaaggtgtcattctgtgccataataagcggatctgccgcaatgttctcctgtgcaagcaattccgtattacatgggatcacatttctcatctcatagtgtgcttcctgtgctttggcagatccaagatatagtgcaagctctacggcaggaaccatgtttttactgtaaggattgactccaatcgcttttgatccggcataggacgtcatctgtttttcttctccgtttaaggtatatgttggtaatgcggctactcccatattatcaccgagcgcctctttcactgcattggcatcccaggaaccagaaaacatggcattgatgcttccgtcacgcagtcctgcaatcccggaaccgtctgcatcgatcttaaaattcggattatttcgaagatcaatcagataattcgttacttccactgcattttctccgccgaaatctacccctttggattcatccgttccatctccgaacaacgtacagccatttcctacataaaacgccggcagataccatgagtttgtaaacgggaaagacacgacacctttctcaagcattgtatccagattttttacatcctcctctgaaaaaacgcttttatcataatacataaaccaggtatttgtcgtaaaaggaattccgtacagatctccgtcctttgtcagagacttcaaaacttcttctgaatttgttttttcaatctcttctctgtactttcctccaaatttcgccagcgcattggcatctgtcattgtagtcagcgtatcatttgcatacataaatacatccgcacttgcttccggatcctgcgatacctgactcgctgccgtcgcttcatctgcaactccgtacacaaatgtaatatcccactgcggattttcttctgcaaaggactcacacatcgtctgcagccattcgccgctttcttttgactggtcctctgacggagaccaaaccatcagtcttactttttcctgccctgcactgctctgggatccattcccgcatccggtcagtccacacacagccagacttgcagccagcagaattgcacaaactcttctcttcatgttccctcacctttcattttttgtttcgcattgtttcgtatatgatgataatatcatttctttcctgtttcgtcaatcctaacaacgcatggtattctttattttctacgtttttcatagtttttgtcctgtatttttattcactttcaacaatccatgtttttgcaaacaagaaactttccgaaactcattctctttttccatggatattcattgcatttttcactttttttctatataatgaaaaaggttactatgaacagcaacgaaaaaaggacgcagaaaggagccccaatggctacattacaggatattgctgatcgtctgaatatctcaaaaggcactgtttccaaagccttaaacggtgcacctgatatcagcgaaactttacaaaaaaccgtactggaaacagctgttgaaatgggatatacaaaaatccgccgccagaaggctgcggagaaaaaactctgtattctgattgaaaacgtagattacaaagagtcacatcaatttggatatgaaatcctgctcggcttccgccagcttgcagaacctgccggttataccgtagatattgtagatactactgaaaaactgcagaaaagcaccccgtacgatgtttttatgctgcagaaccagtatctgggagcttttgtcgttggattttcgttgaatgatccgtggatgaaagattttcagaccagcagaacaccgaccgttctgtatgacaactatattattgcaaatccaaatatggcatatgtcggaatcgacaacaacgaaggcatggaactcgccgtctcccatttaaaaaaactgggacataaaaaaatcggatatttgagcagcgcccttggttctcatatcatgcagatccgccacaaagcatttttccacgctttgaaacaaaacggcctaaagtccgatccgacctatgcgggaagttcctactatatcactcaatgtatggaaaagcatcttccccgtctgttggatctgggaatcacctctattgtctgcagccatgatctgatcgccaatgccgcgatgattcagtgtcagcagctcggatacaaagttccggacgagatcagcatcatcgggtttgatgatctcccgatctgcgcatatacttccccgccgctgactaccatacgccaggaacggatccagcttggcaaaagtgcttactatgctctggacagtctgatgaatcaagtatccatcggaacacttctgttacatgcaaaattaattgagaggggatcgaccggagaggttcctcagacaaataataatataaaaagaactggcgattgatttcagcttcaaccgccagttctttttacaaatcatattcttttaacagagtctcccgatatgcctcatcctccactgcccgtttcatatcgtccattcgctgctctttgagtaatttctcataaagcgtattgattctccgttccccttctttatatcctgtctcatacatatcctcttcatatgcttcctgattaaatgatgacaataccatactgatcacctctgctttatgctttctcaaaatatccacaagcactccctgttcgatacagatatctactgcccgcaaagttgcttcttctggatcttcatacatttttttctgctcacgtacaatgaaaacaaactgcgagtactctctcagacgcctgcacttctccattagctcctgattatgtccataattgatgttcagcatcaccacctgacactccagacagggttctatgtcttttcccgtcttctatatatccttcgtacaaatgtgccagatagatcaacccccgaatcggaaggttgggattgtatgtactctgatgctcatacaggttcaaggttcctcctactaaaaatgaaatatcattttttatggaaatataaactgcatcctccagtgtattgacttccagttcttccggatcactataagatgttccattcagtgcattgtacaaatccagcaaatctttcttttcgctgaatataagccgaaacaggctgtctctgtattccctgtttaaagttggatactttgagaaattttttgtcttcttttcttccatgtactttcctccattataatcatttttttctgcagtgcaatatcactatctgacgtttccataaaataactgaatatttcggctgatctgccgttttttgattctttgatttgtttagactttttcctaagattactaaagataaaaccattcagagacagtttttaatatgcttattgtacccttttccctttccgtttacaatcccgcaattttcacaaaaacagcaaaaaaatacgcaggccatcgtatcgcccacgcatttttcatttcttataattcaatccgtcctgttgtatctttattgattacgtaatatgctgcggattcttctggcttcagataaagttttacatctttcagctcgcctactttatgcttcagctcttttgtccagacttcttttacttttttcatcagctctttttctgaatattcttttccggcaaactgcagatacatttcacattttactgctgtttttgctgctgtcgttgtctttgcagaagtttttcttgctcttgtctttttttcttctgctgccggctcagattcctgtaacacagctgctcttgtttcaattgcttttgttgtgtctttcttggtctcgattgcctttgcctttcctgcttttgtctcaatcgcctctacttttgcaggttttacttcttcttttttctctgtcgccttttcatttgcaacaactttctttgctgtctgtgctgatgtcacttcttctgctgtctttaccggtgtctgtactgttgttttcgctgttgtcttagatgctcctttttttgctgccatatcaattccctcctgataaaacacgaaacggatattgctccgcttatcttccggctctgccgcaaaccacacggccggaacatgactgttatcccctgcttttcgcaggttcagcaaatattgtacctcatttttccaaaaacgtcaaaaaaatatcagagctccgttttcttttcctgttcccgttcctgataacctctgaaaaaatcggataatttatccagtgtctgcagcaaaattgcaagctcctgctcctttagattttcaatcaccgcattggtcatctgcatatggaaattcttatgatgctcatatgctttcttcccttttccggtcaactggatatagaccaccctgcggtctgtctcgctcctctgccgtgtcacatattttttattgaccaggctgttcatggacgttgtcagggaacccgctgtaattcccaatgttctcgcaactgccgacattgtgctttcctctcccagaccgattgcttctattatatgcatgtcgttgttggtaatatccttaaattcctctgttatgattgctttttcttccaattcccagatttcgttgaacaggtgaaccagtgtatcgttaatggtcttatatgcatccaaagatgtattctcctctccgtaccaaccacttgttcctgttctttatgcaaacaatgatgccaccacttcctctacggtctcaatcttcgctgccttccatgcgttggcgccgcaaaagataagtccgttttctatgtctcctttcaccgcggcgatcaggctgtctgtaatgcagtatggtatctgagaagggttacattttgcaagacatctgtgacaggaactgtgttctattttctctccaagcataacacgtttcatgaggggattcaagatggctcttcccggcattccgaccggacttttcacaatggcaatctcatcttttacagctttcagatacgcttctttatacctccggtgggcatcacattcttttgttgtaacaaatctggttgccacctgaaccccatccgctccaagctgctccatcctttggacatcacttctgtcataaattccgcctgctgcgatcaccggaatccggcacttgtacttcttcgcatactgccgtaccacgtccagaatattcccaaactccatatggtaggcatcccctttccacttgtccagttccgcctctgtaaatccaagatgacctcctgcaagaggcccttctgccacaatcagatccgccgtccttccatattttttatcccagtatttcaagatcacttgcgcagaacgtgctgtggatacaatgggcgcaattttcaccgcactgccttctgtcagtgccggaaggtccacaggcagtcctgcaccggatatgatcaagtctgcacctgcttttactgctgcctttacatgatctgcatatccttttaaagccgtcataatgttatatccgatgattccgttttctgaaatttgacgtgctttttgcatttcttttccaatcgcacgaaggttggcctcctccggatgtttatcaaaatccggttcccgatatccgatctgagcagtggatatcactccgattccgccggctttcgccacacttcccgccagccttcccagactgattcccacacccattccgccctggatcaaaggaacttttgttattttttctccgatttttaagttttccatatttcacttctttctatggtatttttatgttgctacatcttccggaaacgctcgtaacgctgcgccgccagctcctcaggtgagaaattgcagtgcgtatccagaaactctgtgatctttttttgaagaacaaaaaccacagactgcatggtttcttctgtatacacttctggttccgcaatgacagcttcaatcacgccaagtttcttcaggtctgctgctgtcaatttcatcaccgctgccgcttcacttgcgcgtttactgtctttccacaagatactcgcaaacccttccggagacagcacagaatatatcgcattttccagcatccagacttcatccgcgactgccagtgccaatgcacctccgcttccgccttctccaatcacaacagacagaatcggaaccttcatggatgacatttcaaacaggtttcttgcaatggcttctccctgcccccgctcttctgcctctataccacaaaatgcccccggtgtatccacaaacagaagaatcggccgtttaaatttctcggcttgcttcatcagacgaagtgcttttcgatatccttccggagacggcattccaaaatgatgcgctacattttctttggtagattttccctttgcctgtgcgatcactgtaactggaattcccgcaaacctcgcgattccaccaatgattgcagtatcatctccataacagcggtctccatgaaactccagaaaatcggaaaaaagtatacggatataatcctgtcctacaggccggtcattttttctggaaattgtgacccgttcccacgcatctttttcctgtacagactgccgttctttttccactgtctgtacaggcttttgaataacaggattttgagcggtatgatgcatctgcagaatattttcaagaaccgttctcatctcttttcgctctacgatacgatcgataaagccgtgttccagtaaaaattcagaacgctgaaagcctttcggcagtctttctccaatggtctgttcaatgactctcggacctgcaaatccaatcagcgccttcggctctgccaggattacatctcccagcattgcaaagctggcagtcaccccgcctgtggtcggatctgtcagcaccgaaacatagagaagtcccgcatcactgtgccgttttaatgccgctgccgttttcgccatctgcatcagagatacaattccctcctgcattctggcaccgccggaacaggcaaatataatcaccgggagctgttcctttgtggcgcgttccaccgctcttgtgatcttttctcccacaacctgtcccatgctcgccatcagaaaccgcccgtcacacaccgcgatcaccgccggattgccctcgatagatgcttttccggtcacaacagcttctgaaagtccggttttttccttcagactttttaccttttcctcatatcccctaaactccagcggattgacaaattccatgtctttctcccactcttcaaaggaatcttcatccacagtcatccggattctttcatatgcgtgcacccggaagtacccctgacatttcggacagatatagcctgcactttttacctcttccgtcagaatcgcagcgccgcatttattgcacttcttcagaagtccttccggaacttccggccgttcgcttttcagcggaatataactttttcgatttttcttaaacatattctgcagtttcatacacttgcttcctttttactgattttccattgtttcaataaattcaatatcggtatttccacttacaaaatcgggatgatgtaaaatgtcatactgataatccacattggtctgaattccctcaatgatcacttcacccaatgcacttcgcattttcagaattgcttcttctctgcttttggcatgcacgatcagctttgccagcatggaatcgtaatacggcggcactgtatatccactgtagatcgccgtatcaatccgcaccccttttccgcccggcagatagacatccgtgatagttcccggagaagggcggaaattctttgccggatcctcagcattgattctgcattcaatagcatgaccgtttaaggaaatgtcttcctgcgaaacttttagcttctctccatctgcgatccgaatctgctccttaatcagatcaattcccgtcacccactctgtgaccggatgctctacctgaatccgggtattcatttccataaaataaaaggatccgcttttctccagcagaaactcaatcgttcccgcattggtataccctgctgcctttgccgcccgcacagccgcctctcccattgctttacgcagcttcggatttaacgccgaagatggagattcctcgatcagcttctgatgattcctctggatcgaacagtcccgctctcccagatgcactacatttccatgcttgtctgccagaatctgaaattcaatatgacgcggatgctcgataaaatgttcaatatacatggcatcatcaccaaaggcattttttgcctcactctgagccgtcagaaatgctgactcaaattctgcctctgaatatgcggtacgcattcctttcccaccgcctccaagtgctgctttgatcatcacaggatatcccacttccccggcaattcgtttcccgtgatctgcttcgtatatacattcactgcatccgggaataaccggtacattggctgcttccatagtctgcctggcaatcgatttatttcccagtttttgaatcacagaagaagacggtccgataaagatgattccacatttttcacaaagctctgcaaatctgctgttttctgacagaaatccaaatcccggatggatcgcatctgcaccggatgtcagcgtggcacttaatatattttccatactcagatagctttgtgcagacggcgccggaccgatacacactgcctcatccgccagctgtgtatgcagtgcttctttgtctgcctctgaataaacagccacagtcagaatgcccatctcccggcatgcccgaatgatccggactgcaatctcacctctgtttgcaatcaatattttttctatcatctctactcacctaccataaatgtcagctgtgcactggctaccacgtttccattcacagatgccactgcttccccaactcctaccggcccttttcgtttgatgatctttgtctccagcttcagtttgtctcccggaaataccattcctttaaatctgcagttctgcacacctccgaaaaatgcgatcttcccctgattttccggaacacttaagatcgcgactgcaccgacctgtgccagagcctctaaaataagaactcccggcatcactgctttctttggaaagtgtccccggaagaattcttcccggtaagtcacacacttatatcccaccgcaaattctccgggttcaaaatcttcaatcgcatccacaagtaaaaacggatgtctgtgaggaatgatttcctgtatctgttcaatgttcaatgctttcatattctgcacctgcctatctcacgataaaaagcggctgtccgtattctaccggcgctccgttttctaccagtatttcttctatcgttccgtcaaactcactttcaatctcattcatcagcttcattgcttccacgattgccagaatctttcctttctgtacctgctctcccacctgtacaaacggatctgcatcctctgccggtgatgcatagaaggttcccaccagcggggatttgatcacatttcccgattttttctccgaagaatcctgtggctgctctgatgctctggccggcacagactcactttgctctgcaagtctgacttcccctttttctttttttaaagaaatcttaaagtctccctcttcatatttgaattccccgagattcgaggatgaaactgtctggatcagttctaccaactgctcaaatttcatattatctacactacccttcatattttttcagcaacagtgacgcattgtgtcctccaaacccgagagaattcgtcagcgcatatgtgatctctttttcaaccggtgcgccgattgcataatccagactgcactcttcctctgtctctttggttcccatggtctggtggatgaatccatcctggatacttttcacgcatgtaacaaattccaccccgccggctgctcccagaagatgtccgataatcgatttcgtagaattgacaacaacctgatctgccgctgctcccagtgcataccggattgctcttgtctcatacagatcattgtgatgggtactcgttccatgtgcattgatgtaatcgatctgctccggctgtgcgcctgcctcttccatcgcaagcttcatcgccatcccggctccctctccgttttctgccggagacgtaatatggtacgcatctcccgttgccccgtatccgacaacttctgcataaattctggctccccgctttttcgcatgctccagttcttccagcattacgatccctgctccctcccctaacacaaatccatttctgtctttgtcaaaaggaatggaggctttctctggatcctcagaatccgaaagcgcggtcagcgccgtaaatcctgccacgccgcttgggcagatacagctttctgcacctcctgccacgcagagatccagatctccatatgcaatcgcacgaaatccgtctccgatacagtgggttcctgatgcgcatgctgtcacaacactggtacattttcctttgaatcccagctgaatggaaacatttcctgctgccatattggaaatcatcagcggaaccatcagaggattcactctggatggccctttctgcagaattttttcgtaatttgtctccacagcctgaaggcttccgattcctgaaccaacgatcacccccgcccgatacgggttctcctggctcatatcaattttcgcatcttcaaaggcttcctttgccgcggctactgcatactgagcgaacggctccattcgcttcgctgctttgaaatccatccgctcttttgccgaaaatcctttcacctctgccgccagttttaccttgtattccgaagtatcaaactttgtgatgggaccgattcccacctttccttcacgcacactgctccagaactcctccactgtgtttcccacaggtgtcactgctccaagcccggtcactaccactcttcttttcatactgttctccttttctacattgccataccgccatccacattcaatacctgtccggtgatatatcctgctttgtctgatgcaagaaaccagaccgcttctgccacatcttccggatttccaaaactccccagcggaatctgactttttgcatgattctgcacctgttcagaaagaacttctgtcatttctgttttgataaatcctggagccactgcattgactgtaattcctctggatgcgagttctcttgccgcagatttggtcagcccgatcacacctgctttggacgcactgtagtttgcctgccctgcatttcccagaataccggataccgaagaaatattgatgatccgccctgacttctgacgaagcatctgcctggatgcaaaccggattccgttaaaggttccctttaaattcgtctgaagtaccgcatcataatcggattccgtcattttcatgagcagtccgtctcgcgtgatccctgcattgttaaccagaatatccagtcttccataagtttctatcacatctttaaaaaatgcttcacaggcagaaaaatcagaaacatcacatccatagattcctgcatttcccccttgttctttaattgtttgctgcacctgttttgcctgttcttcattgccacggtaattgatgacaacaaaaacgccctcttctgccagtttttctgcaattgctcttcctattccacgggaagctcctgttacgaccgccactttctgttctaacataattcttttcctgctttctcaatatcttcccatgtggaaacctgatataccttcacatcacggttgatcttccgtaaaaatccggataacgtacgtcctggtccaatctctacaaaggtatccacaccctgtctaatcatctcttccacactctgctgccagcgaaccggtgctgcgatctgctgtataagcaattcttttgtttcctcgatatccgaaacataccgcccggtcacattcgtcacatacgggatctgaagtggtgaacattcaatctgatccagtacctcttttaactgtcctgccgcttcctgtaacatcggagaatgaaatggaccactgacgtttaacggaagtacccgttttgctcctgcatcctttaaaactgcccctgcctgctctacactttctttccatccggtgatcacaatctgccccgggcagttatagtttgcaatactcactccttcaattccagcgatcgcggcttcaatcttttcggcatccaggccaagtaccgcagccatcgcgccttttccatccggaacggcgttctgcatcaaaatgcctctctttcgaactgccaggatcgcatcctcgatctgcatccctcctgccgaagcaatggcacaatattctcccagactcaaccctgctgttacatccggcttcacaccggcttcacgcagcacctgctccattgccatacagaccgtaacaagtgctgcctgggtatattccgtctgatgaagattttcattttcctcaaaacacaaggatttcatatccagcttcagaagcccggatgatcggtcaatgatatttctcgcaatctcgctatgttcgtaaaaatcttttcccattccggctgtctgcgctccctgtccgggaaacataaatgctattttactcatgcttggaaactccttttaacaatttttctgcctgctcggtgagattctgtatgatctcctcacaggaaagtatctcttttaccattgccgcagactggcctgccatcacacttccatttgtcacatctccgtccacaaccgcttttctaagcccccccagcgtcaaaagctccagttcttcaaacggaacccccgcctgttctttttccaggtatatttttgtcatctgattgcgaagcgcacgaaccggatgcccagtgcttcgtccggtgactctggaatcaatatctctggcttttataatacagtttttatagttttcgtgaacctgtgcttctctggatgccacaaacctggtaccaatctgtaccccttctgctcccagcatgaatgccgcagccatcccccgtccgtctgcaattccaccggccgcaatgaccggtacattcaccgcatcgactacctgaggtaccagcaccatggtcgtattctcgccgatatgcccgcctgcttctgtgccttctgccaccagtgcatctgctccgcaccgctccatccgcttcgcaagggcaacagacgcaaccaccggaatcactttgattccagcctctttccagagactcatatatttttccggcgaacccgctcccgttgtcacaaccggaactttttcttctgccaccagctctgccacttctttcgcataagggcttatcagcataatattgacgccaaacggcttgtcggttcttcttttcacttcctgaatctgagcgcgcacccactcggcaggcgcactggctgctccgatgatcccaagccctccggcattagaaactgccgctgccagatgactctccgcaacccaggccatacctccctgtacaacaggagattcaatccccaaaagtgtggtaatctttgtcttcatgccagtatccttccttctatttgtgtgcttccagatattttacaacgtctcctactgtctgaatctgctccagatcttccgacggaatctctacctcaaatgcttcttcaaacgccatcaccatttcaaacagatccagagaatctgctcccagatcttctttaaaggatgtctcctctgtaattgttcctgcgtctgctcctaatgattctgctgtaatttctttgattttttctaacataattttcttcctttcttttaccattccaatagacttcccgcccaggaaagtcctgctccaaatccggcaagcaccagcttatctccctttttgagcaatccttttttgttccactcatccagaagaatgggaatacttgccgctgaggtgtttccgtattcctgcaggttcatgggaaatctcgaaatatccactccggtccgctttgccgcagcctcaatgatccttctgttcgcctgatgtaaaaagaaatacgaaatttcttctttttggatctgggctttttcaagcagctcttccacaatttccggcaccctcctgactgcaaatttaaatacgctttgtccgtccatctgaatgtacgctgcctttgcttcatccggatgatcccagttttttctgtgccggctgcatcctgtcagaacatctccttttgcgccgtccgaatgcgcagcctgcacaaacagaccttccttcgattcgcgaagcaccacagctccggccccgtccccgaacaaaatgcaggtacttctgtcactccagtccaccatatgtgacatactgtccacaccgatcaccagcactgtcctgtaaattcctgcctgaatgcacgcctgtgcagtctgaagcgcaaacaaaaatccactgcacgccgcattcagatcaaatcccgccgcatgctctgcatgaatctctctttgtacctcacatgccgtgcatggaaaaacgttctcgggtgtggaggttgccaccaggatcagatccacatcctccgccgggatgtctgactgtgcaagtgctcttttcgccgcctctgccgccatatacgaagtcgtctcattctctgcaagatgtcttcttgcaattcccgtccgctcgcgaatccaggcgtcattcgtatccaccagatttgccagctcgtcattttctacaattctggccggcacataggagccggttccgcatattcttcctgtcatctttcttctccattatttttgtttcaaaatatttttactttaaaatactttgatagtcaaactatatcacaaaaaataaatttgtcaatcctgttttttcatttttaacagtaaccaataaactgtcactctccccttttcaaattgaaaacaattgtaatatttccacgcataccgtataatagcccttggtattttctgcgcattgcaagcaactcttgcttgctaaaaaacggcaattcatttacattgattacaaattcaagcgaaacaagaagagcaaaaatgaatctaatttctattgccattggcggaatcttcctttgctttggaatctcctgtatttttctaaaagctgtgtcagtagaatatattgatacacaggggattttacatgaaaactttttcttactgcctgttggatttttatgtttattctgcggttttatcacatttcttacaatcggcataagaaatatcttctgcagaataaaaaagaaattttgttcttagatacaggaaggctgtgactccaaacaagtcacagccttattacgttaaaatctttcttcctaatccgatccatacacccatacacttccagttcataaattctgactgcaatatcggatccctgggtcggtttttcaatggttgctccatcttgcacacaaaaattttttgccctataataaaatgtaaacattttcaggaaggggatttatatgaattcgatacaaaaagaaaatccgctgggttatgaaaaactgccaaggctgctgaaatcttttgcagtcccaagcattatcgcaatgcttgtcagttctttgtataacatcgtagaccaggtatttatcggccagggagtcggctatctcggtaatgcagctactaatgttgcgtttcctctgaccaccatctctcttgccatcgcacttctgatcggcatcggaagcgcttcactgttttccctgaatctgggagccggcgaaaaagaggacgccgtacaggtcgtagggactgcatttacgatgatgcttgtctttggtgtgatctacgccgtactgatcgagatttttctcgttccgctgctcaccgcattcggtgcaacagctgaaatcatgccatatgccaaagaatacacccggatcaccgcaatcggtatgccgtttctgattgtcaacaatgggatgagcaacctcgcccgggcagacggaagtccgaaattttccatgacctgtatgctgatcggtgcgatcattaacaccatactggatccggtctttatttttatctttaaactgggagttgcaggcgctgcgtgggcaacgatcatcggacagattgtatcctgtctggttgccgtcagctatttaaagcgattccgaaatgtggaactaaaagcgcattatttccggcttcacagaaagctttgtttaaaaatcgcttccctcggcatgagcaacagtttaaatcaggtagcgctcacatttgtacagatcgtactgaataattcactgacctattacggagcactttctccttacggaaaagaaatcccgctggcagcttgtggaattgttatgaaaacaaatgcgatcctgctggcagtcatcatcgggatctctcagggctcccagccaatcatcgggttcaactacggtgcaaaacagtatgatcgtgtccgcggcgtttataaactggcaattcagtgtaatctggtcatatctctgattggatttcttttgttccagctgtgtccacgccagattatctccctgttcggaacgggagatgctctttattttgagtttgccgtcaaatttatgcggattttcctgtttatggtcctcttaaacggcgtacagttattatcatccaatttctttgccgcaatcggaaaaccagtcaaaggaatgctgctctccctcacccgtcaggttttcttcctgataccgctgcttttcattcttccgctgtttttgggaatcgacggaattatgtatgcgggaccggtagctgatgccattgcgttccttacttctgtgttcttgatttcacgcgaaatgaagaagatgaaactggcagaaatagctaaataatatgaataattcaaaaaaataaaaaaatttagatttttttgaatttaggggtttacaaatcgattccactatggtattatacatcttgtcaggcggacagccgacaagaaacgcggaagtggcggaatggcagacgcgctagattcaggttctagtgggagttaatcctgtgagagttcaagtctcttcttccgcactggatgaaagacattcgagagatcgaatgtcttttttgtaatttaccaatttactatttttcaatctttccacttcatctcacattgtaccttctattattttatgatattctaaaaaagaacatatgatattaatttttctcaatatgaatggatgtgaataatcatgactacacgcaatttttattgcggaatctggagtctgtgcctgatcctgattttatgccaaaaaccactccccgcttttttcgttacagcaggaaatatcatcggcgtcgtgatcggacaattcctcggtgatttaatccagacagagaatatcaaaaaaaatcacagatactatgaatccacaacaaatctatgaactgtacaatcatcccggagtacctctgtggctgcttgtcatcgtactttttcttatactcggtttgattactgacttatttttcaacaaatttcataaaaagagggtatcacacgatcatcaaatctgatgctcgtgtgataccctcgctctctatgtgctcctctattctatcacaaactcatagacaatatccttttgtgcactgatgcgatacggatcttccacatcactgccccaactgtcaataccacctactccacgtactgatccgcagatgcagactacggttctccgcggcaatggaagttcttcctgatgcgttgcattttccaactcttctgacgtatatgggagacaggaaaatccaaacttttcgccgcatgcacgaaacgtaaggccgaatgtttcttctgacgtatccgaattattcagcgtatcctttcgatataccgtaacacattctgtctccatatgcatcccgcattcctggggaaccagatatggcgtgaccggaagaccttccacttcaattgcctgctctgccccttcaaaacttaagatcaccctttttccgatcaaggcttcctccagatcaaaaaaacggacataagaacctgtgggattataagaagcttcgctgaacatcccctctccgatatgattgcacgtccccgcaggtcggcgatattcatgtccttcccagggatacatggtgttgatataatgaattttatcatatcccgccagctctatatgctgcggaacctgaatttcatcaaattcagaaatatcatagtcattttcataaaaggaaaccggacgtttttttgcattcactgaatattggaatttccagattccattcaatgactgttttaatgtttcctgtttgtcctgatacgatttttcactttcaaaaaatctgtggtcactgttttcatcataatctcaatggtctgattagtcaataacctctcctcctgtcccttcatccaaaaaaagacccccgtctccgggattcttcttccactcttattctaaatatagccgccgtatcctccgccgctgtaacctccacagcacaagccgcttccgccgcagcacagattgcacatcatatttgcaatacacagcttcatacaccagtctccgcctacagaacttggatatccatacatactctgtctctgctgataccagcctccgccgccctgcagccgctgcagaagcatctgatactgcatgttctgcggctccagccggactgcttcttttgcatgttccagcgccgtcacgttattgcccacaccggagttcgccgatgcactgtagaaataccacagcgctccacgctctttgatactgtttaatacattgagcgcctccgtataatgtccgctctgaatatagtttgcagccgctcttaagtactggctgttctcatccccggcatctgttctctgctgattctgataccagccgccatatcccgcactgcttcccgctccggaggaatatccacgggaacgctcatccatgatctgctgatatgcctgctgtacttctttaaacttcacttccgcttcttctttcagcggattattaatattggcatccggatgatactttctgctcagtgcccggtacgcctttttgatttcttcgtcagaagcatcttgtgatactcccaacacatgatatggatctgtcattgtcctttgtctgctcccctttatgttctatccctttatgtaatctcagctcttcttgataaatgttgtcccgcacttcggacagcggatctctatctttcctttgcctctcggaatccggattttctgcttgcatcccggacaggtatagatatgataatcctttctctgcgccatcagatttttctgacttttgaaaaatccgcgtatcttcgctgtcttgttcaggaatcttacgttctcatcataacgctttctcacatttctggaaaacatccggaaatatgcataaatgagacatccccagccaagcaggtaaaataccattcctatcacatggtctcctgaaaagacaggtgcaaaaaatgccagaaccaatcccaacaccagcaaaaccttgccgagcgtatccagcactccgtatcgtccctgcataaatctcataaatttttctttcattgtatcgattaccgccttttcttaaatatagaaaacattgtctctcgtttttatccggctgtcaataaagcaatccttaaattactataaactttatggcagccggttgtttcttaagattctgtatcctgattcagcatattcttacacttctcattttccacaagatacacgatctttgaatcggaaagcatcacataccggtttccgtttccgtcctcttttccaaaatacaatgtcacggtcttttctttcttattatttgtatatgtcacggtttccgttgtccggctctgctcatccagtccgtacttactcaagtcgttctcttccacggaatagtcagctgcatccttcaatgtaaggactccaagccctcccgcgattgttgccatactcttggcatcatcgtcattctctgaactgtactttgttttctctgtgccctgactgatgacaacctttttcagattaccgcttccaatcgtagggaatgtatcaagctgtgccatgtcttccatactgtactgaagatcttcaataacaccggtgctcaccgtatagatttcttttttctcattcaatgtcagataataagagtctcctgttacatttccgaaatataatgttgtctcattgccgtcctgatcggtgagaactaccgtatatgccggatcctccagaccatatgcttccagagaatccccatcttccagctttcggtctgcctcaagcttccggaatgttttttccatctttttcggatagctttgagccagcggaaaatctttgtcattcttgtcgtaccatgtaccgtcttcttttacaagctggatttctccatttcccacgtcaaactgaatctcagaaagctttcctaaatctgtgacatagattttttttgcctcttcttccttctgcttgcttttttcctgattctttccgatcacaaccacgcctgcatagaccacgagcagtactgcaagcacaagcagcaggatcagtaaaggatttctttttttcttcattgtccgcctctctccttttggttttctatgcttttctacgcttcatccaaactgcaaatcctgacagaagaattccaagcggaaggataaagatcacaagaagactaagaagtcctgcatgctgcatcgtattgtagaccggtgtcagacttttcgcttcgatcgacagatccttcgccccgtcaaaattcgcagccactgcattcataaacagttttgtattttcaagctgcgggaatgtatctgtaatctccgaagcaatcagacttcctgcgctgatcacggtaaaccgggaggaatcttccactgccacggcgccaagcacatagcttcctgcctgactctgactgtcttctgtgactgcatacgcattatctgatgtagtcataaaggatgtcgtagaaatactgtcacgctccggatctgtcaaggtcattccgtgtgtattcagaagcagaaccatctgcgattccattccatctgtcagatcgcctgatgcagtcagctgcgggaagaagcaatagtaattattctgatagcttctctgtgtatctgcaatataaccgtctgcagcttccattccgtatgttttcatgatcgatgcaagattcggaagctctgtgctgttcgtatctcccaaaagaagcatcatcttaccgccgtcttttaaatatgactccacggaatttttctcatctgcagtaagatccgaggtcggagcatacatcagaagcaattcgcagtcatccggaatttccggattcatgaccgtgtttaatccttccagcgtataattatttttatccatcagatcctgaattgtagaagacaatgtcgtctcgccatgtccggatgtctgataaattttgcgtaccacatcactcgttacgtaattcaccgcactgcttaactgtccttctccgtcaaatttcgtctccgatgcacttcctgtgtaatagtaggaagacatatccgtaacaatgatatcactgaaagaaactacttttttctttccggtatcctggcatgagactacaatactgttttcggacgcatcattttctgtcaatgccgaaggatgcagcaccggatcgatccattccacagaaattttagaagacaatgccgaatacttacttaaaaatgtaacgattctttcatcggcctcttctttgtttgccaacactgtaaatttcactttgtgatccatgttcttgagcagctttttgctggtcttggaaatctcataaatttttgtactgctgacatccagatttttatatttttccggaatctgtcctgcgatcagattgacgatcacgatgatcgcaatgaccaaagccgtgattcccacactgtatgaaccatttctggactctgacgatctgaataaattcttaattttctgcatatctcgctcctcctaactccaacgccttttctgaattgtctgtatcgtcagaaatacaaatatgatcagtatcgatacatacagaagcaatccgctgacatccacaatattgctggacgaaatattcataaagacatccgcaagagcaagccgtcccaggagtttcgtcaaaagattctcatacagactggatttcacaaaatatacgatcagcgccgccgcaattcccactgcttcaattccggccgcaagcatccagtttttcgtcatatgataaatataaacaacgatcagtgtcaggatcaaaaggattccgatcattccgctgagcgccgagcctggcagaaaagacaagattccgtcccacaaatacaacaaaagcaaaattccgaacgtactgataaatgcaatgatctggctctctgtcagagacgacataaacatcccgatcgccagatacacacatcccaacaggaagaataccgcaatggagctgtaatctaccagaagatatgccgttccctgcagtttgatcaaaagcgggaacaggcagaagatcacattcggaactgccagtactgtcaccatggcgaaatatttgccaagcactacttttgtcaaacttaccggcgctgtcaaaagcagctgatctgtttttgttttccgctcttcagaaaaactccgcatcgtcagaagcgggatcccgaccagaaatacgatcagggagcctgagagtgtgtaggagaagtaaggataccccgcattcagattgtatgccataaaataaattcccgtaaacatcaccagaaacgcaataaatacgcaccctgtcatggaatgaaaataggacttcagttctcgtttataaattgccagcatttgtccgttcctcctctccgactgcatcgttttgtgtcagttccaaaaatacttcttccaggcttatccttgaagtctgcaactccaacagaggacattcattttttgcaaacgcaaagaaaagcgcttcccggatatcacatccgccttccgtctgtattctggcactgcatgttttgtccgcccgttcctgggtatggatattactgatatgctctacatttaacaatatcgcccgaacctcggctgcactggcttttgccagaatctccacagtttcggttccgctcatcttttcctccagtctgtccggtgtatcacttgccaccagttttcccttggatatgatcagaatgtaatcgcacacttcccgtatctcagccagaatatgcgagcttaaaataacggtatgtttttttgcaagttcccggatcagctcacggatctcaatgatctgcttcggatccagaccgactgtcggttcatccagaatgatgatctccggaaatccgaggattgcctgtgcaagccccactctctgccggtatcctttggacagattgcggatcagacgcagctttacatcctcaagttttgccatttgaatcacctcatcgatggcagactctctctgctgtttcggaatcccttttagttctgcagcaaattccagatattccatcacctgcatatccacataaagcggcggtatttccggcagatatccgatgtgcttttttgcctcatttggctcctttaaaatatcatgtccgtcaatcagtacttctccctctgtggctccaagataccccgtcataatattcatcgtggtagactttcctgccccgtttggacctaaaaaaccatagacctgccctttttcaatcttgaaattcaggtggtctatggccatatgatttccgtattttttcacaaggttctttacttctatcaaaatctcgtcctcctactccctgctttttacaggattcccctgttttataagataagacgataccagaactttgtgaagtttttgtgttataactgtgatatagttttgtactttatttatgcccgtcttctttcctctttttctgcaaaaatccgacaccgcccagcatgcctgctaccagaatcagacaaatgccccatttctcaggtctgatctgtgactgtttctcctccgggatttcttccactttcacggccgttccgtctacctgacttttgggcatatttctttcataccctgtaatctgcgcccgcacaatttcggcgatcaggtcctgtcctgcctgatccggatgcagtccgtccttctggacatgctctgtcaccagtgaattcgccagatctgcaatctgatatccgtactcgctgcttcgcttttccagaatccggttcatattcccgatgatatcctccacgacctgattcatcgttcccggaagctccatctgtttcaccggattgtaaatgttggtcactacgatctgtgcctcttcttttttacaggaagaaatggtatccatagcctctatccactgtgtctcaaattcctgataatcccagtttcccagagcatcaatgatgcgaaagactaaaagcggattacttttcacatgctctgtcacttctttgagcgcctcatccgcacttttaaattttgtatccgtattcaaaatttcctgtgcggtcttcttaaattcattcagaagatcattggatcccattgtgatcaaaatcacatctgccccggaaagactatcctgcacttcctgccctttcaacaccttttcgttgaattctcgagtggcaagtccgtttttcgcataattctgatacaaatatgattttcctgctccctgtgcgatttcttctgccacagtctgtccataacagtaaagctcgggtttgtttgctccgcaatatccttttgcgatactgtcacccaacactacaatctggatcggctccgatgtggcctcttttgcatagctgcatgtcccaaacacactcagaaaacagaccgctgccagagccactgccctgactgctgtttttctcatgtcgatcacttcctgtcttttattccatgaaattccactttacatgacttccatgctctgttttttttacttccagctgccattcgatctgctcttttaattcattgacatgtgaaataattcccacaagtcctttttctcccgccagttctttcaaaatctggatcgcccgttctcttgccatgtcatccagagatccaaatccctcatctacaaacatcgtctccagactcactgcgcccgctgtattttgtacaatgtccgccagccccagtgccatggaaagagatgccataaacgattctcctccggaaagagtttttacatcccgcaccgagtcattgaccaggtcataaacatccagatcaagtcctgcctgcgcctgactgctcaagcttccgatatcccggcactgcaggataaattcctgtccggtcattcttgccaggcgcacattcgccgcatgaatgatctgccggaaatactggcgctgcacataagtctcgaagtccagcttcacgcctccgcttagatttccattggccgtacggcttagattccccatcatttcgtattggctgcgcagcttttcggcatctgaaaaatcacaaatcaacgctttccttgctctccggttgatctcatttcttgtatgcagcgtcatgcttttctctctgccaaggcgcagtttttcacgaatgaccatcagttcttgttccagcttatcgatctgtgcgatctgtttcccctctgtctgctgttttaatgtctcataccgggacgatacttctaaaagagcagtttcatacttctttaaattggcttctctcgcctcccggcttttgatccactgctttgcctgctcatactcctcttgactttgaaagttctgtttttgaaactctttccgaaaatattcttcctcgtctttgactttcttattccagaggatcagctgggattttttgctttctgcctgtcccagaatccggcttttctcctgcgtcagcttctgatactgatcctgtgcatttttgaacgcagactggagtttttttaaatcttctgtaagcttacgaagcgcattttctgcttctttttcatcaaaatccgtttctgtttttccttctttttccagaaatccgacaatcatggactgttctgactccagtcttcccttcactgcctgaaaccgttccaaaacttctgtacgctctttttctgcctgatcccgcattgcttttgcacgctccacctgctctttttttggtgcgcctccggataataccgcttttttcggatgactgcaggaaccgcacaccggacagggttctccctcctgcagctctcttgcaagaatgcccgcctgttcttcaaagtatttctgatataaccgctcatatctctgtgaggtttcctgacattttttcatacagtcctgcatatcctgttctgacttttgatactgttccttcagactgtgaacctgtttcaatttcggaagtatttcctggatcctgaggatctgttcctggatcttcggctcttcttttttggaaagtgcctctctttcctgatacaatgcacctgcgctttccaaatcttttgcctgctgtttcagcttttcttcaagctcttgggactctttcttcagattggcgcattctgcctttgttttctgcaattgttcttctgctgcagccgccttctctgcgcggattgctgcatggatctgttttcgcatttcttccgctttgctctcctgccccttcaagatctccaactgttccccggtctttttcagcagttcaaacagatgattggtatcctgtctgtttttcaattccatctgtatcgcatccgcacgtttttcttcctgtgcatttttcttctcctgactcttctcctttgcttccccggactgacagattatttccacacagtccagcacttctttttgaggcggcagttgaaggctcagcagctgttcccagacatctcttctttcatcattctgtgcaatctgcacccgttccatttcccgcctgcagtccatgctgtttttttccaactgaatgtacagctcttttgcctgctctttcagtgtgtcctgaatcttccagaaaatccgtgtatgaaaaatttttgaaaaaatctgctttcgttcttttgattccgcatgcaaaagcttcaaaaaatcgccctgtgcgatcatagcgatctgggtaaactgattgacatccagcccgatgatctcctctatcttcagatcgatctcctttttctttccctgaaattcacttccatccggaagaatcaggctgatctttgcagtctctttgacaaactttattgtcccgtccgcattctttcgtttggaaggacgcagatattccggatttcttcggacggtatattcctgatcccggtacagaaactgaaactccacataggtgtctgtctcggaatctgcatactgactgcgcatcatgtttccgtcccgctttcctccgctggttcttccataaagtgcataggttacagcatcaaagatggttgtctttccggcgccggtatcacccgtgatcagaaaacatccgttttgtattcctgtaaaatcgattctctccactccactgtaggacccaaaggcagacatcgtcaatttgatcggcttcatctattcttcctccatctcttctgcgatcttgttcatcacctgctgctcttctgcattcagcgctcttccctgcatctcctgaaaaaagtccccgaaaatttcaagcggagatgccatgcgcacaacttccgcatctttcatcagcttttgcctggtgcgggaattatccatacgtacctccagaatgtgggaaaataccttctccagctgttccttcggtcgatatggatctgtctcatccgtcagtgtgatactgacatagtcctctttcgcttcctcaggaacagttttcaacaattcctttagtgttcccctgaactttttcacatccctaagcggatgcagtggataagtctccacttccacaggtgcgcccttctctttcagcgtcaccagatgcagagattttgtctgattgcactcactgacagaatatttcagcagtgtccccggataacgcacaaactctcttcctaccttctgggcgctgtgcagatgtcccagcgccgcatagtcaaatcgaagaagcggcgtaacatccacattatcaattcctcccacggagaaaatctctgaatcacaagtctctgtcttttgacctgccccggtataaaactgatgcgtcacaatgacgtttcttttggtggtatcaaccagttctctctccagcagcatctgtactgccttactgtagctctccggcatttctccgtcaaacacggtccttacatatcccggcttcagaaacgggagaagataaaaatccacctctccgtattcgtcctgaagtgtgacttttttgagaaattcttcccgattctgcggcagttttcctgcaatgtaaatccccttctgcccaagaattccactggcataatcaagcctttgcgccgaatcatggtttccgctgatgatcaggatcggaatttcaggtttcagtgcagaaagttctgtcaaaaaacagtcaaaaatccccaccgcctcagcagatggtacagacttatcatacacatcccccgcgatcacgatcgcatccggtctcagcattttggcatactccaccacttcccccaggatatgctcctgatcttcttttaaattgtactgatgaagctgtctgccgatgtgcagatctgacaaatggataaacctcatattttattccccctgtatctataattttaatccccgataccggtcaaaacatgcgaagatctcctgcgttctcggacgggccagattggcaacagaagaggtgctttcacaaagtgcggcaagcgactccttctcaatcttcttttccaacattgccacgacttcctgcaaggtacgtgttccatccagtaaatggcgctgtgcgtattttacacaatatccgagagaagttacctgttcgctgtctgtgatctgctccacataacgcagatcgatcgtctcccgattgatggaaatcgcttctttccccaaggtcttcattttgatgcggtcatttcctttccactcccgtccctgctgtggttttcttgcaaaatcaggctttttcgctttctctttcggtccgctcaactgcggaaactgttctgcttcttttttcgccgtctgcgtgatatccttcggcatgtaccgatccatctgcacgatgcagtccgcgatatgaaaataagctccggagcttcccgccacaatcacagtggaaatcccctcttcttcatataactcccggatgcgttcgataaacggcgtgatcggctccatatcccggtggattaccctctgcatcagttcatcccggatcatgaagtttgtcgcgctggtatcctcatcgatcagcatgacacctgctttcgcttccattgcttccacaacgtttgcagcctgagacgtacttccgctggcatcctctgtataaaaatgagtggtatcttttccatttggcagatcattgataaacatggaaatgtccgtttttttgatacttcttccgtcttctgcgcgaagcttgactgctgtggaatcagtgatcacatattctcttccatcacctgcaatatgattgtacacgccaaactccaacgccttcaaaagagtggacttcccatggtatccgcctcccacgatcagcgtgatcccttttcggattcccattcctcttatcacacctctgtgcggcagcgtaatttccacttccatctcctctggagaccggaaacaaactgcgcttttcatcggacgggcggaaacgcctgactctcgcggcagaatagatccgtttgcaacaaaagcacacaatcccagctttggcagtatgtctcgaagtgcctgctggtcctctgccagatcactgatcttctgcagtctcttcgcatcacagtttttatagtagagtgccttttcgacacactccggaagaaactcaaaaaagatccggatccattctcttgcattgatcgtccttccgtttgccggaaatcccacttccagacgaatgtggatatctcctgttttttcatcgatctgcgccgcacttctctccagcacttcctgaccgcaccggctgatagagatcatcccgctcttcccggatccctttgccttgaatccaaatttctcacaacactgtccgaactgccggatcagcgcatcctccaatgctgttttctgccattttgtctgatataactgctccggaaatcctgcaatctttcctttcacctgaatactgaccctggatggagatgcaaacggatctccctgtacatggtcaatagatagcagatagcccggaaactgatacattccctttgtgtctttataggcaggataactcctgtgatcgatccttgtcacaagctgtctcaattctgctgctgtcttcatactttttattccctcccattacaaaaatccggacacgattctcgttcaaatcgcatccggttttttcttcatttctttgattgattaaacttcgaagatcagatctccgtaagaaggcatcggccatgcctctttgtccacgatcatttccagtttgtcgatcggtcttctcagattctccattgccgggcacacttcatcgtggtagaaatttgcctgtaccggtccttcttctttggcagctgcctgtgctgtcacctcttccagacgtgccagagctgctcttgcctctttcaagagtactgtgatctcctcaagtgtctctgcctgtacacttgcatccacacctgcttcctttaccgcaagtactgtatctgcgagcgtttttgtatatttgatcactgcagggataaactgttttcttgccatatcgatcatcgtacgggcttcgatgttaatcgcttttgcataactctcgtactggatttctgcacgggattccagctctgcttttgtaaatactccaaatctctcaaacaatgtcactgctttctctgtcaccattgccggaattgcttccaccatagatttgatgttcggaagtccgcgtctttctgcttccttcacccaggcttcagagtaaccgtctccattgaaaatgattctctgattctccattgcatattctttgatcagatcatgaactgcaagctggaaatcatctgctttctccagaacttcgcaagcctctgcaaatgcctctgccacgatcgtattcagaacaatgttggcagatgcgatggaatctctggaacctaccatacggaattcaaatttatttcctgtaaacgcaaacggtgatgttctgtttctgtctgtcgcatcctttgtcagttctggaagtgttcttacaccagtctccagctttccgccttccagactgtgtgttgcttcccctgtactgatcagctgatcgatcacatcttccaactgttctccaaggaatacggaaataattgcaggaggtgcttcgtttgctcccagtctgtgatcatttccaggatctgctgccgattctctcagaagatccgcatgcttgttaaccgccttcagaatgcaagtcaaaacaagcaagaactgaatattctcatgtggtgttgttcccggatccagcatattgattccatcatctgtaatgatcgaccagttgtcgtgctttccggaaccgttgacgcctgcaaatggtttttcatgaaggagacatttcattccgtgctcgcatgcgatccgctttaatgtctgcattacaatctggttgtgatctaccgcaatattcgcttctgcataaatcggtgccagttcatgctgagccggtgccacctcattgtgctgtgtcttggaagaaacccctactttccagagttcaatgttcacatcacgcataaaagcagcgattctctggcggattgttccgaaatagtggtcgtccagctcctgtcctttcggaggcatcgcaccaaacaacgtacgtcctgtatatattaagtcttttctctgaaggaatttttctgcatctacaaggaaatactcctgctctgccccaacggatggagtcactttctttgaagttgtatttccaaacaaacgcagaagtctgagcgcctgtacattcaatgcctgcatggaacgaagcagtggagtcttctgatccagtgcttctcctgtataagaacagaaagcggtcggaatacaaagtgtagctcctgctgcgtcctgtcttacaaacgccggagaagtacaatcccatgctgtatatcctctcgcctcaaaggtagcccgaagtccgcctgacgggaaagaagatgcatctggttctcctttgatcagctcttttcctgagaaactcatcagcacttttccgcttggaagtggagctgaaataaaagagtcatgcttttccgctgtcacacctgtcaacggcaaaaaccagtgtgtataatgtgtcgcccctttttcgattgcccattctttcatctcatgtgcaatgacgtctgctgtctctatatccagttctgttccttcttcgatcgtctgtttcagcttcttgtacacctttttcgggagacgctcctgcatcactgtgtcattgaaaacattttccccaaaaatatccgctacattgaataattctgtgctcataaaactaccttccttcatttcacttttgtaaacgcattttctaaaaaaggcattccaagcaagcttggaacgcctttgttctcatctacgaggcttagtatacctcaatcaccgcaaaaaggcaagttaaaatttctaacaaatacttattacttacgcttctgcttttccaacagagccaaacagctccattttttcttttacagttgccatgattgcatctgcgcctggttttaataatttacgtgggtcgaatccctttccttccaggtcttttccagcttcgatatatttgcgtgttgcatctgcgaacgcaagctggcactctgtatttacattgatcttagcaactccgaggctgatcgcttttttgatcatgtcttccggaatacctgtaccaccgtgaagaaccagtggcatatctcctgtcagctgctggattgcatccagagtctcgaagctgagtccttcccagttctctggatattttccgtggatgttaccgattcctgctgcaaggaaattgataccaagatcagcgatcatcttacattcctgtggatctgcacattcaccttttcctacaactccgtcttcttctccaccgatagaaccaacttcagcttccagagacattccgtgctcttttacaactgctaccagttcttttgtctttgcaatgttttcttcgatcggatagtgagatccatcaaacatgatagaagaaaatcctgcttctacacatttcatacatccttcgtagctgccgtgatccaggtgaagagcaaccggaactgtgatgttcatctcttctaacattccctctaccatacctactacagtcttgtatcctgtcatatattttcctgcaccttcagatactcccaggataaccggtgatttgcattcctctgctactgtcaggattgcttttgtccactccaggttgttgatgttgaactgtcctactgcataatgacctgcttttgctttctgaagcatttctgttgctgatactaacatattttctcctccaattctttgcgcacagccgtctgtggcagcgcatactataggtttcactctatggctttcattatatcttatctgccattaaaagacaatctgtaattattacaataaaacaaagaatatacacaatttctttggcagattctgtgatttttttaacaagacaggaacctctcatttacactcctgtctttcctgtttaaaaagcttccgcgcctctgatatcatctgttgaatatgttcatgccgataatccattttattctggcatataattttcaaacggagtataatctttgtttaattgggatgttaagttttatactatttgaaatattccattatgaatatgcatatacattatctcaatgtttcttcttgattggtattctttatgctatagtagaatatcttacaaacaagaaaatgttgttagaaaaattaaacagattacatcaataacttatatgaggcagtaattcccttaaaaggagttactgttttttcattccttatcggacggagttcgcctgccgcaggcatgaattacaggatactcggatgggtatactactttgaattctttgtgaactaaggcttttgggcaaattatttgcaggttaaatttgttttgattttacgcttgataccctacttgataccctgcgcatagacatggtttctttaaaaagctttttgtacaacacagtttcccactggaagacaaaaagacaatcaaacgattatatagaaaaataaacttgaataccgttcatgaaatggtcggtcatgcagatgaacgaacaactttaggaaactactgctttgaccgcaacacggaagtagaaaaggctaatttaatcgaaaaagcttcagcttgctaaagtgtaatcaagtgtaatcaaaaattcaatcacaatttcatacatccaccaagcaccaagaaaatttttaaggcttcaaatcccttgaaaacaaaggcttttaggcaaaaaaatatccgcagaactcttctgcggataccctttcaaaagtgactccaaggggaatcgaacccctgattccagcgtgagaggctagcgtcttaaccgcttgaccatggagccatgtcctcatcactgcttcagtgatgaccgagttatatattagcatagctccataggaattgcaaccccttttttgaattttttttatttttttctatttttctgaaatttcttccgtttccagccctacttcttccagaatctgtgtattctcgattcttcctttcacagacaactgctggatcatctgggattttaccataatccgcatcccctgcttccagttacggatatcgacacagtcatgttctccgccaaactctccatccagcgtccagggaatctcctcaatcgattcgaacttcacttctttggctttaaaggaatacatatgagcagaatcaatctgcttgattaaaagagaggccacgatctcattcagctcgattggatttttcggagtcttgatcagtgtcacttcaaattctccgtcatcaaagatgacctcttttccgacaatccccttgaatcctccgacagaacgtgaatttgtcaccattccgaatacaaaatcatcctctattgtctctccgtcatgtgtaatcttaatatgataagacggaatattaaacagacgttttgttccctccagcacataggccagatgacccaaaacatttttcacactctgttttgtctcataagaaacatctgtaaacagaccaaatgcggctatatatacaaaataatcgtcattgaacactcctacgtcacacgggaaaggaaccccgtttgccgccgtatctgcggcttccagcagatccttcgaaatgtgcaggctgtttgcaaaatcattggtcgttcccgtgggaatatatccgatcgggaccgggtctttacgtctcgccattgcagtcacaacctcatccagagtcccgtctcctccgctgcacacaaccacatcatagctttcggtataagattctgcctttgccatggcatcatgataacactgcgtcggatatacggtcacctcatatccggcttttacaaaaatatccaatacatctgataactttggttttaatacccctgttcccgcattcggattgtatatgaacagcatctttttcatattgctctctcccgtctttctattcttgaaagggctgtgcctacgcacagccccctttactacatcatctattttgtctttttcaaaaaagtcttaattccttctgcagccttttcttcatcttcgccttccgcaacaactgtcacttcatcaccttcctgaagagcaagactcatcattcccataatactttttgcattgatctttttgttgtccacctgaatgtagactttgctggcgtactggcttgcctcctgtaccaacaaagcaatcggtctgccttcaattccatcttcatgccctacaataaccggtgtttcaatcataataatcctccttgttttgcctttccttttctgccagatcacttaattttcttaatctgtgatttaccccggatttgccgacaggcggcgataagagttcccctaactcttttaatgttgcatccggatgtgaaagacgtgcatatgccacttctcttagtccctctgccagtttttcaagccccatgttatccctgagatacgtaatatcttccaactgctttacagctgcagagacggtcttgttaatattggcagtttcacaattcaccttacggttcactgtattgcgcatatcctttaagattctgatattctccagttccatcagagaaacatgcgcctccataatatttaaaatatctgctatctgatcgccctcttttaaatacactacgtatgactttttccttcgtacgatcttcgcatccatggaaaaatcacacatcagtctctgaatctgctttgccatcacatccgaatcgcacacaatctcaaaatgataggatttattcggatcactcatggaaccagccccaaggaaggctccccgcaaaaacgcacgacgacagcatggctgctgtacaataaggggactgacaatatgaaactcttcgaatccacctctgtgctcctccaaaagctttgctgcctgaaggacacgcagtgcatcttcatgccggactatcatcacagaatagaccgcactttgtttctctatattccttcggatagagatatcagcttctatattaaatgtttttcgaatcaatgtaaagacttttcttgcaacagccagattttccgtattgatttttactccgtactgattaaaactgttgatcgtcactgccccgcacatcccgatcaaggctgcaatttctgcaatctgacagtgtcttgcgctgctccactgctgcgaaagctcttcttttacttttcctgaaaatgacatcgtgtatacctgctattttccctttctgatggcatccttctcaatatctctgtgttcaatgcgaaccccgtaattctcccgtacttccaggtactgatacaatgcgttggcaagtgtaacagaacggtgttttccgcctgtacacccgactgcaacaacaagctggttcttcccttccagaatataattcggaatcagaaaatccatcatctggctcaattgtctgaaaaattcctgcgccttatcactcttcatcacataatctctgacctctgcctcattgccggtctttgcgcgtaattcttctatataatagggattcggaagaaaccggacatcaaatacaagatccgcatcctgtggaataccatacttaaatccaaaggacattaccgtgatatacagatttttaaaatccttgccctttacaaaaatcttttccagttccacgcgaagctctcttgtcagcattttgctcgtatccagaataaacgtcgcgcgaatctttaaaaatgcgatttcctcccgctctttggcaattcctctgtcaatatgtcccgcgcctcccagaggatgctgtcttcttgtttctttataacgcttcaaaaggacatcatttccggcatccagaaacaagatttcataatggatcccgctttcatccagttcttttaagtatccctctaacccccgaaatgcctgtccgcctctgatatcgattcccactgccgcctgattcagcttggaatccggcatggcgatcatctctgcaaatttaggcaaaagcggcaccggaagattgtccacacaaaagtatcccatatcctccaacatcttcagcgctgtagattttccagcccccgacattcctgtaacaatgacaaacctcataatttaaaattctcctatccgtttcacttctgtctccagatgtactccaaacttctctttcacggtctcctgtacgtgctcgatcaacgacagaacatcctttgcagacgcattaccgcggttgatcacaaatcctgaatgcttctcggaaatctgggcatccccaaccgaatagcctttcagtccgctgtcctgaataagcttgcccgcaaaatagccttccggtctcttaaatgtacttcccgcactggcatactccagtggctgctttgtgattctgcgctccttcaggtcatccatatacgctttgatttcctcaggattgcctttttcgagtgcgatcgttgcgcccagaactgtatacccttttgtcgccacaacacttgttctgtaacccagttccagttcttccagagataaggtcaaaaattctccttccggagtcagtacatccgcactttccagtacatgcttcatctctccgccatacgccccggcgttcatcatcactgctccgccaagagttcccggtatcccggatgcaaactcaaatccggtcagactgtttgaaagtgcctgtgctgcaatctttgacaacagggctcccgcctgcgcatagatcttattttcctctgtccggatctcattcatccgtttgcagatctggatcacaactccccgatatcctttatctcctaccagaagattgcttccatttcctaatatataatatggaatctgttctctcttacaaagaagcagaatctctcttatctcatcctttgactgcactgtcacaaaataatccgccggacctccgatacgaaatgtcgtatgcttcttcatcggctcatctctcaatacattctcttcccctgaaatcttacataattgtttatacaccctgtgctcatctccatttctgttcttgttttttctttcaccatcatacaacaaccttcccgcaaagtaaagcgtacattcgcacattcctccctccccattgcttgcaaaatccggcaaaatgatgtatagtaataaatacctgtatatcaatagagggaacatttttaacaaaaggagtgaacaacacaattggactcgagtgatactttccaatttataattcttgttatcttattattactatcggcattcttttcatctgcagaaactgcactgatgacagtcaacaaaatccgactgcgttctcttgcagatgacggcaaccggcgtgcagctttggtgctggatacaaccgaaaagcatacttccaaaatgctgagtgccattctgatcggtaataatatcgtcaatatttccgcatcttccttatcagcaacactggcttattcattcggcggttatatggtaagtattgcaactgcgatcctgacggttgcgattctggtattcggtgagatcaccccgaagaattttgccacgatacatgcagagaagatttctcttgcttatattccgattatacgctttttcatgtttattatgactccgatcatctttttgatcgatttattttccagaggctttatgtttctgcttcgtgtagatccaaatgccagaaataatgcgatgacagaagacgaacttcgaacgatcgtggatgtcagccatgaggacggcgtcatcgaatctgaagaaaaagagatgatctacaacgtgtttgatctcggagacgtaaaagcaaaagaagtcatggttccgcgtgtccacgttgcatttgccgatgtgaacagcagctaccgcgaactcattgagattttcaaagaatataagtttacgagacttccggtatacgaagatacgaccgacaacgtcatcggtaccatcaatatgaaagatctgcttctgtttgaagataaagcaaactttcaggtacgcaacattttgagagaagcttacttcacctatgaatataagaatatttctgagcttctggttgaaatgcgcgatgccaagttcaatattgccattgtactggacgagtatggagagactgcgggtatcattactctggaagatgttctggaggagattgtaggtgagatccgcgatgaatacgatgaagcagaagaagagctgatccagaaagtcaatgatcaggaatatattgtagaaggttctatgaatctggatgacctcaatgacaatctcggaacagaactggaatctgaagattatgactctctcggaggatttatcattgagcatctggacagacttccggaagttggagatcatatcacgactgaagatcagattcgccttgtagtcgaaaaactggacaaaaaccgtatcgaaactgttcatgtgtatctgcctccaaaagcagattccggactcgaggaaaacgacaactgattttaatactacaaaggacgactggttttgaacaatcattccaaaaccagtcgtcctttttccccaatgtaatttccatcacaacagaaaggatgtatacgatgaaagatttatctgatttctgccctgaatttcaggaagcagctgcttattacgcaagtttaaacacaccttccgaccaggcgatcctggtggaatttttacgggagacccaggatatctttggctgtatccccaatgatgccaaagaacagattgcatcgatcatgcaggtaaagcctgccctgatcggtactctcatccggctttatccgagtctttccagccagacttatcaaaaagaaattattttgtgtacgggaagcacctgcagcagcaaacaatctgccctgcttttaagaaaactggagcaaaagcttcagatccgacagggagaggtaacttctgacggcacttaccttctgcgtactcaaaaatgttttaaacaatgcggacaaggtcctaatatgaaagtcggtgataagatgtaccaccatgtaactgccgaactcatcgatcagctgttttaggcctgctgttttcaggtgctgacgatcacagtcggatatccggctcttttgagcatctgctccatccttgccgcatcttccagtgtaatataattccccactcttacacggtagaggcgatctccttccacaatataagcaggaaaatcctgttctaacagttcttccagcaggttctgtgcatatctttcgtttcggtatgcaccaacctgtacttcatatcccggagattctacctcatgattcgactccagtgtatccagaattccataagcgatcgcctgtgcgatttcttcaaaattttcgtcaaacaatttgttgtctacatctgaattgatgaatccaacctccaccagcactgccggcattttcgttctctttaagacaaccaggttcggtcttgcctttaccccaagattcacaaatccgatatcttccagctgttcgttgatgttttctgccatcttaagcttaatccctgatttgtcatatacaagactctctacccctgatactgcattgtctgaaggaaacgaatttctatgaatagaaacaaaaaagtctactcctgcattgtttgcttccattgccttctgataaggagattcatacacatctgtcgtacgggtgtactgcacatccaggccatgagcctccaaaatctctcccaccgccagcgtcagacgaagggtatcatccttttctttccgctctttataaactgctcccggatctcttcctccgtgtccggcatccagcatgattgaatatggcatattctattgatttcctttcctgtccgttctgtaatagaatatgcagattctgatacaaaggtgcaatcaataatgcctttctgacatactcagcattttctccaaaaaatgttcgaactctaccgagaacaagtccatcacttcctgataaatctgggccttcatctcacaggtactggagctgcatatggaatccttttccctcttatgctcctcctgctgcattctgaaatacagtgttttgagcagattggaattttgtgtatgttcacaatccagatacagttctactatatcccgttcccctttggtcaaagccacttcaaatgcatgccgtattgctctttctactctggaggccgtcgtttcgtgcaggcgggcaatctcaaaatataaagagcagatttttccgtcaggataataaggatccgtatcaaataattctatcgcatcacagatatacgtaaatccttttatgctggctggtacccccatttgaagaagtacatcgattgtcttgtctctcatttttctaaccctctcgtttcttgcccgcaccaccacaatgtatctccagtctacgccatatccctgtaaaagtcaacaagtttcttgtaacattttgttgactttatatgattcttgcactatacttgttgctataaatcgaaataggaggatgtctgtatgaaaatcggaaatcaaatacgtcatcgtcgcacagaactgaatctttcccgtggagaacttgctaacaagattcaggtaaccccatcagcaatcgcaaactatgaaaacggtgtcagctatccaaaacccgatattttggtcgcactcatgaacgcactggatgttgatgccaattatctatactggaattatctttcaaacagcacgattcaacgactctaccgaaaagttctcagccccgaagaaaaagaatctattttaaaataccgcgaactctctgaaaacggcaaaagtctggtccgcctgatcattgacgaagaatataaacgcatgaaccagagcgaatatatcaatcttccgttttaccgccccggcatccgcaaagtacattccggctttctttttcaggataccactcagacgatccgggtgcgcagaaagcatgttcccaaagacagcgatttctgctttcaggttctgatcgaccgctatcagccggtatttcaaaaaaatgatattctggcactgcagcgtatcaatgcctcacacaatgaaatcggacttttctggttcaacggcatctactatatccggatcctctccgaggaaggcagcatccgcaggcttcgttctctcaatgtgatcgatcccgatatcgtagtcaatgaacaggatcagctggaatgtatcggcaaaattcacggaaaagtttacggaaactatgagatttacggaacttgtgaagaagatgagaccatacccgaacacgagattgaaatccaataaaaaagcagaatcttgcgccatatttggtacaagattctgcttttttatttttattcctgaacaagtccctgttctttcattacattgacaacctgattcacatactctgtgcatatctcatctgttgccgcttccaccataacgcggatcacaggctctgttccactttctcttaccagaattcttccgtcacttccaagtgcttctgccgctgctttgatcgcattctgtacggcttcattttccaacgctgtctttttgtctgtcacacggacattctgaagaagctgcggataaatcttcacttcagagcacagctttccaagtgactgtttcttctccataatgacttccatcagcatcagagaagtcaggattccgtctccggttcttgcgtgtttgctgaaaataatatgtccggactgctctccgccaagaacaaatccgttgttcatcatgttttcatacacatatttatcaccgactgctgtctgctcatatttcatgccgactttatcacaagccttgtaaagccccagattggacattacagttgtaactatcgtatttcctgcaagtcgtccctgttccatcaggtattttccgcatacgtataagatcagatctccgtctacgacatttccattctcatccacggcaatacagcgatctgcatctccgtcataggcaaatcctacgtccagattattctcttttacaaatgcctgcagcttttcaatatgtgtcgatccgcaatttgtattgatatttacaccatccggctcattgctgatcacatatgtctttgctccgagtgcatcatacacactttttgcaatgctggatgagcttccattggcacagtccagaccaatcttcatatctttaaaggaacgtgttgccagtgagatcagatgtccgatgtaacgatttcttcctgccgcataatcaactgttcttccaatgtgttccccaaccgcaagtggaagctcttctgtttttccgtcaatatacgcttcaatctgctcctctacttctgcttcaatcttatgcccctgtccgttgatcaccttgattccattgtcataaaacggattgtggctcgcagaaatcataattccgcagtcaaaatcttctgttcttaccacataggacacactcggtgttgttgttacatgtaagaggtatgcatctgctccggaagctgtcagtcctgatgccagtgcatattcaaacatataactgcttcgtcttgtatcttttccgatcacgattctggctttcttctctctgccaaaataccatcccagataacgacctactttgaaagcatgttctactgttaaaacaacatttgcctctcctctgaatccatcagttccaaaatatttacccatatgtctccctcttattctttattttgacctcttgtgtcactgcctttcagtacgtcaccgcactgacgctcttattatattctttttgattttaaaatacaactgttttctgttttcgttactgtgagttgttctatagttactgttcccaccagatgctaaatatagattctttcccttacatgcaagcatgacggttcagaacctgtatttaacatccggtgtgaacagtaacgctctatacaaatttctgtttttcctgtacaatgtataatgtatggtcatatattcgactacaaacaataagaatttctaaataattggaggaaatgatgataaaattaattgcaagtgatctggatggaactcttttacaaaacgatgcccaggctctcactccgcgggcaatcgatctgatctctaagctgtgcgatgcaggaatccattttgtgtctgccagcggaagacaatacgacaatcaaaagcgtgtctttgatcccttgaaaaaccgtatttcatttatcgcagagaatggctcaatctgcatgcatcagggaaaagtcatttcccgtgctacgatcaacgatgatctggcagccaggattttaaaggaaatcaaaaaacagaatcatttcgaaatcgtagtttccagagaagatacctgctttatcgaaaacaatgttccggaatttgtcaaccacatcgtcaatgtaatgcacaatacaactcagatcgtggatgatatcacgaaagtagacggaccgatcctaaaaatcgccatctgcaacatgtctgacagcactcatattgtcgataaatatttgaaacaccttcaggatctgtttggctctgagatcaaagtggtcacttctggaaatatctggatcgattttatcgctccaggaagcaacaaaggaaccgcccttcagaacttgatggatttattccatgtaaaaccggaagaatgtgttgcattcggagatcagtacaatgacattgaaatgctgcagcttgtcggcaccagctatgccatgtccaacgcagctcctggaatttcttactattctacctatgtgacagattctgtggaggacgtactggaagacattcttgcacaggtacgttaactctgtagcaaaaaaggatgacatctgcatcagtccatgtagtcgtcatccttttcacattttatttgatatgttacacgttatctctcttcgatctccatgatcatatccacacgtctctggtggcgtccgccttcaaactccgtgttcagccatacatctacgatcattttcgcgagctctgcacctaccactcttgcgccaaatgcaagcacattacagttattgtgtgctctggacatcttcgctgtaaacggctcgctgcaaactgctgcacgcactcctttgaccttgtttgctgcaagagatattcccagtcctgtaccgcaaatcaagattccacagtccacttcttttgcaacaactgcacggcctactgcttccccatacttcggatagtcacagctttcagatgaatccgttccgaaatctacgacttcatgtcctttttctttcagaaattcgatgatttctgcttttaattccaatgctgaatggtcatttccaattccaattctcatgatctctctcctcgtatctctttctttttccaattctcttctattgtccaatatccaaagataattgtcaagcatccacatgtactttctgctatacaaaacaggcacgaaagactggcttttgccagatcttccatgcctgtttcactttttcaaacctgctatttatatttattgttgtaaataaacaagagtgtcagcaagcctaccagtcctgccagttccataatcagtcccggcacgccgatatttttctgtcctatcatgatcagggcgaggcagacaacaaaaacaacagccatgatcaaagttcgaatcttttcttgcatttttgtctcctcctatcctttgagtccaccaagtgtcataccttctgtcagtctcttctgtacacagatatacagaaccagtaccggaatcataacgatcacaagacctgcatacatgataccgtagttggttgctgttctctcgactgccatcagattcttcagtcccattgccagtgttccgttttcatccatcaatgtatatgcgataatatattcattccagaatgtcaggaagttgaacataatcactgtcagaatacttggttttgccatcggaatcatgatcttaaccatcgtcttaaagtatccgcatccatccatataagctgcttcttcaaatcctttcggaagtgtctggaaatatccgctcagcagataaatcgtaaacggcaggttacaggatgcgtagatcagtgccaggataaaccggttatccaggaagaaatctacatgcagagccttgttccaggaactcagcatcaaaaagatcggtactacaatgtaattgacattgataaacaatcctgccatgaacgcaccattgaagaacttctttcctctgaacttaaagcgtgccagcacataagatgccggaagagccaggatcagaagaagtgcaagagccagcgctgtcacaatgaaagagttcaggaagaaatctcccattcttgcatcctgaaatgctactacaaagttctgatagtaaaactgttttggaagtgcccatggatttacatccgctccaatgaattctgcattcttcttcaaactcgccataaatacccatgcaaccggtacaatgatcgaaatagccagagcgatcagagctacatagataaaaatcttgtaaagtacatgtgtaggaattctgtgttttttctcatgcatatctctacttcgctcctttctagaattctaagacttctctgtctgtaatcttgtttacaactgctgccagtatgaacgagaagaggaatacaacaactccgatcgccataccgtatccgtatacacctgctccatatgcctgcttgtacatatagttcaggaaaacttctgtctttccgttcgggcctccgtctgtcatgatctgaacaaacaggaaacttaagttgatcgtactgatgatatagaatgtcaatgtagtacggatattgctccagatcaacggcaaagtcacctggaagaaaatctgaatctctgttgctccatccagtgatgcggcttcatagagatcttccggaattgctgccatactggacatatacatgaccatataatatccgattgcctgccataccagtgcaaagatcacagaataaataacaatactcggatctcccatccactgatgctttaatccactcagatgaatcgcatccaaaaatgtattgagcagtcctgtactcggattgtagattgcaccgaaaatacctgcaataacaacaatactcaaaatgtttggtatgtagaaaataattctgaagaaattcttgcctctaaagttcccccttgaaagtaacgccgcaaataaaactgcaagaacgatcgtacagatcattaccatcacaataataagaatcgagttctgcatcgcttccagaaagttcttatcatccatcagttttacaaagttgctgaatcccacaaaactcttcttatttgtaattccacccatgcggtacaaggacatacggaagacattgatcgtcggaataaatataaagatcgttgccagaattacagcaggcgccagacaaatgaatataaatcttctctgcgctttctccctgttcatagatttcctcctccatactgctgtcttttaaaaacggtgagttatcataactcaccgtttcatgtcagccgaatatcactctcttatttctctaatgcgtctgcgcatttttcccaagtctctactaactgtttctgccattcatcaactgtcatatcgcctgtgttgatagactcgaccggtccgtaaacagcttttgccatatccagtccttcgatcggagctgttgttgcccatttacctgtaacagctacaacgtcatctgctgttgctgctgcataacagtcttttgtaacaccgtctggaagcttgtctgctgctccttttacaggaactactactggtgtatcagattcttttccggactctttgtctgttgtcttgttgttcagacagatatcaactacttcgtcagaatacatgaatttcacaaattcttttgcaagatccatgttcggtgcatcagcaggtacccacatctgctctgtaaatgtgtatacagactgtgattcatcttcgctccatttcggaacacccatcataccccattcgtaatctgccggagtagaagctgccatctcaccgattacccagtttccgtttggcataaataatgcttttccatcgattacgttctgctgattgatcttgaatccaccgtcagcgtttgcattggaaactgtatcttcctgtgtatagtcttttcctacaagttttgcaactgtatcaagaactttctttccttcatcagatgtccatgtatttgcatcatattttaatgcatcattgtagaaatcaagtccgcctgcctgtgcgagcattgcatagattgtagcatcaaagtatcctgttgtagggaatgtaaagagtgcatgtccgtctttcttagcctgctcgccaagtgcgaagaactcatcccatgttgtcgggatctcgtactgttttccttcacctaccaatgtcgcattgtaccagaatcctgtcggtgtgtagaaaatcggtgccagatagatctttccgtctccgtatggctgtgcatctgtaccatccaggataccatccagcatcttgtctttcagttcgtcatcgaatacatcagagatatccgcaatcgcttcttccttcagcattgtctctgtgaatccacttggctgtcccaggttgtaatatacaacgtccggtacatctccattctgaattgcttttgtcaggtctttgtccagttcaggagacatctcaagttctacttttactccatcatgagactcttcaaatgctttcgcgatatcttcccagatctgagttccgttaccaccttcgaacgcagcaactttcaggactgtctcttctgagcctttgtcagcatcttttcctgaatccttgcctgaatcatcacctgatccgcatccggccagcatagaagttgccatggcggaaacaagtgcgagtgccatcagttttctaaccactttctttttcatcttatatcctccctgtcgatttgataactttatgatagctcatttgcctatatttttctattcggaagttggcttggattttataattattgctatttcaccttagtttttttaataaaaacttttttctttgtaaatcaagtcattttaataagtataactttatattttttatcacttttacacaatttatttttcttttttcgacaatcaaatcatggaaacctgtttattttagacaaattccgacattatacggatttgcggatattttgtttcttattcttcacttccggtcaacagacggatgggttctttttttaggttttgccaataatttctccactttttccacatttggtccggctgatttcacagaaagaaacgcctgtactgcattctgcaccggattgttgatactggaaagtaagtataaaatactcagcattgcatttgcagatacttttccttttgcagccgtccaggcacagaataaaatctgaaaaaacaacgtcccatatgtcaatgagagagcaaacacttcaccgctgctttcacagaatcgagagtgataacgagactcttccacatcctttacacaacttccaaacaactcttccgtttcttttccaatttgaaaacattgaatcacttcaaatcctccaaagaaatctttcagtttccctgtatactgttctaagttccggtaaaaccttccctcagcttcggaaatcacatttccaaataaaaacggtactgcaaccggtatccacactgtcagcagaaccatacctgccacccggccatcgtaagagcaaagtactgccagacagccaagaaaaacaaagctctgctgaataatctccggaatcttcgcaaaatagttattctccaaatttgttacatcattattcagtattgagagatacatcccactgttgttgctcgtaaactggatcatatcctgatccagcactgcatcgaacacatccctcttcagctgtatattgatccgcttcagaaatgtcctccgaaagtaagcgcaggcattctgactgactgcataataaaaaacagtaaacaaaagaatccctgccagtctcaaaatcgctgcctttgtcatatctcccggcaattctccaattttctgaaacacaaatgcccacatcgtttcccccattcccgccagaatggaacataagatcacacctgccagatgccccttatttctttgaaaataaacatgaatcgaacctgttttctgtatcataatgtcctcccctgctaatgattcacggtatagaggctatagaaaaattgctttttcttcatcaactcttcaaatgtccccatctccacaatctttccctgatgcatggtcaaaatgcagtcatactgtctcaaaatcgactcatgaaatcgatgtgttacattcaatatggtggtctctttttgacttaagatcaactgctcgatctgcatggaaagttctgcatccagactggacgttgcctcatccagcaataacacttctgccctggttaaaattgcccttgcaatcgcgatccgctgtttttccccaccggaaaaattattgccattttcgcaaaccatctgctctgtccccaatggattgtcttctacgattttctcaagtcctgccttttttactgcagctttgatttcttcatccggatattcctgaaacatcgtaatgtttgcccgcaatgtatcttcaaacaaaaacacattctgatggatcatggctattttccgacttagactttttctttctatcatccgaagttcctgttctcctatgagaatttctccctcgtagtctttataatagttcgccagcagcttcaacaacgttgattttccgcatccgctgctttccacaatggcatactttttccctttctcaaagcacatattccccccatgtaagacctcttttgctttcgtgtagccaaatcgtacctctttcaactccaacggcatgactgattttaccgattcccctgttttcttcgattcttccggtctttccttgaaaagcgtctccacctttcttgcatttggaattgctgccttgacatccaaaagcagatatgcaatctcccggatgggattgttgacactggagatcaaataaaaaatactcagcagcatccgctctgaaatacttccgataaataccagatacgctgagacaaataactgtatactcaagatcagatacgtcagcaataacgtcaatattccgtatggattctgatattgccttccctcataacgccgtttctccacatcttccacacttttcgcaaaccgttttttcacttcgtcctcaacctgaaaactatgaatcacttcaaaaccacccatccagtctttcagcttccgattgtaattctcaagttcttcatataatgctttggtcttctgtgacaatttctctccgattaaaaatggaaccgccaccgggagtaatgccgtcaaaatcaccagacacacgatcctgacgtcataatagcagagtacacccgcacaagtcagaaatacaaatccattttgtaaaatctccggaatcttcgcaaaatagttgttctccagatttgttacgtcattgtttaacacagacagatataccgcgctgtttttctccgtaaactttgccacaccttttttcatcagcgcatgaaatacatcctgtttcaattgtgtattgatctgttttaacaaccttctctgaaaataaaacatcagctgttgactgaccacaaaatacagcagacacaatcctgcagacagacataattgctggatggaggtgtctgccgttcctcctgcaaatccactggcctgttcaaataaaaatgaccagagcatgtaagaggttccactcatgattgaaaaaataacaaatcctgtaaggatccccttatttcttccgaagtagccgtgtacgaaaatctgttcttgcatatcacatttcccctttcacagttctcattatcaaagaaaacgcaaaaaaatcccatgacgtaatcgaaaaacatctttcccgatttcgtcatggaattctttcttattgtatgttaatgtatcttttccttcgatggccagtttttctgtatataatatttcaaagaattttgcaattccagatcaccgaacatttcactcaaagcatatgcctgttcaaattgctcttttctcacatcctgcccggcctctttcatggcatagatccggtttgcaaacagcatattcaacggtccctgtcctttttccaaaaccattcggattccctgatctgccagtgcaattccttctttggtttttccaacatcaggaagtgtgtttgccagattgctccagatcagcatcacttctttgaaatgattttccatcctgatcctacttcttccataatccttcaaaagcagctcccagatttctactgctttctctttttcaccacggattttttctgcaagagcaatctgctgcaaaagtattgtctctgtatttgtaaatacatgtgcacgctcttcacaaaacatccgttgttccatcggttctttccgtgtgtaagacaatgtttttctatgccgtctgatccattcatcttctaaaaactttcccttttggtactccagacaggttctgtatccttccgtatactgtctgttaatctttttactcaaatccagtttttcttccagcctttgctggcacatctcccaggctttcagattggaagccgacaccgctgctcttagttcttgcaccaactccagcaccgcaaaatcctcagtccacacctctcccatatagtaccccgaccgtattttcaacctggacttcaatgcttccagatttttcagactcggacttcgctttcctgtttcgattctggaatacgtctccggcgtacagattccttcgctgatttcttcctgagacgctccttgctccactctggctgaaagcaaaatttcaggtattaaaaaaagattctgtgggatctcaattccccattctgcctgcggaatttccacgccatattcctgatacatcgcttccaaaatctttttccaaacttgataagaaacagcctcgaactcttttcccagacagattgcatccttcctcatatacccaagcaattccaccgtatactcaaacctctgatcttttctgctgttttcaaatgcttctctgcacaacaaataccgtttctgtgcatttgcctctccagtcacataccgacaatatagacacaccgctcgcggaaaaatctgattttttgcctgaatatccgtcatatgttcctgaatataacttagaacatcttccagcaatttggcaccctgtcctgcccgcgtttccatctgacgctgtgcatataaaagcagaagttctaattcttgtatactaaacaatccctcagcagcaatccttcctgtaaaatctggatttgtcaaccggatcgcctcctccagagaagaaatctccccctctttcccattgacgatttcctgtatatactgataaaactgctcctgcaaaaccaggttgacacttgcgtcccgtgcttcttttctcaaaatgagttcctgtaccagagcaatatttttctttcttaaagtctcttttaccttgcttttccactcaaaatacgcatac

SEQ ID NO: 6982 - DNA, 68016 bp, Unknown
  gut microbiota DNA sequence
ttttcataacgcgaaagagcggaaacagcacacactcctctgcataaccgctcttgactgatcccccgcttttcccgctcttttctcagaaatcctgaaaacatattttccatttccctaaattctcatccctttttctaattccaacagatatcgctttacctctactccacaagcaaatcctgaaatatctccgctcttatgaattactctgtgacatgggataatcagcaaaatcggattcttattattggcctgccctacagcacgtactgccttctcatttccgattacagccgcaatctcctgatagcttctcgtctctccatatggtatcttctgcagctcctgccagacactctgttggaattgcgttccctgatatttcaacggcacatcgaattgcttccttctacccgtcaaatattcattcacctgcgtatagacctcatacagaaaatcagaatgcaattcattcttcatggtttgcacagaatttgcttcccaaaagagctttgtcagcttcttttcttcttcccgtatggtaagaaaaccaatcggggtgttgaatgtatatgaatccgtcatatcctgttcctcctactgctcatcacattttcaaaaaagcacaacaaccgatttcatctacctttttcagtcccaacgactgataaaataaaatcgtcttttctgtattgtctgtcatcagttcaatctgatacacatcctcacatcgctctaaaaccgcacgcattagttgactcccgatgccctttcgttgatattccggacgcaccagtaaatcctgaattaaaatgaccgatgcaccatccccaacaactctgaccatgccgatcaattgctttccttcaaaagcagcaatctttaaaaatgaattctcatatgcacgctccagcatttgaggattccttgtataattttcccagccaacactggtgtaaagtgataaaatttcttcctgattgaaatctgtgtattcccgtagttccatgcaaattcctcctgttggtatccattttataatcaattcagctttgctcaaagaacagcttttacggtatgatttttggggtaaaatccggattttccactgtgtccatgtggtttttaggaattttgttatcaatcaaaaagtcttgtgatatcctgatatcggttgattatacgataaatctctacgtactcgttaccaatcttgtagagaatcacatattcttcccatatcgcatatttatagtctgtccgaaagctgactcgtttggagagattcgatcccattttcggaaacctctgaagattctcaaatttaccataaagctcttttatagtcttcgtagcatattcttcgttatcttcggcaatataatccctgatattcttcagatctcttacaacaatcggattaatccgcagttttaacattttattcccccatcagtgccttcaattcatctagattcaaccaaccatctccatctttcactgcttcttcagcttcctgtaacttcatcagaagctttttctctgctcgatcacgttcataatcttcaatatccatgactacaaaacgtcctctgccattcttagtcaaatataccggctctcctttatgacagtttttcaggacttcattataatttctcaaatcagatactggtaaaatatttgccatattctttcaaccccttcctttgattttaaattgtttctgatacttctattatacacaataagctgtaaaattcaacgtagatttttacagcttttgtctcatggttgatagggctttctttttcaattgaataaatccagaaactttccccctggttttatcatggtcttacacactttcctgccattgatttcatcaaaaacagaaaaaccccggaaaccgtaaggtttctggggtatcttatatttgaacataatgtcatcttgcgataacaaatctatattcagattgtattactcgatgattgtagcaacctttccagatcctactgtacgtccaccttcacggatagcgaatccaagaccctcttccatagctactgggtgaatcagttcaactgtcattgttacgtgatctccaggcatgcacatttctgttccttctggaagctcgcaaacacctgttacgtcagttgttctgaagtagaactgtggtctgtagttgttgaagaatggtgtatgacgtccaccttcatcttttgtcagaacgtaaacctgagctgtgaattttttgtggcatgttacgctgcctggtttgatgagaacctgtcctctttcgatttctgttctctgaacaccacgaagcagagctccgatgttgtctccagcctgtgcttcgtcaagaagtttacggaacatttcgattcctgtaacaactgttttcttaacgtcttcgtggataccaacgatttcaacttcgtcagatacgtgaagaacaccacgctcaactctacctgtagcaactgtaccacgtcctgtgatagagaatacgtcctctactggcatcaggaatggtttgtcagtgtcacgctgtgggtctggaatccactcatcaacagcgtccataagttccatgatcttatctccccactctccgtttggatcttcaagagctttcagagcagatccctggataactggagtgtcatctcctgggaattcgtactcgttcaggagttcacggatttccatttctactaattcaagaagttcttcatcgtctaccatgtcacatttgttcatgaatactacgatgtaaggtacacctacctgacgagacagaaggatgtgctcttttgtctgagccataactccgtcagtagcagctacaacaaggatagctccgtccatctgagcagcacctgtgatcatgttctttacatagtcagcatgtcctgggcagtcaacgtgtgcatagtgacgtttctctgtttcgtactcaacgtgagctgtagagattgtgattccacgctctctctcttctggagctttgtcgatgttttcgaaatcaactgctgcgtttccttctactcttacagaaagagtttttgtaatagcagctgttaatgttgttttaccatggtcaacgtgaccgatagtaccaatattagcatgtggttttgttctttcaaatttagctttagccattttgaatatcctccttaaatctgtcgcctgaaacggcaattttattggtttcgcttttaaatcggctaattctgattatatttcaaaatcagccgaatagcaagcatttttgcgatttttacgcatttttattggataatactttttcctgtacagacttcggtacctgctcatagctgtcgaagaacatagagtagttaccacgtccctgtgttctggaacgaaggtctgtagaatatccaaacatttcggacaatggaacgaatgcacgaacgatcttaccaccaccaaggtcatccataccttcaatacgtccacgacgggagttgatatctccaatgatatctcccatgtattcctcaggcattgttacctctaccttcatgattggctcaagaagtacaggagaagcctgtttcatagcatccttgaatgccagagatccggcaatgtggaatgccatttcattggaatcgacttcatggtaagaaccatcgtatacatttgcgtgtacaccgacaaccgggaatcctccaaggataccagatttcattgcctcttcgataccttcgccaactgctgggatgtattctttcggaattgcaccaccgacaacagtagattcaaatttgtatacttcctcaccgttgacatccattggctcgaatttaactttacagtgtccgtactgtccacgtccaccggactgttttgcatatttgctgtcgatatccactgcttttgtgatggattctttgtaagcaacctgtggagcacctacgtttgcttctactttgaattcacgcagaagtctgtctacgatgatctcaaggtgaagctcacccataccagcaatgattgtctgaccagtttcctgatctgtatgcgcacggaatgttggatcttcttctgcaagttttgcaagagattctccaagtttaccctgagaagcttttgtcttaggctcgatagcgagctcgataaccggctctgggaattccatggactctaagataaccggatgctgctcgtcacagattgtatctccagttgtagaatatttaaatccgattgcagctgcgatatctcctgagtaaactttatcaagttcttcacgcttgttggcatgcatctgaaggatacgtccaacacgctcttttttctcttttgttgcattcagaacataagaacctgagttcattgttcctgagtacactctgaagtatgccagttttccaacgaatgggtctgtcataatcttaaatacgagagcagagaatggttcgtcgtctgaagaatgtctctctacttcgtttccatcttcatccacacctgtgatagccgggatgtctaatggagatggcatgaattcgataactgcatccagaagtttctgaacacctttatttctgtaagctgtaccacagcaaaccggaatcgcatcacatgtacatgtagcttttctcagtgccgctttcagttcctctacagaaggctcttctccttccagatatgccatcatcagatcgtcatctaattcacagatcttttcaaccagctctgtatgatacagttctgcatcttcctgcatctcttccgggatatcaatgatagaaatatcatcacctttatcatcgttgtagatatatgctttcatttcaaaaaggtcgatgattcctttgaattcatcttcttttccaattggaagctgaatgcagattgcatttttaccaagtcttgtcttgatctgttctactgttccgtagaagtttgcacctaagatgtccatcttgttgatgaatgccattcttggtacattgtaagtgtctgcctgacgccatacgttttcagactgtggctcaacaccaccctttgcacagaaaacgccgacagcgccgtccagtacacgaagggaacgctcaacttctactgtaaagtcaacgtgtcccggagtatcaatgatgttgatacggtgctctaaagcgccctcttttggtttgcagttttcctgcagagtccagtggcaagttgtagcagcagaagtaattgtaatacctctttcctgttcctgctccatccagtccatggtagcattaccttcatgagtattaccaatcttatgattaacaccggtatagtaaagaatacgctctgttgttgtagttttacctgcatcaatatgagccataataccgatatttctggttctctctaatggatattctcttccagccaaggttttttcctcctaatatattgtagttccccgaaacaaaaagtcccggagaacatgccatttgcttaagccgccaatctgcggctgccgctttggctcttagaaacggtagtgagcaaacgctttgtttgcttctgccattttgtgcatatcttcttttttctttacagatgctcctgtgttgttagcagcatccaggatttcgttagctaatctttcttccattgtcttctcgcctctctgacgggagtacaatgtgatccagcgaagtgcgagagcctgtcttctgtcagctctgacttcgatcggcacctgataagtagctccaccgatacgtcttgcttttacttcgagtactggcatgatgttgttcatagcctcttcgaatacttcgatcgccggtttttcagcttttgcttcaactctttcaaatgctccgtatacaatcttctgtgctacacctttcttaccatctaacatgatgttgttgataagtttggtaacaactttattgttgtatattggatccgctaatacgtctcttttctgagtatgtcctttacgtggcacggtccttccctccttaatcataatttccggattctttccgggattaattcatcggtactcacatgtgtctttctatggaatcacaattcatgtgtcgcggccgcgggacgattgtatctaaatccgcagccctaacttattgaacgtatcgtccaataaggtacgataatcatagttctgtttgtgatacgatttaactatttagttacttctttgctaagcgctctgtttcttatttagcgtcttttggtctcttagcgccgtatttagaacgagcctgtcttctcttagcaacacctgctgtatcaagtgtacctctgacgatgtggtatcttgtacctggcaggtccttaactcttcctccacggatcagaacaacgctatgctcctgaaggttgtgtccttctcctgggatgtagcttgttacttcgattccgttagaaagacgaactctggcgatttttctcagagctgagttaggcttcttaggtgtagctgtcttaactgctgtacaaacacctctcttctgtggtgcagatacatcagttgcacgcttctgaagggagttccatcctttctgaagtgccggtgctgtagatttcttttcagaagtctgacgtccttttctaactaactggttaaatgttggcattctttttcacctcctatgatttcactcgttgtcttccggcttatgccgaaagggctgcagataatggttcattatctgatatttgcgcacaaaaacagaatttctcctgtgcacgctaaattagtgtattacgttttttcccgaaagtcaagggattttctaagattttctgcaactattctctcttttttatccgaggagccagcaccataccggaagtgtgaataatgacaggatggtcgtgacaaagatcattcctgttgcatatccctcattcccatgatatttggcagacagcagtgcagttgtcaccggtgtcggcatccccgcaataataaccgtaattccccgaagtaatgcaggaatcggaagcagtgcggtaagcccgaataaaattgccgggatcaggatcagtcggacaatggtgtaaagcaccattgttccatccagtattcctttcggattcatctctgccagcatcatgcccaccaacatcatactgaggggtgtattacagctgctgatccctgaaatcgtattttccacacttaccgggaaggacattcctgcgatcatgacgaaaagtcccagatagatggccacaatacatggatgtgtcagcaccttttttaccagactttcacttttttctttcataaaacaggatgttcccacactccacataacgatcctcaccggaagcataaacacggaagcataaaacaatccgttcgttccataaatcccttcgatcacaggatttccgagaaaaccgccatttgaaacgattgttccatatcgaagcggctttctcttatccggttcagcctttctgtaaaagatacagctcattattatagaaagaatacaataccctgtcgcaagaaacagaacctgggcaaagcttttgagcatgctccactcccattccatctgaaaggaatggaagatattaaacggcagtgtaacatacagacagaaattgaccatgtctttgcgtcctgtctctccaatgatattcttttttctcaccagaaatccgactgcaaccaacagaaacatcatcagctgcatgttcaccatattctgaaatgccatttttagtacgctttaccccaatataccatgtgcttcgccggttttccacagcatacacacacatctgaaatctgttcctgttcctctggaatacatctggatgtcactccgcctgtctgagctttgatttcttcttcacaggcatcatctccacaccacattgctttgataaatccgatctcttcctgtgccactttcaccatctcatccatatttgctgctgtgtggatatgagaatcaaggaatgctttcgctctctcaaacatatctttctgaattgtctccaggatttcggacagtttttctgtcagctcatccattgccactacaattttttctcttgtgtcacggcgaacgacaacaatctgaccattttcaatatcttttggtccgatttcgatacgtgtcgggattccgaccatttcctgctcgctgaatttccatcccgggctcttttcagaatcatcgatggaagctctgtatcctgctgccttcaatgctgcaagcagttcattagctttatcaagcacaccttctttgtgctgtgcgatcgggatcactcttgtctgaaccggtgcaatgtgcggaggaagtaccagaccactgtcatctccatgcaccatgatgatagctccgatgatacgtgtggacagtccccaggatgtctcatatacgctgtgcagtttgttttctttatcagaatagctgattccgtacgcatccgcaaacgcatttccgaagaaatgactggttcctgactggagtgcttttccgtcatgcatcagcgcttcaattgtatacgtatcctgtgctcctgcaaatttctcacttggtgtctttcttcctgtcacaagcggaattgccagatcgtcttctacgaaactcttgtatacatcacgcatcagaagtgttctttcttctgcttcttcatatgttgcgtggatcgtatgaccttcctgccataaaaattctctggaacgaaggaacggtcttgttgtcttttcccatctcagcacagagcaccactgattccaaacttttggaagatctctgtaagactgtactgttttgctccacagatcgcagaataaagtctcagatgtcggacggatacagaatctctcctgcagttcttccattcctccatgtgttacccacgctacttccggtgcaaatccttcgatatgatctttttctttctgaagcagattttccggaatcaataccggaagatacacgttttctacacctgtctctttaaaacgtttgtccagatttgcctgaatattctcccagatcgcatatccgttcggaagataattcaaacatccttttactcctgaataatcacacaattttgcttcgcgcaccacatctgtgtaccactgtgcaaaatctacttctctggccgtaatggattctaccagttttttttcttttgccataatgttctcctcttctttcttctctgtttttgtttcttctgggaagtatcctgccctgtattttttcgtaaaaaagccgagccttccttcccgataagggaccgaaagactcggcggtaccaccctgattaaccacagtatctctgtgattctctcttacaccgttaacgccggttctacgccgcattttcatacgaaagctcccaggccggttctataccctttccgcagaagcctctcacctgactgcttcttctctgtgccgttctctgatatatactaatcctgttcttcacccatctaacatattcatcgtgaattctaactgaatttctcacgattgtcaagcaatcagcgcacctgcagcaatttctgtttcaattcattttccagacgctgcatctctgcctctgcttcctgacgtttttgccttccttcctgctgaatctgcatcacttcatccaacgtagagattaaggattcatttgtcgcttttagtgtttccatatccacgattccacgctcagattctcttgcagtttccagcgtcgccatcttcaatgtatccgcattctttttcagcagttcgtttgtcatatccgtcacttccctctgagctgctgccgcctgtgcagaatgcgccacaccgagcgccagtaccatctggctcttccacagcggaattgtattcacgatcgtggactggatcttttccaccatcacggtatcattgttctgtaccagtcggatctgcggtgctgtctggatggagatcattctcgtcagttccagatcatgaaccttcttttcaaatcttccgcacatcgcctccagatctctggccgcctgtgcatcctctgcaagtccgctggcctgcgctttcgtcaggagttccttcaactgtccctcctgcacttcttccagctttttctttcctgccagaatatacatcgtcagctctttaaaatatgtcaggttcaattcatacatcttatccagaatcgcaacatctttcatcagctgtacctgatgtccctccagagcctggcagatctggttgatattcgtctccgccttggcatattttgttttcagtgcctgaatcttatttgcctgctttttgaagattccgaaaaatcctttttcttcttcctcgtcaaaatttttcagctccttcacaacattcccgagaagttctcccacttcccccaagtccttcgtctttacattttccagtgcagtctctgaaaaatccgccatcttgctctgagttcccgcaccatactgcaggatcatggcagaattggtcaggtcgatctgatttgcaaactgatctgccatctttctctcttcttctgacagaacattttcatccatcagaggctcttcttttttcacttccggctgtgctttttcttcctccgcaaatggattcagtgtcagtgtcggtgctgtctgaaaatctttcaattcttcgctcatcattttcctcctgttgaaaagtcatttttcgtaagtccttcctgcgccagcattgtcttcagcacagaaatatcagaggacacatcccacgctgtctcctgaaacagatcatccagaagcttttcaaatgcgatattcaatgtatccagtgtatcctcaatctcctttttcgaagaaagaatattctccccctgcacaggctgtgcatccagctcctcatatgcctctaaaagcttgactgccgtcggaagataatattccatcagcctgcgaatatcggtcaccacttccgggttctgttctacccgcgcaaagatccgttttgtcaaaagctccattcgggacatcttttctgataccacttctcccggaattgcatcattacattcccggattttgcggatatatgcatttcccgcttcaatcacttcctgtactttcggatccagacctgctcttctgtcagcgtctgctttttgtctctcttttgactcctgctctctggctttctgttgccttgcctgtgccatcagttcctgatactgctcaaatgcttccctgctggtcatcagacacgctttctgctcatccagatgcccctgaagaaaccatccttttctgatcatagtttccagatcttttactacaaatttttcttttttctgtaccctcagcgccagatctttcacatttccatattctctgccctgtagctcttctatataaatctgaaaccgcttcaccctgcttaaaagttttgtcccggtgattccaagcgcggtaaatactgccagaaggatcacctgtatactaagtgcgacggatacgccgactcccgctccaagcagcatcccggtcacacctgtgatcagtccgccgatcaaaagacatcctgcaatcgtataacctgtgatcgtcatcgtcagtcctgctgcttttttcgctctcgtcccggcatacaatgtggggcgttttaactgattcaaatccagattctgccaggcaccctttgtcctgtccttttgcctcccggtaccatagtccgctttctgatactgatatcctccgcgggggtttctcatcccgtctgtaaattcatgaaaggcactgtttactgtatctgtaatggtctgattcaatctccgaaaatctctggagtccactgcatcctgcacggtccgtctgatatcctcaccgaactgttcccactcccaatttgtcctcatatcttcaacctcctgccgccagtcaattcctaaagtatcctgtctctgatttccagcagatcactctatgtaaattagtttagagatgttttctgtaaaagtcaagaatcccttgaccactcttttgttttatatgataattgtagcagatttcacaagaggagcgtatcaaaatgaagccacatattttatatgaagaccaggacatcatcgtatgtctgaaacctgccggtatcccgactcagacaagccgccccgggcttccggatatggtcagcattttaaaaaatcatatctatcagaacagcgcacacaaaaaacaaccttaccttgcagtaatccatcggctggatcagccggtagaagggctgcttgtatttgccaaaacacctgccgctgccaaagagctgaaccgtcagctccagagttttggcttcggcaaatattatcaggcggttcttctcggatgcccacagactgctgacggaattttagaagattatcttgtcaaagacgggcgcacgaacacttccagaatctgtacagaagagacgccgggcgccaaagttgcacgcctttcctaccatattgcaaaaacaacagcggaattttcactggcagagattcatctggataccggacgtcatcaccagatccgggtacaaatggctcaccttggctgtcccatcgcaggagaccgaaaatatgatccgaaccagacttctttttcccaactgcagctctttgcctgccgtctggaattcgcacatccaaaaacaaaaaagcacatggaatttacccatgcgcctgttttgcgtgtttttgccgacgaaacaccagcagatcatcctgtcggataatcgtatttccattgggaatgagagtgcttccttctcttttgaccatgacaatgagcacccctgctttctggtccagctcattcactggtttatcccgccatttatgatttttgtcaatttccacctcatacaatgtcagattttcccggtcttcaaaggccggggctgcacaaatcagcagatcgccgccttctaaagatgtatcaccattcggcatcattgtctcctgtccccgaaacagcagtaccactaaaactcccggcggcatttcgatttcttttagtgtttttcctgcaaacggatgattgtcagtaatcttgatcttgacaaaagaaatatcattttcatcctgatagtcattaaacgtccgcatgacattggcattcttatcgatcatttccagctttctggatacagccggaagtaaggtaccctgaaccgcaagagacagcagtacaatcacaaataccatgttaaacaaattgtatgtcatcggaatgccggataagacaacataaatagaaaacacaatcgatgccactccccgcaatccggcccaggaaacaacgccgatctgctgccaggatgcaccaaacggctttaatatcgcaagcactgacaccggacgcccgataaacagcataaaaagacataaaagcaatgcgggaacaaacacttccggcagctgtgacggcgttacaagcaatcccagcaagaagaaaataaccatctgtgcaatctctgtcagaatatcaaaaaagtggaccatctcttttttgtccggtataaaccgatttccaatcagaattccgcacagatatacactcagatatccatttccaccggcaacagacggcaacgcatatccaacgatcactgctgcaaataaaaagatcgttcttccctgtttcatcccaaaatcaatctgattcaaaataaagacagaagcttttccgatcaagaagccgcaggctgctccgatcagaatctgtttcagcagaagaccggctaccgagatctgctctccggaaacaagagagatcatcaggatcgtcatcatgtaagatatcggatcgttagatcccgactccagctccaacagagaatctgtattgtacttcagagagagctgcttggatctcagtacattaaatacggacgctgcatctgtagatgcaatgaccgatccgatcaaaatcccttccatccagcccactcccaacagcacatgcgctgctgcccctaccagcgctgcggtcatcactacgccggctgtggaaagtaagaatgcttttcccattaccggttttgcagtctttagatttgttccaaaaccaccatagaacatgacaaacaacagactgaccgaacagattgcctctgacagttcataatcatcgaacggaatcttgaaaaaaccatctactccaaagcacattccaagaccgataaacaataacagtgacggcagcggaagtttagcagcgatgcggttcattaaaatgcaagccacgatcaccactcctgccagtaataacaattgattcatcctgtccctccttctgattttaatactttaccattttaacaggaattccgttctttcgcaatttttctctctttttaaaaacagcggctgcctcatcgtttatccatgagacagccgctgctcttattttcctcttcttacatttccccagattcttccgtatctgcttccagagattcctgataccgatccaatatcgtattctgaatcttttctcttgtaccggaattgatcggatgtgcgatatcgcgatattccccatccagagcttttttgctcggcattgcgataaacaagcctttttccccttcgatcaccttgatatcatgaactacgaattcattatcaatcgtaatcgaaacaactgcttttaattttccctcttttgtcaccttgcgcacacgaacatctgtaatctgcatactgttcaagtctcctttctccgcctgcattactgtctcaattccttataatgcatacctctcgtttttttcaactaccacttttacaccactctcaccaacatgacgtgtattggctctgatcgtatctctgctctctacaatacaattttcaatatatgtattgtccccgagatatacatcatttaaaatgattgaatttttgatcacacagttattgccgacaaatacttttttgaagataatggagttttccacagttccattgatgatacttccgcttcctataaggctgttcttgacggctgctcccggattgtattttgcaggcggcagatcgctcaccttggaatacacactcggagcatccttaaagaaatactttctcacttccggcttcaggaaatccatatttgtctggtaatatgcatccactgttgagatgttgttccagtagctgtttatcttataaccgtaaattttcttcagattcttataacgaatcagaatatcggttacaaaatcatgtctctcttcctctgcgcaatgctctatcagatcgatcagaagccttcttctgattacatagattcctgtagagatcgtctgggattttgccaccataggcttttcttcgaactcttcaattctggcagattcgttcatgcgtaccgtaccaaaacgagtcgcatcttctctgtcatccagatccttacacacaactgtaatatccgctttctttgcaatatggtattcaaggactttattataatcaagcttgtacaccgcgtctccggatgtaatgatcacatatggttcgtgacactttttcaggaaatccagattctgatagatcgcatcggctgttcctctgtaccagtccccgttattcgcagtgatcgtcggtgtaaatacatacagaccaccctgttttcttccgaaatcccaccattttgaggaattcagatgttcatttaaagatctcgcattatactgtgtcagaactgccactttctgtatatgcgaatttgtcatattgctgagtgcaaaatcaatcgctctgtaactgcttgccaccggcatcgccgcagctgcacgtttcgctgtcagctccctcatttttctgctgcttccacctgccaagataatccctactgctctcatgaacgttcacctgcctttattaatgtctcgccgcctgcaagtactccatcgctgtaatcttccggcacggtataaccactgattgcagtatttttgccaatctgtacattggatggaattctggagttttctccaatcgtagccagtccgccactgtaaatattcggtttttctttgttcggaacctcgcttccgattccgatcacaacattgttgccaatctcagtgccttccgcaataatcgccttgtctatcacgcaattatctccgatcacaacatcacgcatcaggatagaatcccgcacgatactgccttttccgatcgtaactcctccgcctaatacggaattatgtacttctccgtaaatctcagaaccattgctgatgatgcaacggtctaccacagactgatccgagatatactggggcggaatattggcactgtttgtataaatcttccagaactcttcatacagattgaattccggaatgatgtcaatcagctccatattcgcttcccagtaagaactcaatgttccgacatccttccaatatccgttgtattcataagcaaacattcttcttccgttttcgtgacaatatggaatgatatgttttccaaaatcacaattcggctgctcggataatttcagaagagcttctttcaataccggccagctgaatatataaattcccatggatgccagattactgcttggcttctccggcttctcttcaaattctttaatcttgctttcttcatctgtgactacaattccaaatctgcttgcctcttccatcggcaccggcatcgctgcaatcgtaacatccgcatgatttgccttgtggaaatccagcattacttcataatccatcttataaatatgatctcctgaaagaatcagcacataatccggattgtaagtctccatgtaatccagattctgataaatggcattagccgttccggtataccactcgctgttcgcgctcttctcataaggaggaaggattgtaactccgccgatattacggtccagatcccacgggatcccgattccaatatgggtattcaaacgcagcggctgatactgcgtcaatacacccaccgtgtctactcctgaattaatacagttactcaatggaaaatcaatgatccgatatttccctccaaaagccactgccggttttgcaacctttgcagtgagaactcccaatcgactgccttgtccgcctgcaagcagcatggcaatcatttccttcttaatcatgtagtcacctcatttctagttgattgctgttattataccatatttttctcatccgtacatgttttttacaaaaattttgcataatctttttcctttttgtttatttggtacaaaaagaacttcttttaattttccccatatatagtataatataaactgcaaagaaattttatgactaaatttaataaactttttacttttaaaataaaacacacaagattttcaactattttcatagtaagggaaggtaatcatcatatgtataaaatcaatttcaatcagcctattcacgttcattttatcggtatcggcggcatcagcatgagcggtcttgccgagattcttctaaaagaaggatttaccgtatccggttctgactcgaaagtctctccgcttaccgaacatctggaagcaaaaggggctcagattttttatggtcagaaagcatccaatatcatcgacgggatcgactgcgtcgtatacactgccgcgatccgcagagaaaatgcagagctgatggaagctgttgcaaaaaaaatcccaatgctgacccgtgcggagctgcttggacagctgatggctaattacaaaactccgatcgcagtatcaggaactcatggcaagacgacaacaacttccatgatctctcatgttctgctggcaggtgccacagatcctaccatctctgtgggcgggattctgcaggccatcggcggaaatatccgggtcggaagctccggcatcttcgtcacagaggcctgtgaatatacaaacagcttcctgcactttttcccgaagatcagcatcatcctgaacattgaagccgatcatctggatttctttaaagatctggaagatatccgtcactcctttcatcagtttgcagccctgctgccatctgacggaacactgatcattaacggagagatcgatcagtatcaggaaatctgcgaaggtctggactgcagcgtggtgacttacggaatgtctccagaatttgactacagtgcgcagaatatcacctacgatgaaaaaggccgggttgcatttgatttcttccgaaacggaaagatggacacacacatcgtcctttccgtgaccggagatcacaatgtatccaacgccctttccgcgatcgcaacagcggagctgttgggactttccatggatacgatccagaaaggcctgctttccttctccggaacggaccgccgttttgaatacaagggaacgatcgatgatgtcaccatcgtagatgactatgcacatcatccgacagagatcaaagcaactttaaaagctgcgaagcactatccgcaccgcaaactctggtgcgtattccagccgcacacatacacaaggaccaaagcatttttccaggaatttgcagaagctctttcccatgcagatcatgtgattcttgcggatatttatgccgcacgggaaacagatactcttggggtatcctctgaagcgctctcagacgcgatccgcagccttggaacagattctcgctattttccatcctttgcagagatcgaaacatttctcaaagaaaactggaatgcaggagatcttgttcttacaatgggtgccggagatgtagtaaaaattggagaagatctcttaaaataggacttatccacattatccacatgggttattcacaaaaaagcagattttcccttgaaaaaaggcttttgcccgttcagataagatgctataatacctttgcgcatgagagagcagcgtatgaattccggaaaacagggagaggactatgaagacatttacgttaaaaaataaattccagacaaatgccacactggttgcgaacgactttatcgatcactatatggtgcaggcaaacggcgaatttgtaaaagtatatctgttccttttaagacatttggataatgccggctcttctctgacagtttctgcagttgcagactgtctgaacaacacagaaaatgatatcctgcgcgcattcaaatactgggaatccaaaggacttcttcagatggaatgtgatgcagagggacatgtctgtgaactggaactgatccagattccccagatccaagcacagataccgatcactgcggccaaaaagccttccgcatcggtcgtctctgtcaagcctgctactcccaaagctgtggcagcttctgtttcccgcccggcggcgcacgcagatgccgcaaaggcgcaaaagcagctaaaatcgctcctgttcattgcggaacagtatcttggtaagactctgacaaagacagatatggatgcgatcacttatttttatgatcatctcggcatgtcggctgacctgatcgaatatctgatcgaatcctgcgtggaaaacggccacaaaagtattcattatattcagaaggtcgctttatcctgggcagacagcgggatcactaccaaagagcaggcaaaacagcaatcccgcagttataacaaaaactgctacactgttctgaatgctttcggaatcaaaaatcggggacctgccgcatctgaggtttcgtatatccagaaatggaccgatacctatggatttactctggacatcatcgaagaagcctgcagcagaacaatttctgcaactcatcagccaagctttgaatatgcagacacgatcctgaccagatggcacaacagccatgtacatcatttgaaagatatttcggtgttggatgatgcataccagaaacaaaaagccgtttcggctgcctcagctccaaaggcaaaacctgtctccagaaatctgaacaatttcgaacgccgttcatatgacatggattctctggaggagcaactattaaacagcaattagaaggagagcactgtcgtgggactaaaaaattcacaatatcaggcgattatgcgtaagtacgagcaaaaacaactccgaaaccatgatatactgacacagcattatgaagaggtctaccgtcagctgcctgaatttaaatcactggatgattccatttccattttgtctgttcaatatggaaaacgcctgttaaacggcgatcaaaaagcaatttcttctttaaaagaagagcttgccattttacgcgccagcaagcaggagcttttacgatccagtggttttccggctgattatctggaaccggtctatgattgtccgaattgtaaagataccggatatatcggaaaccaaaaatgtcactgtttcaaaaaagccatcattgacttactttatgaacagtcaaacttaaaagaaattctcaaaaaagaaaacttcagcaactttgctctggactactattccaccaactttattgacccgaagaccggccgttcttcccgccaggtaattgaagatgccctgcggatctgccggaatttcgtcacctctttcggaacagatttccagaatctttttctgtatggagatgttggtgtgggcaagacctttttgtccaactgcattgcaaaggaactgatggataaagagtattctgttctttacttttctgcatccaagttcttttccagtcttgcaaaacatgcgtttgacaagcaagatgtagatgcgcagaatatgtttgaactgatctacaactgtgactgtctgatcattgatgatctgggaaccgaatatacgaacaattttattgcatcccagttcttcacatgcatcaacgaacgactgcttaacagccgttctacaattatatcaacaaacttgtcactggacactctggctgatctttatacagaacggtccttttccagaatcacaagtaattatatcatgttgaaactgataggcgatgacatccgaatcaaaaagaaattaaaaaacagggaggaaaattaatgttacgtcgaaaagaaagaaacttagaaaatattccagtaggagcgctcggactgattccggtcagaggatgcgaaggtcttggagacaaggtcaatgattatctggtaaaatggcgcaaagaaagcggttctgaacataaaggagatgtcgctttcaccggttatgacagagatacttttatcattgatgccgatgttccgagattcggttccggagaggcaaaaggaatcatcaaagagtctgttcgtggaaaagatctctatctgatggtcgacgtatgcaactacagcctcacctattctctgacaggaaacacaaaccatatgtcaccggatgaccatttccagaacttaaagcgtgtaatcgctgcagtcggaggaaaggcgcgccgcatcaatgtgatcatgccattcctttacgaaagccgtcagcacaaaagaacaagccgcgagtctttagactgcgcactcggacttcaggaactggtacgcatgggcgttgataacatcattacttttgatgcgcacgatcctcgtgtatccaatgccatcccgctgagcggatttgagacagttcctccaacttaccagtttgtcaaaggacttctgcgcaatgtaaaagatctgcagatcgacagtgaccacatgatggcgatcagcccggatgaaggtggtacgaaccgtgcgatctaccttgcaaacgtacttggactggatatgggtatgttctacaaacgccgtgattatacacagatcgtcaacggacgcaacccgatcgttgcccacgaattcttaggaagctctgtagaaggcaaagacgtgatcattatcgatgacatgatctcttccggagattctatcatcgaagttgcaacagagctgaaacgcagaaaagcaaaacgaatctttgctgcagctacatttggtcttttcacaaacggtctggacaagttcgatcaggcatatgaggacggaacaatctccggtattctgacaactaacctgatctatcagacaccggaattattatcaagaccatactatatcaactgtgacatgagcaaatatatcgctctgatcatcgatacactgaaccacgacggttctatcagcagtatcttaagcccggatgagagaatccagcatgtactgcagaaatataaaaacggagaaacgatttaattaaaaaagagggaaactgtttcattaattgacagtttccctctttatttcatatggtggaaatctggttttcattccccctgataacaaaatccgatccaccagtgtttcttgcagccagcagaatcagcataaaaacagccaattttcaagctgaaaatcgactgttctatgaaatatcttacagtaatccaccgatcgccataaacaatggcgcaaatacaagtgacacaactgtcatcagtttgatcaggatattgatggatggtcctgatgtatctttaaacggatctccaacagtgtctccgacaaccgctgccttgtgagcctcgcttccttttccgccgtgatttccttcttcgatgtacttcttggcattatcccaggcaccacctgagtttgccataaagatcgccatgagaacacctgtcacaagcgcacctgcctgaagtccgccaagagcttccactcctaacacgattccgaccagaatcggcacaacaactgccattgctcccggaagaagcatctcatgaagtgcagctgtcgtagagatagatacgcaagacttataatccggtttttccgttcctttcataattcccggtttctcacggaactgacgtcttacttcctcgatcatcttatatgctgccttagatacggattccatggtaaatgcagagaacaggaatgtaagcattcctccgataaacaatccgatgatcacacgataatccagcacattgatactttccagatgtactgcctgagaatacgaagcaaacagtgccagtgctgtcagcgcagcagaaccgattgcaaagccttttcccatagctgctgttgtatttcctacagaatccagtttatcagtgatttcacgtaccgatttgtccagacctgacatttctgcgattccgccggcattatcggcgatcggaccatatgcatccaccgcaactgtaattccagttgtagaaagcattcccactgctgccagagcaattccgtacaatccgtctacctgatatgctacaaaaataccgatgcagatcaggatcagcgggattgctgttgactgcattccgactgcgattccactgatgatcgtggttgccggtcctgtctcagactgctctccgatcttcttcaccggattgtaatctgctgatgtatagcattctgtaatcagaccaatgagaacacctacgatcagacctgcgattacggcgatcgctccgtcaaagtttccaaataaaaccttactcagtacaagagacacgatcacaaccagaagtgccgcaatattgcttcccatcttcagggctttctgcggacttactttctcatccccttttacaaagaatgtaccgataatggatgctacaagtccacatcccgcgatcgcaagcgggaatacaactccggaaattgcagaaaccgcaacaccaagtgtcagtgcagaaacgagagatcctacataagattcaaataagtcggctcccattcctgcaacatctcctacattatcccctacgttgtctgcgattactgcagggttacgcggatcatcctcagggattccggcttctacttttccaaccagatcagcccctacgtctgcagcttttgtatagataccaccgccaacacgcgcaaacagcgcaattgaagatgctcccaaactgaatccggacagcacgtctacatctttcgtcagaatatatacaacgctgactccaagcgctcccagacctgctacacacattcccataacggctccgcctgaaaatgcgatggaaagcgccttattcattccactttctctggcagcattcgctgttcttacattcgcctttgttgcaacattcatgccaaagtaacctgccagtgtagaaaacaaagctcccacaacaaaacagattgctgttacccagttaccgatcccgaatccgatcagtaaaaacaatacgatcacaaatacgatcagaatcttgtattctgcagtaaggaatgcgcgtgcaccctcactgatcgcagatgcgatctctttcattttctctgttccttcttcctgcttcgcaacttttacagccagatatccggcaaatagtaacgcgagaaccgatacgacaggaactacgtacattaaattttccattttctcctcctcaatctcaattttgggattttctgtgcatctgtacctccatcttatacagatgacactgcttctatagtttaccaaacaaatgaataattttcaacatagaaattcattttatattcattcctcttatttttctttttagctgttttgtttatttttccatctaaaattgatatttaaaatccattatcctttttatatgtctattttttgtttattttgtatatttgttatttatttctcaatctttttctttacagtattatctcatttttgcaagttaattttttctttctttcattttttgttttttattacacagtatggattttttccttttattatggtaatctggttgcagagaggtgttatatgtatgaagacattttttaaaaatctgacctttactttcctttgccttggtatctccacgatactggcatttttcttttttaacctaggacaaaaaaattctgtcaacactgccctgatttatattctggctctgatcctgatcgctcagaatacgaccagttactggtatggtgctgccgcctccgttttttgtgtcatcgcagcaaactatttttttacatatccctatttcaaactaaacttcatactggacggatatccggtcacatttatcggcatgctggctatttctcttatcaccagcgcgaccgccagtatgctcaaaaaacaaaaagccattgcctccgaacgggaacgaaagcttgcagaagcagagcgcgagaaaattcatgccaatcttctgcgcgccgtatcacatgatctgcgtacccctctgacgagcataatcggctcttctgcctcttatctggacgatgcccagaatatgtccgagcaagaacgtatggagctgatttcgaatattaacgaggatgcacagtggctgctgaatatggtggaaaacctgctctctgtaacgaagattcaaaatgaatccagcaaagtcaaaaagtcgcaggaaattgtggaagaagtcgtctccgaatcaattgtccgacttcagaaacgccttcctaaaatccagatccgggtttctatgccggaagattttctgatgatcccaatggatgctactttgatcgaacaggtgctgatcaacttgatggaaaatgcctatgtccattcctcgagctctgatcccatcgaccttttgatcaccgatcagccggactgtgtcacatttgcagtccgggactatggaatcggactggatcccgaccagatcccttttatttttgacggacagtacagctctgataccgctgacggacacaaaggaatcggcatcggactgtctatctgccggacgatcattcatgctcacgacggcgtgatccacgctgccaatctggataaaggagccgaattctcctttacccttccaaaagaaaaggagaacgcaaactatgcctaaattcactgtattgattatagaagacgaaaaaaatattcagacctttgtaggaaagatcctgaaaaaacaggattaccgtgtactgtatgcggactgcgggaaagaaggactgaatctgatccattcccaatgtccagacgtaattattttagaccttggtctgcctgatatgaatggaaatgatattatccaggaagtccggacctggaccagtaccccgatcattgtcatctccgcacgaagtgccgaaaaggaaaaggttctcgcattggatcagggagcggatgattacattaccaagccattcggaacctcagaactgcttgcccgcatccgtacctccttaagacacagcaaccgcttatatactacagattctctttatatccggccctatcgctacgaagatctggtattggatttttccaaacgggaactgaccttagacaaacagccggttcatctgacccctattgaatacaaaattgtatcctatctggcacagaattccggaaaagtcatgacatacgccgccatcatttccaatgtctggggaccatacgcagacgacgacaataaaatcctgcgcgtcaatatggcaaatatccgaagaaagctggaaaaagaccctgcacagcctaaatatatctttacagaagtaggcgttggataccgaatgcaggaggattcatcagaaaacgattagcagtaatctcttatgctaagattgcgctaaaaaggcctcaaatctcttttctttttatgcctttgtcactaaaatagaatctggtccgatacaagggcaatttcattcaaaggagtgacagtaatgggcaataatatcgtaatgatacttttgatgatcatcggtggttctgcaggaattttttccacactgttcattttgatcagtctgccggtaaccattatccaaaaatttatccgcaaagcacgttacggatataaattaaccgattaactaattttattaaacctcttaccttataaaaacaacgaccgtaaaattcccgagaatcttacagtcgttgtttttcgctttattctactgctattttttttacccgtccaagtgctttttgtactgccggaatggagatgatcacgattgtaatcagtccttctgccagaaggaaactgtagttatatgcgatcggatatacggctgcaagtgatttcgggaaattgtccggcatgtagtccatccagtacaaatatcctcccagcgcatgaaacgctcccctggcgagaacagctacgatatagcctttgagcagtccattcttttgctttgcaaagaaacctgccacaccaagtgctgcgaaagccaatacataatcacagcatacctggaacagagaaagtacgtatggctcctgtaaaaactggagcattccatatgtaaatccaaccaaaattcctgttcttactccataccagtttgctaccagcacgataaagagcatgctgcacagtgtcacactgccgccccatggcagagagaaaatcttgatataggaagtaataaaagcaagtgccattgccatcgcacagcacgcaagctgtttcgcggacattttatttttttctgaatttttaccggcaaaaaacaatgcaataccaaatacaacgattcccagcacaatacaaattgcatatcctgcagtcgtcagaccgccttctgcatttaccataaagttcaacataaaaaactcctccttgttttcgtgattgaaaacaaggaggagttccttgtataaacgagattacagttcctacgttggcattatccaaatcaggttataggtcgaagttcacaacttcctctcagcctgtcacacaagctccccttgttatcaatcgtattttattttattcttcgtccagaactacttcttccaaatctgctgattctgctgtctccactgcttctgtttccactgcatcgctttcatccagttcttcagcctcttcttctgcttccagttctgtgtttaactgaacatcacggtacttcttcatacctgtacctgcaggaatatgtttaccgatgatgacgttctctttcagaccgatcaggtggtccaccttacctttgatcgcagcttctgtcaggacttttgttgtctcctggaaggatgctgcagacaggaaggattctgtagccagagatgcttttgtgataccaagcatgatctgttcacctgttgcaggctcttttccttctgcttccatctgctcgttcacttcgttgaactccagaacatctaccatagttccaggcaggaattcggtatctcctctttcctcgatacgaatcttcttcagcatctggcgtacaataacctcgatatgcttgtcattgatttctacaccctgcaaacggtaaactcgctgtacttcctggatcatgtaatcctgtacggcacgaagtcctttgatcttcaggatatcgtgaggatttacactaccttctgtcagctcatctccggcctccagatatacaccatcctgaatcttgatacgggaaccgtatgggatcaggtatgctttggattctcctgtctgatcatttgttacaatgatctcacgctttttctttgtatcgctgattgttgccgtaccggcaaactctgtgataatcgcaagtcctttcggctttcttgcctcaaaaagctcttcgacacgaggaagaccctgtgtgatatcgtcaccggcaactccacccgtatggaatgtacgcatggtcagctgtgtaccaggttcaccgatggactgagcagcaatgataccgactgcttcaccaacctgaacggcttcccctgttgccatgtttgcaccgtaacattttgcacaaacaccattcttacatttacatgtaaggattgtacggatcttcactgtatccagtggttcaccgttttcgtcaaccgctttcttcatgactctttctgcacgcttcggtgtaatcatgtgatttgctttgacgatgatatttccatccttgtctttcagatcttcacaagagaatcttcctgtgatacgctcctgcagactttcgatttcttcatttccgtccatgaatgcttttacatacattcccggaatctcttttccttctgccgcacagtcactgtcgtgaatgataagctcctgagaaacatcaaccagacgtcttgtcaggtatcctgaatcggctgtacgaagcgcggtatcggacattcccttacgagctccatgcgcagacataaagtattccagtacgtccagaccctcacggaagttggacttgatcggcagctcgatcgtacgacctgctgtatccgccatcaaaccacgcatacctgcaagctgtttgatctgcttgtcagaaccacgggctccggaatctgccatcatgaagatgttattgtatttatccagcccggaaagcagagcttctgtcaatttgtcatcggttgctttccatgtctcaacaacttctttgtaacgttcttcttctgtgatcagaccacgtttgtagttctttgtgatcttgtctacagtatcctgtgcagtctggatcatctccggtttctgcggcggtactgtcatatcagaaatcgatacggtcatcgctgctcttgtagagaacttgtaaccaatcgcttttacatcatccagaacttctgctgtctgagttgctccgtgtgtattgattactttttccaggatctgtttgagctgtttctttcctacgtggaaatctacttccagaagcagttcgtttccatctacttcacggtctacgaatccaagatcctgcggaataatctcattgaacaacattcttccaagtgttccatcgatcgtgcctgtcttcaccgttccgtccggcatctctctggaaacacggactttgattctggaatgcagtgtcacatatccattttcatatgccaggagtgcttcgtttaagttcttaaagaacataccctcacctgttgctcccggtctttcctgtgtcagatagtaaataccaagtaccatatcctgagaaggaacggctaccggtccaccatcggacggtttcagcaggttgttcggtgaaagaagcaggaaacggcattctgcctgtgcttctactgacagcggtacatggacagccatctggtcaccatcgaaatcggcgttgtaagctgtacataccaatggatgcagcttgatcgccttaccttctacaaggattggctcaaacgcctgaataccaagtctgtgcagtgtgggggcacggttcaacataaccggatgctctttgatcacttcttcgagcacatcccaaacctccggctggagtctctctaccattttcttggcattcttaatattatgagcagttccgtttgccaccagttctttcataacaaacggtttgaataattcaatcgccatctctttcggcagaccgcactgatagatcttcaattccggtcctacgacgataacggaacgtccggaatagtcaacacgttttccgagcaggttctgacggaaacgtccggacttaccttttaacatgtctgacagagatttcagagctctgtttccaggacctgtaacaggacgaccgcggcggccgttgtcgatcagagcatcaactgcttcctgaagcatacgtttctcgttgcgtacgataatatccggcgctcccagttcaagcagtcttctcagacggttattacggttgataattcttctgtacaaatcatttaagtcagatgttgcaaaacgtccaccatccagctgtaccatcggacgcagatccggcggaatgaccgggatcgcggaaagaatcatccactccggtttgtttccggattcacggaatgcttctacaacctccagacgttttacgattcttgctctcttctgacctgtggcattgacaagtcctgcctgcagttctgcatattctttttccagatcaatggattgcagcaattcctgaattgcctcagctcccatacctacgcggaatgctttgcttccccatttttctttttcttcctgatactctgcctctgacaggatctgtttgtactgaaggtctgtctcccctttgtccagtacgatataagatgcaaagtaaagaactctctccagtgttcttggggagatgtccaggatcagtcccatacggcttgggattcccttgaaataccagatatgggataccggagccgcaagggcgatatggcccatgcgctcacggcgtacagatgcttttgttacttccactccacatctgtcacaaacaacacctttgtaacggatttttttgtattttccacagtgacattcccagtccttacttggtccgaaaattcgctcgcagaaaagaccgtctttttctggttttaacgttctatagttaatggtctccggttttgtaacctcgcctcttgaccattccatgatcttttccggtgaagccagtccgattttgatcgcatcaaaagttaacggctgatattgttgttcattattgcttgctggcatataaacggctcctcctattcttcatcatccatgaattcatcaaattccaattccatatcaggagcgaaatcctcttcctcctgtggttctacgttctccagttcttccccgacgaattcctgctctgtaaatccatgtgctccgaaagattctttttcatcgcggtatttctttccttcgatgatcgagcgcaggtctgtctcgccgtaatctacagtctccatgatttccacttctgtgttgtcatcacgaagtacacgcacatccaaggcaagggactgaagctctttgagcagtaccttgaaggactcaggaatacctggttccggaatgttctctcctttgatgattgcttcgtatgtcttgacacgtcctacaacatcatcggatttgactgtcaggatctcctgcagtgtataagatgcaccgtaggcctctaaagcccaaacctccatctctccgaaacgctgtccaccgaactgagctttaccacccagcggctgctgtgttaccagtgagtaaggacctgttgaacgtgcatggatcttatcatctaccagatgatgaagttttaagtaatgcatgtgtccaattgttaccgggctgtcaaaatattctccggtacgtccgtcacgcaggcgtactttaccgtctcttgaaagcggtactcctttccacagcgctctgtgttcacgattgtcagacagatactgaagcacttccggaagtaattcctctccgtgtttcttttcaaagtcttcccattccatatttacataatcatttgccagatccagcgtatccatgatgtcattctcgtttgctccgccgaataccggtgttgcaacattaaagccaagtgcttttgctgcaagacttaagtggatctcgagcacctgcccgatattcatacgggaaggcacacccagtgggttcagcacgatatccagaggacgtccatttggaagatatggcatatcttctaccggaagcactctggagacaacacccttgttaccatgacgtccggccatcttatcaccaacagaaatttttctcttctgtgcgatatagatgcgtacggactggtttactccaggtgaaagttcgtctccgttctctcttgtaaatacttttgcgtctacgataataccatattcaccgtgcggtaccttcagagaagtatctcttacttcacgtgctttttcgccaaagatcgcgcgaagcagtctctcttctgctgtcagctctgtctctcccttcggagttacctttccgaccagaatatctcctgcacgtacttctgcaccgatacggatgatacctctctcatccagatctttgagtgcatcgtcaccgacaccagggatatctcttgtaatctcctcaggtcccagttttgtatctcttgcttctgcttcatattcttcgatatgaacagatgtataaacgtcttctgcaacgagacgctcgcttaacagaacagcatcctcgtagttgtaaccttcccatgtcatgaaaccgatcagcgggttctttccaagagccatctctccattggatgtagacggtccgtctgcgatcacctgtccggcttccacacgttctcccttgtctacgatcggcacctgattgtagcagttgctctggttacttcttaagaattttgtcagtttatatgttttctttgttccatcgtcatgtttgatcgtaatgcttgtagatgtagagctctctaccacaccagctctctctgcaaccatacatacaccggagtctaccgctgcttttacttccatacctgttccgactgccggagcttctgttgtaagaagcggcactgcctgacgctgcatgttggatcccatcagcgcacggttggcatcgtcattctcaaggaatgggatcaatgctgtcgcaacagagaataccatctgcggagacacgtccatataatcaaatttgcttctctcatattcctgtgtctcttcacgataacgaccggatacattcttatgcaggaagtgtccttcctcatccagtggtgtattcgcctgtgctacatgatagttgtcctcttcatctgctgtcatatacacaacatcttctgtaacgatcgggttcatcggatctgttttgtcaatcttacgatatggagcttcaatgaatccatattcgttgattctcgcataagttgcaagcgagttgatcagaccgatgttcggaccttcaggtgtctcgatcggacacattcttccatagtgagaatagtgaacgtcacggacctcaaatcctgcacggtctctggaaagaccaccaggtccaagtgcagacagacgtctcttgtgagtcagctctccaagagggttgttctgatccatgaactgagacagctgagaagaaccaaagaattctttcacggctgcagtcaccggcttgatattgatcagagactgtggagaaactccgtcctgatcctgtgttgtcattctttcacgaacaactctctccagtctggacagaccgattctgtactgattctggagaagctctccaaccgcacggatacgtctgttgcccagatgatcgatatcatcatcgttacccattctgtattccagatggatgttatagttaatagaagctaaaatatcttcttttgtaatatgtttcggaatcagatcatgaatatctctcttgatcagagatttcagttcttccacatctcctgcagattcttccagaagtcctgccagtacagggtagtatacctgctctgtcactccgacttcttccggatcgatatccacaactgcctgcagatctaccatcatattagacagaatcttgatattgcgggactcatcctctccctctacccatacaaacggagcaccactgttctggatcgcatctgcaatctcagctgtgatcagagttcctttttctgcaacaatctctcctgtcagctcattcacaacatcctctgccactttctgccctttgatacggtttttcagtgccagttttttgttgaatttgtaacgtccgacttttgcaagatcgtaacgtctcggatcaaagaacatgcttgtaatcagactttctgcactgtccactgcaagcggctctcccggacggatcttcttatataattcaagcagaccttcctgatagttctctgctgtatcttttccgaaacttgcaaggatcttcggttcttcaccaaacaggtcaataatctctgcatttgttccgataccaagtgcacggatcaatactgtgatcggcacctttcttgttctgtctacacgtacatagaaaacgtcattggagtctgtctcatattccagccacgcaccgcggtttggaattactgtagaagaatacagctcttttccaagcttgtcatgtgcgattccataataaattcccggtgaacgaacaagctgacttacaataactcgttcagcaccattgatcacaaatgtacctgtctttgtcatcaatgggagatcccccataaaaatctcatgttcgttgatctcatcagtctctctgttgtagagtctgactctcactttcaaaggtgcagcataagttgcatcacgttctttacactcttcaatcgtgtacttcacgtcatcctcgcaaagtgtaaaatctacaaattccagactgaaatgacctgcatagtcagaaatcggagaaatatcatcaaatacctcttttaatccttcatccagaaaccactgataagaatctttctggacttcgattagattcggcatctctaatacttctttttgtctggaatagctcatgcgagaactttttccacttgtgatgggacgaattctgtttttctccatatgacgtttcactcctcatatatttttttgcgggcagcaagtaccctccaataggttccagtaaataggaaaagagccctgtgacaatatttctcttcacttcatggcatacctttccataatagcgcatttttaactatatcacaaaactcttttttctgtcaacatattttggtttattttctcaaaaaactcttgacaagttttctcatctatggtattaacgcaaaaaccgcagaagcgttcatcttctgcggtctcatctggcttttatcagcaattatttcaggttaacttctgcaccttctgcttctaatttagctttgatttcttcagcttctgctttagaaacaccttcttttactaccttaggagctccgtcaactacttcttttgcttctttcagtccaagtcctgtgatctcacgaacaactttgataactttaactttagatgctccagcagatactaattctacgtcgaactcatctttctcttctgctgctccagctccgtctccagctgctgctgcaactacaacacctgctgctgcagaaacaccaaattcttcttcacaagcttttactaattcatttaattctaatactgataactctttgatcgcttcgatcatttcagctgttgtcaatttagccattttcatatcctccatattcattgatattctgattatttttatactctgccgtacatcatacggctaccccataaaggcatatcctgccgggtataaaatgtaattccaattactctgctgttgtctcagctgcttcctctgcaggagcttcagctgtctctgcaactgcttcgccatctttttctgcgatctgtttgataacgcgagcgaagtttgtaattggtgactgcatacttccaagtaatctggaaagcaatacttctctggatggaatcttagccagttctgaaagtgctgccacatcataaactgttccttccactacaccaccttttaattcaagcttgtctgctccttttgcaaactcgcaaagaattcttgctggtgctgttgcatcttctttagaaattgcaatcgcgcttggtccttccagacatccttcaagaccttcgaattcagttccttcgaatgctctcttcatcatagtgttcttatatactctgtaagtaacacctgcttctctgagctttttacgaagttctgtatcctgagcaactgtcagtccgcggtaatctacgagaacaactgactgagctcctttcagttcttctgaaatcgcctcaacgattggctgttttaattctacttttgccatgttcggtacacctccttattttattgtgcgtgtactgccaaaataaaaacctctgtatccaaagacacagaggtttacaaatccgaaattgaattcgcatacttcctcggcaggcgttttctccttatgccttacggcacctgctgtcttcggcagtcaattgctatattataatagcactttatattgtcaatgtcaacagttttttaaaccagtttcattgggttgatttttacaccaggtcccattgtagatgtcagtgttacgctctttaagtactgaccttttactgctgccggtttagctttgttgattgcatcgataagcgtctggaagttgtccgctaactgttcttcagtaaatgaagcttttccaatcggcacatggataatgtttgttttgtccaatctgtactcaatcttaccagctttgatatcgttgattgcttttgttacgtccattgtaactgttccggctttcgggtttggcatcagaccttttggtccaagtacacgtccgagacgtccaacaacacccatcatgtcaggtgtagcaacaacaacatcgaattcaaaccatccttcgttctggatctttggaatcagatcctctgctcctacgtaatctgctccggctgcttttgcttcttctgcttttgcatcttttgcaaatacaaggatacgaacttttttaccagttccgtgaggaagcactactgctccacggatctgctggtcagcgtgacgtccgtcacaacctgttctgatgtgagcttcgattgtctcgtcaaatttagctactgctgattttttcactaatgcaactgcttctgctttctcgtaaagatttcctctttcgatcagttttgcagcttcgatatatttctttcctcgtttcatttcaaataacctccttgtggtattggcgggaacgtgcccctcccactttttcgtgaatttacatataacatagattgtctcttcctccttttcgaagacaccgaaaagaattgttcagactttcttaaatctctgcttttttatctggcagttatctcttactcttcaaccactacacccatagaacggcatgttcctgccaccatgctcatagctgcttctactgttgcagcatttaagtctggcattttcatctcagcgatttcctgaagctgagcttttgtgattgttgcaacttttgttttgttcggcacaccggaacctgatttcaggttacatgctttcttaataagaactgctgccggtggagtctttgtaacgaagctaaagcttctgtcattgtaaactgtgataacaacaggaataatcaggtcaccctggtctgctgttctggcattgaactgttttgtaaattcaacgatatttacaccgtgctgtccaagtgcaggacctaccggtggtgctggagttgctttaccagctggaatctgtaatttaatatatccttctactttttttgccatttttcattacctccttgtggtattggcgggattttcatccctcccacggttttttaatccatctttcttacttctgagaaattcagttcaaccggagtctctcggccgaacagctctacattgatcgacaggctctgtttctgttcgttgatcgcctggatcataccaacagtaccttcccatgctccgctcaatacggtcactgtatcgccaacctcgaagtcaactacgatgtcttcctgtttgattcccagatttgccatttcctcttcttccagcggaaccggcttggatccaggtccgacaaatcctgtcacacctctggtatttcttacgacataccaggtatcatcattcatgatcatatggatcaggacatacccaggaaacatcttcttctgacttgctttctgaacaccattctttaattccacgacttcctgcatcggaactctgacttcaagaatctggtcctccaggtgacggttctcaattgtcttatcaatgtttgcttttactttgttttcatacccggaataagtatgaactacataccattttgcatctgacataaaatcacctttccgcttctgaccagctattttatcagaaagtcaatcccatatttcatcagtacatcgatcacagagatcaatgcgcccatcaatacagaaacgattacaactgcagctgtctgctttgcaagtgtgttcttatccggccagacaatctttttaaattcggccttcattcctttaaaccagcttgacttctgagctttttctgcttttcctgtctttccactcatacatccacttccttccaacgattatttcgtttctttgtgcagtgtgtgtgatttacagaatttgcagtacttctttgtctccatacggtccggatgtgttttcttatccttagtcatgttgtagttacgattcttgcattccgtacattccaatgtgattcttgtgcgcacaacttccacctcgctttttatttactttttacatgttactttgatggctgcgaccccatctaattttaggcataaaaaaaagacctacttccattcgccagaaaattgtatcatatggcaatagggaagtcaaggtgtttcttctttcaatttacatatgaaaatttatgaaaatttatatacactgaaaactcttcctattttaaataccctgattttcttttttggagaaatacttttccctctgtcattcaatattttatcgtttttttattgattttgtccatcaaatatgtataattgtggtagggatattgctatgtctgcatttgcagttcattgcattattactatataagaaaagaggtttaacgtaacatggcacagattgatttaaccaagtatggcattactggaactacagaaattgtgtacaatccttcttacgagacattatttgaagaagagacaaaacctgaactggaaggttttgaaaaaggtcaggaaagtgaactcggtgcagtaaacgtaatgactggagtatatacaggacgttcacctaaagacaaattcattgtaatggatgagaactctaaagatactgtatggtggacttctgatgaatataagaacgataaccacccggcttctgaagaagcatggtctacagtaaaagacatcgcattgaaagaactctctaacaagagactgttcgttgtagatgcattctgcggagctaacaaagatacacgtatggcaatccgtttcatcgttgaggttgcttggcaggcacactttgttacaaacatgttcatccagcctacagaagaagaattaaaagactttgaaccagatttcgttgtttacaacgcttctaaagcaaaagttgaaaactacaaagagctcggacttaactctgagacagctgttatgttcaacatcacaagccgtgagcaagttatcgtaaacacatggtacggcggagagatgaaaaaaggtatgttctctatgatgaactactacctgccgctgaaaggtatcgcttctatgcactgttctgcaaacacagacatgaacggagagaacacagcactcttcttcggactttcaggaacaggtaagacaacactctctacagatccgaaacgtcttctgatcggtgatgacgagcacggatgggatgacaacggagtattcaactttgaaggcggatgctacgcaaaagttatcaaccttgacaaagaatctgagccggacatctacaatgcaatcagacgtgacgctcttcttgagaacgtaactctggatgcagaaggaaagatcgactttaatgacaagagtgttacagaaaatactcgtgtatcttacccgatcaaccacatcgagaacatcgtacgtccggtttcttctgcaccggcagctaagaatgtaatcttcctgtctgcagatgcattcggagtacttcctccggtatctgttctgacaccagagcaggctgaatactacttcctgtctggattcacagcaaaacttgctggtacagaacgtggaatcacagagcctacaccaacattctcagcttgcttcggacaggcattcttagagctgcatcctacaaaatatgcagaagaacttgttaagaaaatggaagcaaacggagcaaaagcatacctggtgaacacaggatggaacggaacaggaaaacgtatctctatcaaagatactcgcggtatcatcgatgcaatcttaaacggagacatcgtaaatgcacctactaagaagatcccattcttcaacttcgaagtaccaacagagcttccaggtgtagatacaaacattcttgacccacgtgacacttatgcagatgctgctgagtgggagacaaaagcaaaagatcttgcacagagatttgttaagaactttgctaaatacgaaggaaatgaagctggaaaagctttagtttctgctggtccggaagtttaatttctaattttcataaaatcagagccaaagtaaacgcaatgattgcgtgagctttggctctttttattttactcaacacttcgtctatatcatgttgtatttgtcttatttttctttcttagaaagttaattcttatacattgtgtccaaaaaccatttaactttcttttagttctgctttacactttatttatacttttttaatatttaaaggactggagaggattatgtacaaagtttatgaaatcaaacagcgtgtcttcgctgacaatgacctggaagcagataaagtgcggacagaattaaaaaaagacaaaacatttcttttaaatctgatgtcgtctcccggagcagggaagaccaccactctgactaaaacaatagatgctatgaaacatgattttcgcatcggagtcatggaagctgacattgacagcgctgtagatgcagatacgatcagcgaaaccggagccaaagtcattcagctgcacacagggggaatgtgtcatctggatgcagatatgacaaggcaagggcttttggagctggataccagtgatgtagatcttgccattttggaaaatgtgggcaacctggtctgtcctgcagaatttgacacaggcgctgtgaaaaatgccatgatcttaagtgttccggaaggagacgataaaccactgaaatatccactgatgtttcaggtatgccagtgccttctgatcaacaagatcgatgttcttccttactttgactttgatctggaagaatgtaaaaagcgggtactgaagctgaatccggatatgaagatcatcccgatctctgcccgcaccggggagggcatggacgaatggatcgactggctgaaagaagaaaccagttcctggaatgaatcaaatgaaaaaggagtaaaggaatgaaagaagaacgtaaactgatcctgaagctgggacagatgatcactgaccgtgtcggtgtgaaagtcacagtggaggatcccgagtattggggactcgcggaagttctgactgatgaaatggcagaggtctgtctttccatgaaggtcagaaaaccaatgacactggaacagattgcccgaaaatccggcaaagatccagaacgtgtgcaaaagttgctggatgaaatgtccgtgatcggcatgatcgaatataactgggagaatgccgaccatcataagcagtatgtcctgccgatgtttgttcccggctgcgcagaatttatgatgatgaatgacaagcaggtggaagaacacccgattctggcagatttctttgaaaatatgtccagactgcctctggaaaaggttacaccaatggtaccgccgggaggctccggaatcggaatgcatgtcattcctgtagaaaaggcaattcctgcaaagcaggaatccgcaagtgtggagcatatctcccactggctgaaaaaatatcaggacaaatatgcagtcggcgcctgttcctgccgccgtcagcaacgcgtgcgcggcgaaggctgcggcgaaatcgaaggagatctgtgcatcggtgtcggtgatatggcagattatctggtagaaacaggaaaaggccattacatcacacaggaggaagttctggaaattctggagcgcgccgagagaaacggatttgtacatcaaatcaccaatattgacgggaagataagatcttcgccatctgcaactgtgcatctggtgtctgcaatgcactgcgtacatctcagttgttcaacacaccgaatatgtcccgctctgcctaccgtgcccatgtggaagcaggcaaatgcgttgcctgtggtcagtgtgtggaggtctgtccagtaggcgctgccaaacttgggcagaagctgtgtacaaaacaaggcgagatttcctatccgaaatccctgcttccggatacggaaaaatggggaccggacaaatgggctccggattaccgggatcatgccaaaatcaactgctatgacaccggtacatctccttgtaagactgcctgtcctgctcatcttcccgtacagggctatattaagatggcggctgagggacgctatcttgacgcattaaaactgatcaagaccgaaaacccgttccctgcagtctgcggtgcaatctgtaaccgccgctgtgaggatgcatgtacccgagcgaccattgatcaggctgttgctattgatgagatcaagcggtttatcgcagaacaggagttaaaggaaaatacccgctttgttccgctttgcgagaatcatgaaggaaaacaattcactcagaaaattgccgtgatcggtgccggtcctgccggaatgtccgccgcctactatctgcgtacaaaaggatacccggttacgatttttgaaaaagaatcccgtgcaggtggtatgctgatgaatggaatcccatccttccgtctggaaaaatcagtaattgaagcagaaattgacattttaaaacaaatgggaattgaattccgttacaacgtggaaatcggcaaagatatcacgatccctgaactccgtgcacagggatatcaggcgttttatattgcgatcggtgcacagggcggacgaaaaaccggaataccgggggaagatgcgaaaggcgtgacaaccggtgtggaatttttacgcagtgtaaacctgaatgaagattctgttcatctgaatggccgtactgtggtgatcggcggcggaaacgttgccatcgacgttgcaaggaccgcgcttcgtaccggaagtgagcttgtctccatgtactgtctggaatccgaggcagaaatgccggcagcccgtgatgaagtagaagaggcaaaagaagaagatatccagattcagtgcggatggggaccaaaagaaatcctcactgaaaacggagctgtaacaggtatcgtgttgaaaaaatgtatctctgtatttgatgaaaatcacagatttgctccggtctatgatgagaatgactgtatcaccttggaatgtgaaaatgtactgctctccatcgggcagacgatcctctggggtaatctgttaaaagacaccgctgtagagcttcgtccaaatcagactgcacaggcagatcctgtcacctatcagaccgcagaaccggatatttttgtcggcggtgatgtctttaccgggccgaaattcgccattgatgcgattgctgccggaaaacagggctgcgtatccatccaccgctttgtacataaaggccactcgctgacactttgccgtgatctgcgtcagtttgtcgagcttgataaaaacaaccttgacatcgaagaatttgacacggcaaaaagacagataccgggtaaaaaatccggaatcgcaaaagaaaccttccgcgatctgcgttcttctctcacagaagaacaagtcaagatcgaagcaggtcgctgtctcggatgcggagcttctgtcgtggatgaaaataaatgcatcggctgcggactctgtaccacaaaatgcgagtttgatgccatccatttaagccgggatcttcctgaggcaagccggatgcatactgcagaagacaagctaaaaggaatccttccttatgcagccaaacgtgccattaagatcaaactgaaaaagaaatcataaaggaacacattatgcatgagttgggaattattgttcacattacaaaaacgcttcaaaatgttgcaaaagaaaacaatttaagcgaaatcggctctgtcactctggaaatcggggaagtgagcacaatcgtccctgattacctgacagactgctggaaatactaccgcaaaaaatttccgctgatcgaacattcagaactgaaaatcgagatactccctgccactacttactgtgaggattgccgccagacgtatcctacagtggaattcggcagacagtgcccatattgtaaaagcccgaacacgtatctcgtgtgcggagatgaatgtaatatcaaggaaattgaagcacaataaaaggaatgaaaagaggaaaaagattatgttatttcatgtttacggtgaaaacgccctgccgcagtggatcgcgatgcttggcgtactcgctgcactgattctgttaaacgaagttgccagacggaccaaagccggcggtattttaatgttttttgtcatcccggctattttgactgtttattttattgcaattgccgttggggcaaaaacaggagcttcctgggcactcaataaccagacatatctatatatgaatggatggttccactacgccaagctttatgccgcacttgcaggatgtatcggatttatgatgatcaaatatgaatggggaatcggaaaagctcactggttcaaagcgtatccgtttgcaatcgttgccatcaatattctgatcgccgttgcaagtgattttgaatctgccatcaacggatggtattcctggtggctgtcctctgaagatgtatggctgtacggaggatggcacaacgtatttaacggaattgccggaatcatcaatattttatgtatgaccggatggtgggctgtctacacatccaaagacaaaaaagacatgatctggccggatatgatctgggtttacatcctggtctatgatgtatggaatttcgcctatacctacaactgtctgccgacacattcctggttctgcggcgttgcacttctgcttgcaccgacaatcgcagcactgctctggaacaaaggcggctggatcatgaaccgtgccaacacgctttgtatctggtgtatgttcgcgcaggtattccctctgttccaggagacattctctgacggaacacaggtattcccatgggcaaccattccaaaactgtatgctgacggtactttaaacggaatcactaccggcggaagcacaaatgcagatccgaccatgatgacgattgtcagtctccttgcactgatcgtaaatattgtagcatttatttacattataagaactgcaagaaagaagaaaaagaatccttacaaagaagaaatctttacagatttcaaatactacaaggatgcagctgcaagagctgagattaaataagaaacaaggtcgccccgcaaaagctctcttccacttttgcggggcgaattttatctgcttttttccagttccttttgaattttttctaccatttcccgatacacatcttccgctcttaattctgcatatacgtcctctgtctccaacagccacagaagattttccagtagatatccccgtttcggtgaagtactttcattccattccagtttgtcaaagtaaattggagtctctgtctttcttccttgtacaatattcagatactccataaccagatgcttcagttctgaaagtgcctggtcttttttcccctgcttcaccagaattccaagtttcatctgggataccataacattgactcctccgagacggctttcttcaaataaggtctccagctcctgtgcggcatccagaaatcgaaacgccttttcatactcactttcttctccggcaattttcgccagactgaccagagacaaacctgcattgcggatttcttcatacaaacaacgctgtgtcagtttttctgattcttccagttttcccatctgatacaggatactggacttcatgcttcttgcatcaaaatccggctgcggcagtttttctacggcttccagccctttttcatattcctcattcatacagtataagccggataaaacataccatgccgtctcggaaatctccgcattttcgctggctgtgctctcttcaaacaacgtaatgcttcgttccatctgctgcttcaaaatttcttcctgtaagcttgcacctgcatactgcatataagtcgaagctacccgaaatttcagaaataagtctgtcggaaattctttcagaagctcttcacagtactgctgtccttcttcccagtttcttgtcgaaaacagtgtatccgctttctccatccgcttcatacattcttcttccgtcatctgctcctgaaagtccagcagaacatccacactcacgcccaaaagccttgccagtggatttaggattgtaatatccggatatgtcgtatccgtctcccacttggacactgctgccgctgaaatattgagtgctgctgccacctgttcctgcgtcagtcctttttgttttctaagatcttgaattcgttttccaattttcaattccatccatctgcacctctcttttctctgatcttttgctgcttttattgtatcaaagaaaagaaaactctccaatggatggagagttaacttttgctgtcagttttttaactgtttatcctgtttttataagaatggtttcaattctttcatcagctgttcgtccatatggagcagcttctttgcaagcgaacggctctcagaagacgcctcttcatactcattgagaaattttccgatggactggattcccatattacagccatccatcagaagcttcgcaatctgagagctgtcatcgtggagcatcagcttcacatccgttgtaatcctggaaaatgcagctgcggcaggatgagaatccttttcttgttctccatgtttttccagcagtctgctgatatcttcctccagtgctttatgtttcttgtcgtattcatccagcagctgatgaagcttttcatccttcacaaaatcccgcacctgattcaggctgttgatcgccatcttgcagccactgctgcattcttttaaaagctttcctgtctgttcttccatatcatttccccactttccattacaaatcatgtcttgtttattctgtccgaaagtgcagattctatccctttatcttacaacagcacgtctgattttcggccctataatgcaggcaattgcaatttttaccagatctcccggaatatacggaaatactccgacaccaagtcctgccacaaatccgatattcaactgcatagaaagccagattgtaccgaaaagataacatacgatcgttccaagtaccattccaagaacggcaaatgacagttttcctttaaaatgctccacaaaaaatccggcgatcactgtcaaaaacacaaatccgaccagatatccgcccgtaggccctgccacttttgccggaccgccgctgaaaccggaaaataccggaagtccgaccagaccgatcaagaggtatacgatataactgatggtgctgaattttgttcccagtacaaaaaccgagaaatacaacaccaggtttgtaaatgaaatcggcaccggactgaacggcagtggaatacttaacggccccagaatgcaggtcagcgctgtcatcaatgcgatcaacgtcatttgtttcgttgtgagaaattttgcttttgtctccatgtgttttgttctccttctttacactcttgttccagtatacgaaagagatgctctattgtcaaccttttattattataagttaacatttgttctggttatttactcttgcaactgtatatgctagaatgaatatccttactatgatcttggggagaaccgatatgaatataaaacaaattgattttctgcgtatttttaaaattgctgcagccgcgtccatcggatgtcttcttgcagtactattccaactgcagacaccaacttctgccggtattattgccatcttaagcctgcagaatacaagaagggaaaccttttctcttgtcgccagacgtattttttctttctttccgtccatgactgtggctatagtggtattttatctgatgggataccagattccatccatttttgtctatctgattttgtttgccggtatctgtgaattattttctctgcaaaatacactggtttccaacaccgttttggtactgcacctgtatgctgcccagtctgtgcatcccgcactcctggtcaacgaactgcttttgcttctgaccggaacttcctgtgggattctgatgaatctctacatgcccggaaattcagcaaaaatccgacgggcacaatccgagctggaacagatattccggaatacattccaccggatcgcccgtgatattgtgatggacaaacaacttgcctgcaccttttttgatctgtccgatctggatttgattttaaagaaactggaaaaagaggcgcacgaaaatcagggaaatacattactgtcagatgaacagtattttgtgaaatatgtagaaatgcgaaaaaaccagaagctggtagttgaaaaactctgtcagaatatccgacttttacatgatgttccgattcaggcgcatgccatctctcattttatcgaagatgtcagtataaaatttcatgaatccaataatacacaggaactgatgcagaaactgaccgaaatgcagacttccatgcaaaaagaaccgcttccagtgacaagaaccgagtttgaaaaccgtgcagttctctatcgaattctctacgatctggaagaactgatcaccattaaaaagcgattcatcgagactttaactcctgatgagatcaaacgattctggaataccagtcaaaactgttgtcaatagtagcagttttgactgcacccatctgggaacaattcctgtttcatacgatcccggaattctcttttcgtttccgctgtttccaaaatcataagcgcttttttcaaccggatgatatcctgctgcatgaattctgtataatttcctctgcccacaatcttcaaatatgtaattcccgctttttgtaggtcgtacagcgcacacaatccacatccacctgctcctgtacgatagttttccacatccaaatcctcgttttccacttcatctgctttttgatttgacagttccagaacgcccttacactttttgttcaacttccccacgcgatatggaacccgacagagatgccccagttcatcacagtgcagcgaattgcagaatcctccactgaaatggcacagttcatttaggacaaacgcctcgtactcgatattcttttttagattggaaatacaggatttcatatcttctactgtatttttgcggtgaaagatcaccctgcagatttccatttcttccagaaaatctgccatctggctgttgatctctccaaattctccgctcaaatggatccgacaggggatcttctgactgcggatatacaaaagcagcgccggatctgccacaatgatcgtatcaaatcctgcctgatggcattgtccaatgatctcccccacaacaggatactgctcgggtgtataagataatgagttgaacgtgatggctaccggcacctgatagtatttcctcatatttccaagaatcttcaactcttcataagaaccgatctgcacattataagcgcgcacttctcgtctgtttaatggatttagcactccatatttttctgcccacgcaaatggaacatacccgcagaaacattcatctgcccctgcctccacatacattggataatcatccacacttccaagccctgctgtaatcttcatcttcacgcctcacttctcacaataggtttaccacaatccggtcaatgccttgtctgacagattgattcagatactccatctcttccagactcgttctgtcatatccaaacagtgtgttatactttccaaacatctccagatgcctgggatataaaaataccaatcccctgcagtatccggggcactgttctacagatttctgtctgccacggtctccacatgcgcacttcgcatacagtgtacaaaactgtgctgtattggtctgaaaaaacggcagatgcaggctatgttttccttttggaatcacgatttcatgtccgcaggcttccagttcataccgctcaatctggttctcttttaaatattgctgataaaattcactgtttaaattggtctcctgaaagcaatttgtttcctctttcagataacgggaccgattgtcctttttgtaccggttcaaaagaatacccagattcagtttcacacagttttgcgtttcctgtttccatttacggatcagatgtgcggtgccccagtcatttactgcaatctcattcggcatatattcttttctctgttccagaaatttcagcaattctctgattgaatctatctgactctctttgatccacgaaaatgtcagtgtcactgaaattccttcaatttttgccttttccaacatggcatgtaatatgtcattctccggaaataaatgaggacaaaacgtattgcctatataaacacgttccaccggtttcttcgcaatcggatgttcctgcaagccccattttttccagtatttttctgcaaatgtttccatcggttcccttagccacgcttcatataactgcggagtatccaactccagagccagctctacattttcacacagcttctgcccttttgctttctctgctgcctcctgaaaccactcctctttctgctcttccagagattctgcatagtcttcatccagatgaacagggtaatccgtgtatgctgccgcgacttccccgtcttcccctgtcattttcaaagaaatatacttccaataatcagcaagtaattgacgcacatatttttgatagtctttgtcttctgtcaataccgtatattctgtaaaaaatcggctctcctccatttttttcatccggtctgcaggaatcagaagcttcttatagcaccctccattttgcgaaaaaaactgcagccagatttcatggattttctcagcctgatttgccatccgaaatacaaatccgttttctcccagctgtgtgatgcgcacttcctgtccatcgacaattcctgataacagaccatagggaatcatggaaactgcatttttaatctgcattctgtgtcctcccaaaccttattcttagtataatgttactttagccgattccacttctattttcaatcattttgtacagttttctcatctgaaatagcctttttctgcctgtcagcagactacaattttacattgactttattccggcaacaggacttacaatcaacataagataaagagttcctggctatactatggaacataatgtttcaaagaaaggatatgattttatggacagaaaaataagaatcgcacaatacggatgcggaaaaatgagtcactatctgatgcgatatgttttagaaaaaggcggagaactggtggctgcctttgacatgaatcctgcaatgatcggtacggatatcggcactcatcttggaatggaaaaacttggcataacgatcagcgatgctaaagatgcttctgaaattttaagcaaagaaaaaccagatgtatgcattatcgcaacccgctccactatggccgaattaaaagaagcattttctgtatgtgcacaaaacggaatcaacgcgatttctacctgcgaagaggcactctatccgtggaactcttcaaaagaaattacagaagaactggatgcacttgccaaagccaacaactgtacattgtgcggaagcggatacccggatatgtactggggttctctgatcacaactctggcaggatctatgcatcgcattacaaaaatctgcggaagcagcagctataatgtggaagactatggaattgctcttgcagagggccatggcgccggattaaatatcgaagatttcgaacgccagatcggagcatataataatctggattatcaccagaccttgcaggcaattgatgagggcatcgtcgttccatcttatatgtggaatcagaacggatggctctgcagccagctcggtcttcacattacttcacagacacaaaaatgtgtaccgatcacgcacgacggagatttgtactccagtacgctgaatatgacggtaaaagcaggggatgctaccggaatgtccgccatcgttacaacagaaacagaagaaggaatcacactggaaacacaatgtctcggttatgtctatggtcctgaggattttgataaaaatgaatggagcttccacggtgaaccggatacaacggtgatcgtaaatcgcccggcaacagtggaattaacctgcgccacactggtcaaccgcattccaatgttgatcgatgctcctgccggatatattacaacggaaaaaatgccggtcaaccactatctcacaaaatccatgcatgaatatgtaaccggaaaataattttatgtgcttgcacagcccgctttttcacgaaatccgggctgtgcaagcacaagatccagaaacgctttcatctgtggtgtcatccatttgttcttgtgatacaaaagctgatggtacatcttcactcccggcaaatccgtccgtatctcgaaaaggacacctttttctatttcttctttcacagtaaattccggcaaaaatgatatccccatcccccgctttagcagattgataatcgtttctgtattgccgatctccaaaaccggtacaatctcaatttctttttctgccagcatctgctccagttcatatcgataggcggctcctgtttccgtgagaagaaatgccgcttttgcaagatgctgtatcagatgaatattacttttttgtgcaaataccctgtctgatgtcacaaaaatcgtatcttctactctttctgccgcacacatccactgtgaactgtaaattttcttatccagcgtgaagatcagatcaatctcatcacttttcgccagatccatcaaattttctgtagctccggacttaatgatcacttcaacttccggatacagtctgtgatattgaagcaaaagttccggaagcagtgccgtacaggtagattccacgccgccgatcttcaatgttcctcttgtcgtatgctcttccccggcaaatgtcaatgcttcatttgtcacacgcatgatctcacttgcatagccaataaactcctgccctttttccgtcagatatacacgctttccaatccgctcaaacagctgtgttcccagctctttttccaactgctgtatctgaatggtcactgcggactgggagtaccccagctgctctgctgctttggaaaaattctgggtgcctgccacttttagaaacgtcaaaatatttctgatttccatccgtctctcctcattaacatttttaatatattatatgaaatctatgaattttacatatatgtaaatttagtgtagactatcaaacgaaatgagtcaagtaattaagaaaaagaggaatacctttatgatcggaaccgaatatattttaaacagtacccagttggaagaggccatcaaatcatttgtgcatgatttttgtgcagaaaaacacgagatccacgatcagcctgttgttgttgaagcaaaggaacatcaggaggacaaaatcaaacagatcaaaatcccggaaaaaggacgcccggtaaacgaagttgtctctgaaatgatgaacgaagtgtaccgctaccgcggagatgccaaccatccacgttttttcagcttcgttccgggaccggcttcttcggtttcctggctgggagatatcatgacatctgcttacaacattcatgccggcggaagcaaacttgcccccatggtcaactgtattgaacaggaagtgttaaaatggctggcaaaacaggtcggatttaccgagaatcccggaggtgtctttgtaagcggagggtctatggcaaacatcaccgctctgactgccgcccgggacaatacgctaacagatatcaatctccatctgggaacagcttatatttcggatcagacacacagctccgtcgcaaaaggactgcgcatcatcggaatcacggacagccggatccgcagaattccgacaaactcccatttccagatggatacgacaaaactggaagaagccattgaaacagacaaaaaatccggctatatcccgtttgttgtcattggtaccgcgggaaccacgaacaccggaagtatagatccacttacagagatttccgcactttgtaaaaaacatgatatgtggtttcacattgacggggcttacggtgcttctgtactgttaagcccgaaatacaagtctctgttaactggaaccgggcttgctgacagtatcagctgggatgcacacaaatggctcttccagacgtacggatgtgctatggttcttgtaaaagatatccgtaacctgttccacagcttccatgtaaatccagagtatttaaaagatctggaaaatgacatcgacaatgtcaatacatgggatatcggaatggagctgacccgccctgcccgcggcttaaaactatggctgactctgcaggtgctcggaagtgatctgatcggatctgccattgagcatggattccagctggcagtctgggccgaagaagctctgaatccaaaaaaagactgggagatcgtctcccctgcacagatggcaatgatcaacttccgctatgccccaaaagatctgacaaaggaagaacaggacattttgaatgaaaagatctcccatcggatcctcgaaagcggttatgcagcgatatttactactgttctcaatggaaagaccgtacttcgaatctgcgcgatccatccggaagcaacacaggaagatatgcagcatacgatcgatctgttggatcagtatggtcgtgaaatttatacggaaatgaaaaaagcttaatttaaaaaaccatggaagtgacgggaacttatcccgttttccatggttttttcttatctcttcacaaagtattcctcataccatacaaggaatgtataaattgtccacacttttctccagttatccgagtttcctccgatataatcctcaaaaatcgcattgatctcatccagattgaagaatttggctgccatctcgctgtggaacttgtcacgcacatcctgattgtatcgctcatccgccatccagatacggatcggcacaataaatccaagtttcttgcggaatgcaatttcttccggaagcacttttgctgccgctgtacggaatgcgactttgttctgctcctcgttgactttatatctggacggcattctggatgcaatgctgaaaattctggtatcagtcagaggcatccgaacttccagtcctgctgcccggctcatcttatccacgttcagataaatatctccttccagccagatctgaatatctacattggacatcttactaagtggatccaatccttccatctcctcataaatacttcttacgagttcgattggaagcacatcgggatcataatgtttcaagattttctgcttttcatcctctttcatgatgttcgtatttccgacatagaaattcttcagattctcgccgtagcgttctgcatttcgatacatattgtatccaccgaagaattcatccgcaccttctccggaataacagatctttgtatgctttgcagtctctctgcatccaagtgcgaatacaattgccgaggcatctccaagcggctgttccatgttgtacattacatccggcacaataccaaaatattcctccggtgtgatcacacaacgctggctctctcttccaagaagctctgctgtctgtcttgcaagtccggattcgtcaaatcgctcttcttcatatccgcaagaatctgttttctgcacatctgacattgccagaacatacgaagaatctaccccgcctgacaagaacgattctgcatactcactctcttctttcacttccggcataatctctgtcagtgtgttgtgaatctcatcagcccagtcttctaatgttttagtctcatccgggttgaattccggcttccagtaacgggtgatcgcaagttttccgtctttccagatcagataccgtcccggaagaagctttttgacacctttaaaaaatgtcatctctcctgcaacataggtaaggcttaaatataactgcagcatctcttcgtttaattcttttacaaaccccggctgctccatgatctgacggatggttgtcccatataataattcaccatctgctgtctcataataataaaacggctttgttccgaactgatctctcaaacagaataattcctgtttctcatcatcccacaaggcaaaggcaaacatcccatgcatatggtctgccatttcatttccccatgtctcatatgctttgatgagaatctgtgcttctctgtcctctctggataaagaatgatcgatccccagtcgttcgcaaagcgctgaccagtttcgaatgtgtccgctgtattctttcacgtttatcatgtgtataccctcttttcttataatttcaataagaatattcgatcggccggtatgccgatcctgattttctggttcctgtttagtttaccacgatatgagcgattcagctatgattttttgctgaaactttacattgctaatatcttcttttatatcccttatcggacaaagttcgcccgccgaaggcctgtgttgagggatgcccggatggatatacactttggaacatattttattaaattaccttattttcaaaatagcattccgataaatacgatggattttcataatacatactgctattataatcatcaattttaggactgataaatgaattgtacacctctatcaaagcatctattgtttcaatcccgctctttttcgcaacttcttttatcagccttttatatacttttcctatatcccaatgagacggaatcgaataactacaatctttcacattatcaaaatttcccgattcaatatcggcttctctaataaaatcatcgctcactcgctctatattgtcactatgatacacatcagccaaatcataaattttttcaagtctttttttcccaaaagcattcacaacatccgctcttgtattccgggttttacgcgcaatgtagtcaattattttccacagcaatgcttatacttcttcccgcttccacatggacatggatcatttcgcccgatttttttcttcgtgacctgatttgatatttcaggcagacctatttcacttggaataatcttttctttgccaagttcccggtctgtaaatccgcgattactccatttccggactgaatacacccattcactgcagttttccacaaaatgatttccccttgtacgatttgggaattcaacatatcgctcaaacaagagattcataattcctgcagcattcaaatcttcctctgctactctatattccaactccaacatcagattgtctgcccgtgtcttgtttttcatcagatgtgtcagatctgccagaattttcttataaaatggattttttacatcaaccagattctctgcatataattttatctctttttgattcggaatatagtattcctgacctgatacctgtcgtaaaaatttcctgtactctttttcattttcaaactgctcactgatgatccactgttcatcacaccagaatggaccgtctgcacgttcacacagtatatcgactgtttcctttagtttctccggaagccactcaagctcttttctctcttcttctgataaagatggatattcaagcatctggtttagtgcaatgtcctccacctttgctctttctacaatcccaaacaaatttaaacacgctcgcatggaaaggcggacagcggcaataagaccaagtatattttgcaccttatccgtctccagatttttgatagtaaactctctgatctcatccggaacaacaaactgcactccatccacatcacagaacataaatacccagccttttttgcagtagttttcttccagagccaacatctgcatctgagaaagtggataaccattcatcgtccgcagcatcgtttccatgtcaaacttatccagataaataaattcattctgaaacgaagttaaaatcaactcctgcacatacttttctttttctgcccgcaatttaggagcttcctcctcccaggtttccagaattacatccagcagagattccggcgcccggcttagcatctcgttcagatccgttgtcgttttcccctctatcataaaattcgaagtgaatgtttctgccatttgctcaaatatattttcatcaattcccagtgcgtcaaaaaagtcctgcatttcactttgtttctgtaatttcatctcacttcacactccttgtgatccactcattttttttcgggttccaacatatccagcatcgcctcctgatacgccgctctttttctcttctgcatctgcattttcacttccagcaattccgggagatatactttctccagttttttcattctcacttcgctcagatttacatccgacagatatctttcataccagtctgcccggtaattccagagacagatactttctccataccgttctttcaatctctgcgcaatcagaagcccctccggatcaaaatcaccatgataataaaaactatgattttcctttagaaagtccagcagaagaagtgttgcaagtcttggctgtccatttccgcagattgctgcacagtccgggtatttttttacaaaaacagaaaatactgccggattttcaaaaagataaattttctctctttctgcatgcacccctccaaacgtcccaatcgttcgaagcgtcaggcggactggttctctttcctgaaaaaatccttcgattcctttatgaagatttccattgtgtttccatgctcggattccatagacaagcgtatcatttgacagatcatcttttaaaatacccgccctgtaaaaaatctggttttttctttccgcttctgataattctctgtctttcgtttcctgccaacaggcagaaagaatgataaaaagcaatctttccgccactgtgcttgcgtcaaaataatgaggatctcctgtcagctttgccgcaaataccggtaaaagttctttttcttccattcgcggaagctgttttactgcctcaaacacatatttcagaatttcccgcagaatttccggagcactgttgtattgctgctgcaaaatttcatagcctgttgtgtgctctttcaacgtattctgaagccatcttcctcctgtcgtgtcctcatacccactttggacttccgcaaaaaaggcatctctttcttcctgtttctttcgcctctcttcttttttcaccgtcagctttttcccaaaataagcatccagcaattcctccagagaaatatcagaaaacctgcttttggacagacagatttcaaaagcttccgctgatatggtaacagactgattctcggtgtaatccttctgcaaaaatccgcccaattggctcttatcctgaaggcttaacccggtcaataccactttcccgcctatatgtccgaggctctcatattttcctctcattttttggaagactttttcatacacagggcgctcacgaaaatactgtaaacactcctgcatcaacttctgtttctcttctgctttcacgattcctctcctgtaagcatcacctttacttttccattccagatatagcggatcactgatacgaactttgcattttccggacggatcaactgataaattgcaagccccggaactgtatcgtaatcgccccataaaatctgagaattgatcataaagttgaattcaaactcgaccatcagacggaacatatccctgatattggtctcatcaacaccggcaaacgcttcatccagtgaaatcagcttcggcgcatccggacgtgcccccgcatattttgccaccactgccgaaaaaagcgggacatacattgccattgctttctcaccgccactaaacgtaaagaatacacggtctgtcaattctttctttttctctcccgttttctggcattccaactgaaattcaaaccattttcgataatccagaacttcccgcattgtggcatggaacgattgaaccgatcccatatccccggaaatttttctcgcttcttcaattttggaacggaaatgtctggaaagactttctacctcttcctcacgcataatttccacgtctttttgcaataattctaccaatgctcttgtatccagctgttcttccttttctgccctcttatttttccatctgagactcagctttaatccacttgatgtctgcatggattccatcagtgtattcatcttttccacccagcgcttgctggcctggatctttccacgaattttcttactgatcgtatttgccagaatatcttcaaacaattctctgtctcgatcacttaaaagacgtttcagtacttcggcatcctcattcattttttcaatcaattccttaaattttaccggcattccacggtattttgccaaaatatcaatccgcttcacagttacgtccagaaaactgccctctccatccagttcttcaaacagggactgcagtgtaatctggtaatccagcagatatcctctgttctgatgataggcttcctgaagatttccaaacagatcgctctgcttcttgtttccaaagcttccggcaaactggctgcagatttttttcgcctgatcttccatatcctctgtaacaacaaatactcgctctacatacccaagctgatattcctgttcaaatacattctgatatttttcctttttctcaagcagttccttttgtctgagttcattttctctttctttttcctgcagtacttccgtctcttttcgaagtgccgcctgattcctgacacaggcctctcgctctcccggaagttttccaagccgttctacacaatgatccagtcgttctttgatttcttcataatctgtcagttccagctgcttttgaacggacgcaagaaatccttccacttctctgactttcagacagatccgattgaattcgtaacgaatatcatccagatcaagctccagttcttccagatagtctctctggctcatgatataccggagactattttgatacttgccatgcgcaacctgaagctgggaaagaatttctttatatctgtgcaatgccaaaagagcctgtgtaaacaaatccaatcttggcgaaagataacattttccacagatctcccgtaccctgatgcgtaccccatccagtgcttttctttctttttctgccagttcctgatgctcccagagtcttttattcgttcgttctaacttatattcgcgatcagaaaattcttttgccgctgtctttaaatcttcctctcccgggaatgacttccattctgcctgcaatgtttctgtccgcgctctgttttctgccaattgtttttctaaatcttcaacactggctctgagctgttcgcagagtccggtcaattcttctatcttttccttccggtacttttcccttgcacgcaccccaataaagcgcgcctgatattccccggtgatcgttccttccagaacgccgatgcggtaattcccattggcatcaatccaggattctccgtgctctgcatgtgtatcaccaaatccaatcgcagaaagaatattggaaatattctgataaaacaaaatatcattttccccattctccacttccagcacttcctgcagactttccctgacatgtgccacatcgctgaacagataacgatcgcatactcctttgtccagagcatagacctgttcccgatactccttaggaacaatcagcgcatccagtatgcccatctctagcaatgcttcttccagatgatttctgcgctcttcctctaatatctggtcaaattctatggtcttataaaactggaaatacggaatttttttctcctttagcagctctcggtttgcctttacacaatccggctgttctggttcaggatccttttgatttttccactcttccaactctgtttctgcctgatacagatgctcctgctcttcctgcagatttcgctccagtaccattctattctcagaaaactgtcgttccagttcatatagctttggcctggccagttcccggatttctgaataatcgcttcccatttcatagctttctattttccttgagatttcctgcatggtctccggaagaaggtgaagctcctgattttgtttttcccataaatacatctgctctgtcaattctgactttgtctcatgcagaaggttctcatattgctgcatttccttttctgcaagatttctttcctccctgcagacatccaactccagaagacagcgatcatatttttcctggctgttcttttcttccaaaagagcctcttttccctgttctactttctttgtatagtcattcaaaagctggtgatgtgaagaaaaactctgttctttttcccgatcctgtaagatatcattcttcaaaaatgtaaactcatcaaacggaatttcttccagttctgtttccatctcttccagacaattttcaatctcgtcccagatacgttctgttttttctgtttctgcttttatcttttcttctgtatcgatctgtttttctttcttttcctgttcctgtttctcttttgtctgctgctcctttactctctccagaagctctgctttcaacttactctcctgctcttttaactgtgccgcatcacttttatccagagaggttttttcctcttttaaaatttcctcttcctgtttcagagcttcataatgctgttcttccttcctgagttcttccatatgaatcgccagatcttccgtaatctgttttccatttttcatacagttctcatatgctttccctgcatctgaaaacaacagcgccttgtcataaagcacaatctgattgtactgatcgtatatcttctcaatctgccgcgctgcgtgaatgctttcgcttaatgtatccagatttgttttcagattgtccatgttttcgattgcctcggacatcggacgcagatcatcttccgaaagcgtctgaagcgaactgcttaaaatctcattgatcacggtcggcttaaagtctttggaaagcttcggtgtacgcagctggatcaaaagctccagaagctctttgtattcctcttgtgtctcaaaaccaaaaaggaggcggttgacgcactgggcatactctccctgtgtttccatcactttgccgccctcactgatccggtatttcagttctcccttcgagcaggtaatcttattttccacatctttatacagaaacaaatcttttcccacacgcctgccgtccgtcacgcagaaataccaggattccagctttttattctttctcgcacgaagcccaatcccaagtgtcagatattcttcactttccaggcgttttaactccatgtaaagataccctgtgcgctcttctctctcatctccctcctccagaagatagttttccatctttctggcgcgggaaccaaatggatccaaacgctccggacgcatgtttccgtccagcagaagcggaataaagctctgcattgttaccgatttgccggaaccattcgcccctcgaagcagcatacgtccatccagaaaatcaaattcttcctcatcataataccaaaaatcgagcaatccaactctgtttatctgccatttactattcatctcttcctccgtttttcaaaaaatcttccggatattttccatagatttttcctgctgccggtctgattttcacatgatctgctctaatttctatcagcatcagctcttccatatatctttccacttcccgataaaactcggcaaacgtcatctcccggtacgtcttattaaaaccttctccgaatttttccttgcattcttccacaattgcacgaaaaacttcctttggaatacaaatctgttcgtccagtggaacggtaatccttccctctgttactcttttctgtatcagttgatttgtcaaaagaacaacgtcagaaagtgtatttccttccggaaaacacctccccagtctgcactcttctcccagcacgagaaatgcactgctgctgtgtacatgcagttcacagtcaaataattctgccaggtccccctgtatcatatttctgtaatttctcagataggcaaaatcctcctctgattctgcatccttatacattcccatcgacatcagaagctttcggtatactctctgcctgcgcacgattcctctgtcttcattcacatcgatccactcttctttttcaaactcctttgcagatgtgtaacccatgatgtcctgcgtgaagtttttcataaaataccgggatgctcctgtattttcgtataatacctcactggtatcatctttcgcaaatccttcttcacttccatcatccacattcagaattccgacggctacgcagtatttcataaccttgatcatatgacgtctgtaccggtaaactgtccagtcgatctgctcctcctgatactggctctgtacgtattctgtcaattctgacaatacaaattgctcttctgcctctttatcctccagaaacatgagcacaagacagaaaaacacatactcgatcggctctttaaattctaaaatgcccatccagttttccggaactgcaggcatcttttctaccttgatcatatacggattcacgaccacctgatacccgagcttctccatcaggaatttcttctcttctcccgatgaaagctcttctttcacctgataataaagctccctctctctggattttaaaatccatcggcggtttaataataattccaacgttctcattttgattccccatcttcaaacacaattgtataagcaggcatctgaaatgttccatctgtacattctaacatacaatactctttcacatctgcccgttcaatataatacatctgcccgtcttctgtttttgcacgatgattcttcctttccagagcctttgaaagccacagaagaaacatatcccgtacaggcggttcgatcaccggaagacttgcaaactcaagtcgtccgttatgtatataactcctgagcagcttccgctcctcttccaacctcctgatcatcagcagccgcatctcttccttctcttttgaccggtcgacgataccgcttcttctggctttttgtttgtaggtgcgcactctaggagtgactgtcacggcatatgcttcttcctcatatacaccactgttaatgctgtctgtctctctgctcaattctcctttgagatggagcggcttctcgatcccgaatacgaccgctgacagccggtgtgcctcgttgatatccctgcactttccaaatatatccgccagctttttatattcctcccgccgatttgagccctgattgctcatctcactgattcgtgtggcatatctggtaatcttccggatgatctcgtttgttgtatcaaacacttttcctgcttccgattccatcccgtcttttcctgcaaaccactcggaaatactttcccaacgccccttcattttgtcataaatcatctgctcatcaatctctgtatccattctcggaatcgagagctcatactctgtcactttctgtaaaatctgattcacgacctcccggtcaacacttcgaagctgctgctcgatcgcagtcacatttacctgaaggctctttacaaacgagcgaaggtactcgatcagccggtctttaaacacaagaaactcttttgttttcatcatctcttctgcttttacactgtttaattccctcatatagtcctggtaattctgattcaaccgaataaaatcactgttcagatcattccaccatccgtaccgcttttccgcttctgcctgtgacatctcccccagccttccaaggctgatccgaagccgctccaataaagtcggctccagcgaagagccttcgatcaacagattttcaatccggatcaccattcgctcgacttcaactgctgtctcagaaagctgatagcggaacttcttgtttttaaattcctcaatggttgtcactttccgggtatcctgaattgtaagcagatttccccaggatgcaagcgccgccagatcctgctgacactgttccatcgtatattcctgaaaataaggatcttcttttaactcctcaaagacctcctcctgatacatccaatattttaatttttcgtactttaaataaaaaagccggatgatgggacggtatctgtctgtattctctacattcagatatttcgcctccaacatcggctttctcattttttcttgaattttcatgtcatcaattcctcttgtatttttattcttcatcgacttctgctgttgttatttctgtgttcagaatagcatatcgggattgaatgtacaagggattggagacatgtttttgattttcacttcatacagcgcaataaccttccgcacatctccttacacttacatctgatggaatgtttcatcacgcggaaaattccccacataccgtattctacatcccatccgaaacttccggagcgatacagataatctcccgggcaggaggccccgtcttttaactccatatcaaatcggtttgcccggacatggcggaagtggaagaatcatatccttccctttgcaaagtggtttcagacagttctgatatttatcatagactcgaatgattccccagaggccgagccatacatcatctgttccgccaaaataatacaaataatcgcccgcctgatacggttctttgatatttaacctataaatgagcaagttcgtgattttgcataaaagaaagacacctcgattccatgtgttgtataatgaaagtgccaaaacaaacatttgcaacatttacgaaagaaggtgtctctcgcaaatactatacatcattcctcattcatatacaaccagtttaagaaattaaatttatgcaaattttattcaaatcgagtgatgaaccacctcatgagcatcctgattagcatatttatttcaggataccatggaaaaaccacggactttgctaaaaacagttcctgccacagaactacgattgcccatttcctcaattccggaaaatgggatgattcattactttcagatacgttaaaatgctctgtcattgagattatttattcagaagcagcacgcaccggaaagcctgttttctgcattgtg

SEQ ID NO: 6983 - DNA, 250 bp, Unknown
  gut microbiota DNA sequence
gtagcgtctggcaaagacatcgagaactttatggagcccttgcgggttgatacggtcagaaagtttctgagcagtttcaatatcggagatttcaaggaacgcgttgtcctgcattcggtaagaaagctgttttttgtcaagcttataggcgagcaggttatgaccgttcatgtaaaactgaagacggaaaggcggccatgtagggacacgaagatagcaaaggccaagttccctgtcgataaaatagaaa

SEQ ID NO: 6984 - DNA, 28354 bp, Unknown
  gut microbiota DNA sequence
acaatatccgaagtttattcctatgtaccgggagatttatgagctttgcaggaatgtggagaaagttatgggattgttttcaaaagaattacaaatattggataagaataccgtacagtatatgatcgatcaaatgcaggatacgatcgatgaacaacagagtactattcaggaacagcaaaacactattaagcaaaaaagtgagttgcttgcatttcaggaagttcttttgcaacaaaaagaaagcgaacttgagcagcttaagaaacagttagaagaacaatgtaaataataaggaatgctaattgcttcgtaaatacaaagcattacaggatacatatttggcactaatgtcactgatgatttaagccatagaaaaaccaccctcagaatgatatgatactttggcgagtttgggtggcattttctatgtacattctttaattggtcaaccccttatgggcggttgttctttttgcatcttcaatatagcacatctgcatcaattctgtaaggcaataggttacaatttacatgatttctgttaaaacgtaatttcttcgatacttttctactgattctgcagaaatgtcatgtgtgaatcatgcttcaaataccttattatatagttccgcatgttgtttttggcaaatacttaagtaaattatggcaataagcgcagcaatagaaataatagttatttgcataatatcatagaacatattcgtgcaattctcctttgtccattgtcaggactgctgaatatttttgcatggtttccggagagagtctgtgagtgacgctgatacatgtgatattttccaatgataaaatactgttttctacagcatttgcggtttgttcatccaatgacgatgttgcttcgtccattagcagtatatcctttccacttaacaaagctctggcggtagcaagacgttgacattctcctcctgagaaattgtttccgttttcctcgattattgtatcgagtccttgtggcaaattttcaataaacacctttagtcctgctttcttaacagcttctgtgatttcgtgctctgtgtatgatttccacagagtaaggttattgcgaacactatcattgaataaaaaagttttttgatgaatcatagccagtctgtctggaagagctgcgatttcatctgtacaaatctttccttcgaattctggataatatcctgcaatgagttttaacagtgtgcttttcccacttccactttttccgagaatcgcgtatttctttcctttttcaaaagtggcagatacattttttaagatagttctgtcatcgtacttgaaacttacatttcgtagtgaaatatgttttttgagtttgtgtcctgtttttttctcatggatttcaggatgagaaagagtatgcaaagtatccaatacaggtctggcagactttagttcgctaatctttgcagaaagctcgaaggcaggagaaatcacttgtccggtaagctgagtgactgcgacaatactgccaatggtgatatatcccttaactgcaaaaaatccagccaaccccatgataaaaaattggacagcgacagatgaaagtgtagttaaaccatatacacttgccatcaaggatgaaaaatgttctttgttgctatctaatcgttttgctgtcttagaaaatttatgaaacatctcatcctctgcatggtaagtttttatcacttcataaccagttagaagatcagctactgtttcattgtaggatgttgttgatttcatgactgtttcctgtgctgtgccaagtaccttggtaaaaagacttggcaataagcttgggattgccatggctgcaatggagataacagcaataagtggattcatgtataaaagcacgagaacagcaaacacgatacaaatgacagagtctaagatggaaatacggttttgcaacactttttcctcaatgatagaaaaattttggttgaatgccgtaacatatgacgcattacccgtttcttcatagttagcaatacttgattgcaaagtaccatctgctaatacagtacgcatctcaagtaaacgttttctgatatagcaggctttgtatcgatttgaaaaaaagaccagtacacctaaacatacagcatagagaatactaataaacaacactttttgtaaatggtgagcgttttggctggtaatggaaatttgtgcagcatcaattaaggcgtttaatagaattgcgacacctacagttgccatatttactagtaattctaagaaaaacagcaggatgtgttcccattttatttttttcataatcttgatatctcccttcgacaagtaaattgtaaagggaagaatgcggcatttccatatcgagccatgtatagttttaatttacatcatttgttaagtttttctctaaatattcttgaactaaatctgccatttctttttttccaatcaggcgcatatagggaatcagcgcttccatacgcatacgactttcctgcctttttttcatattgttaagaatttgtgcaatactaaattcaatttccggaaggagaaactgttctgttccacaaatgctgagattctctgctttttttgcatagagaagcgcttcttgataccgtccctcatcttgcagaatttggcttaggttatgcgctaaattgatctgaaggaccttatagtcagaaagacgactatggctgcgttccaaggcaaacaggatttcctcaccaatacgaatagcttctaaatttttacccgccatatattttgctgccgttagcatgacaagaatattagcctccgtaggggaaaacaactccctgcgaaaatcattgaagtcgatatcgggttttgtcagatggagtgcgtttgttaattcatcttccatttgctcgtctgcagcaccatcatgcatacgaattgccacatgaatcattttggtgtactggagattagcgatgtccattttttcagtagaaagctgctgtaatgtcttttttgcctgaataaactcacctgcggatacttgttcactgatttcatctaaagtttggcgtaaggatgactgacactcgttttcataataaatattgcagagctgataagtgcttgtgccaaggcgtgcaaggagttgttctaaaacttttcccgatggcatttgttttccgttttctatccttgagatagaaacaggggagcaaataccatccgccaatgcttcttgtgttagtcccgcttttttgcgtaaatgatggattatttcacctaatgtatttttttccataagtttctgtattgctcctaataatttattctaatggatagaattgtatcattgaaatattctctgttcaatgatgtatttgttgttcaattttccatattgaattgtaaatatcttgttccttgaaatgtcaattttccttcatcgccctctgtaagctttccgtactctgagccggatacagacatctctattctgtcaccgctttccacttgaaaagtgacataataagtagtactggatgttgtatgatattcatgagctcctgaggtatctccagcgtttggctgattgtgatacgtggtattctggcgttttgcaacgattcttgctgatacagttaaacggggagaattattgtttttatgccaagtagaaatcccctttgccaaagtgaatataatcattataaagattagtatgaagatcacaggaaataacaattctattatattgaacatattttttctcctcacttattgtaattttgatttctcagttcatttataaaaatatctgtgactatttttcaggcggcaagtgcagatccagcatccgcacacccaatggattttctctctgacatacaacaaattctgttccggactcttccatttcatacaattcttcggtaacaggaaattcaaaagctgttccgtcatccaactgcacagtcaaagaatattccagagaatcatcgtcatcgtcttgttctatatttcgttccagtacttttgccggatagtgggtttcctctccacacagggcaaaattaccggcatacatcatcggttctgccaccaacaggagtgacagaccgatcatgaaaagcccttctccacgcagacgttttggagtgcgaagaacaaaggcgatgataaagattgcgccaagtccaaaccagaatgccagtgtgtaccatttttcttccataatcagtacttgctccagaccgtagtgaaatactgacatcagccacaatgcaggaagcaaaaccagagggagagaaatgcggatatggtgagactgccattctgcagtggcgcctttttgctttccgtttagtgtcaggacaggcgcaaacgccagataatatacaatcaatggaaggggagaagctgccatcaggtagatggtctggctgaacttcaaggctcctgcgatgaaaaagaaaagcggaatgatactgccggcccagaagagtgccagtaccagccatttcccaagtcggatttcttttaggtggctgtgaagtctggttgtatattcttcccgccattgaatgacaggttcgattccttcttcctgctgaatctgttgttcttttaactttgttatctcaagcggaatctctctggattcgacccagtccgccagtttgtctacgccgcgcatattacgttcgatcgcgaaaattttctttttgtccgcatttaaaaactgaatggagtcattggctccgaagcggatggaaaatcgctgtccgggaagaagttcacgtttgcgtccccagcttgtcatataagtcagacttccgttttcaaaaacgtacaatctgcggttttttccggccagcagcatccagatcccgcagatgagaagtcccagtccaatcagaaacataatcagaccaaatggaacatccagaggaggctggacgcagtatccgaaagcaatcaacaaaagaaaaagtgccagtggccagacaataaacgctaaaacagaaacgaaaagccgctcctggatacaaatgacaggacgggaatgttccggcagttttggagcacgacaaaccagcaaggcgataccggacagaagaatgctcacatgcatcacaattcccagtgcaatcccgacagaaggggcatcccccatataaaacagtgtcataaacagtcccaggagactgtacaaaatgatcacaataccggaaaggagtgccggccatttacgaggtggtttgaccactccttctggattcggggagaacgtcatggactgatctgctgtatcggatatttttccatcctcatcgtctgtctccggaatttccgatggaagtgactctgtctccagatttgctccgcaagcagggcaggaagctacgtattcaatgataactgaaaaaggagaacaggtcaaaggaagccgggagccacaattcggacagatccagatccgggcgaggatctttttgcgcacaaaggcaatcagagccagtgaaaaaatcggccagatcagcaatggcagtaaaaagaaaagcagttgatcctgacggaaacaaaacgccaaaagcagaagttctgcaccgcctgcgatcaataaaatacgaccggcaattttgccggaacgtgtaaatgcattgtgataagcagggtttttcagcatttttaattcatccgattgtgcggcatctgctccgccttcctgcagataaaggataaatcgttccatttcttcatagagattgtcatcgtttttttccaaaagctcctgtacggtctttccatcttcgagaaagcaggtacgaaaaccgtctgcccggatttcaccgtttttgcactttacagtcaaaagcccgggagcgtatgtgatatcacaatcgctataattagactgcagacgctgataaatagaattcaggtgattcatatagtgtgccctcctttgttaggttgtttgtttttgtattgtatcatattgcaataaaaaagtggagaaatggatataaaattggcaaaaatgacggagaaatagttgctgttgtccagtccataaaaagcgtgttaaaataaactggttagaaatattttagatgataaaggagcttgtatgaggcgtaatgtagatttaaatgagatttcagatggaaaattatatacttcaaatgatatggtaaaggcagattgttatgagtgtcaggggtgttcggcgtgttgtcgcggaatggggaaatctattattctggatcccatcgatctgtttcatttgaaacaggcaaccggaaaggattttgccgggcttctgaatcaggagatcgagttaaatgtagtagatggtatgatccttccaaatttaaaaatggatcctaagacggatgcctgtccgtttctggatgagaacgaaagatgtgggattcatgcgtttcggtcgggaatctgccgactgtttccgctgggaaggctgtatgaagaagagggatttcgatattttcttctgacaaaagaatgcaaaaaagagaaccgcggaaaggtgaaagtgaaaaaatggctcggaattaccaacctgaaagcttatgagcagtacatttcagactggcaccaatttcttctgacttgcgaagagtcaataggagagctggaaaaagagaatatccagatccttacgacgtatattctgcgattgttttatcagactccatacgaagcagaggatgacgggtcattttatcaggagttttatcagagaagagaacaagtgcgaaagacgcttggaatttagaaagagaggaggtctgacagtggaaggggaaaaactacagattttaaaaacatattttggatacgattcatttcgtccgggccaggaggagatcatcgatcagattttggcgggaagagatgcgcttgccattatgcctaccggagccggaaaatcattatgctatcaggttccggcattgatgatgcggggaattacgatcgtgatctcccctttgatctctttgatgatggatcaggtgaaggcgttgaatgaagccgggattcatgccgcatatatcaacagctctctgacagaaaaccaggttgcaaaggctttggaatttgcaaaagcgggacgatacaaaatcgtctatgtggcgccggagcgtctggagactccaaggtttctcgactttgcctgtcatgccgaaatctctatggtgacgattgacgaggcacactgtatttctcagtggggacaggatttcagaccgagttatgtgcggattgtttcatttatccgccagcttcctgtccgtccgatcgtgacagcctttactgccacggcaacaaagcgtgtacagacagacatccgggaagtactgaagctgcagaatccttatgtggcagtgacaggatttgaccgggaaaatctgtattttgaggtgcagagaacaaaagagaaaaaagaaagaatccgggagtatctggaaaaacattcggatgaaagcggaattatttactgtgccacaagaaagaatgtggatgaactttacctgtttctggaaagtgcgggattttcagtgggcagatatcacgcgggaatgggcaatgaggcaagaaagagcagtcaggaggattttatttacgatcggatccaggtgatgatcgcaaccaatgcgtttggaatggggattgataagtccaatgtccggtatgtcctgcattacaatatgccccaaagtctggaaaattattatcaggaagcgggaagagccggacgggattcggagccgtcagaatgcatcatttactattcgcctcaggacgtcgttatcaatcagtttctgctggaaagcaaggaaaactatggagaatacacagcggaagagatgcagaatatccaggtgcaggatcgggagcggcttcagaagatgacaacctactgtacgactacgggatgcctgcgaaattatattctcggttattttggggaacaggcaaaagagctctgtggaaactgctccaactgtctggaggaactggaagagatggatgcaacagaagcggcagcagatgtgattgaatgcgtccgtgagtccgggcagagattcggggtgaacatgatagcaggcacgctgctcggcgaaaatactgcaaaaatccgaaattaccggatgaacgacaatctttgttatggaaaacaaagcaaaatcggacaggaacgcatcaaagagatcattcaggcgatgctggagcgaggctatctgtgccagacaaaagataaatacgcattactgaagctcacagatacatcagaagaattgcttcaagggacggatccgtttgtgatcgcatacagaaaagcggaagtacagaaaacatctgcaaggcgaggtgtgaaaggactgggagacctgagtgaaaaagcgcagcatctgtttgaagaactccgaaagctgcgcagcgaactggcaaaagaaaaatccattccgccgtatatggtggcatctgataagacgcttcatgatatgtgcgtgaaaatccctctcacaaaagaagaaatgctgacagctaacgggatgggcgccagaaaactggaacagtatggggaggcgtttttatactgcattcgtgatattacgaatggagataaggcggcatacggagccgaggaaacgaactatggtgcttcagagattccgctgacagagcgggcaaaaaaaggaagaaaagaggcatttcatctgacagaggaaatggaacagcagatcgcttttgtcacggagacgacaatcagcgaattcgtggcatctatcaatgcactgcgggatgaaaagacgatgaagcgtctgacgatcaaatccattactgaggaacttctggcagaagggtatctggagcagaagttctggaacggatacagcagaacctttctgacagaaaaaggagaagcgctgggcatccgggcagaagagagggaaagtcagaacggaaatctgtacgatgtctttttatacggggaaaaagctcagcggtatgtggtagagttattaaaaagaaacactacagcggactgattccggcaaatccgctccagatacaggacagtgtaaataaaattccaaaaacggaagtaaaatataaaaataacagtttccccgtattgtgagactcgctgctgcagatgcggggaatggagcggtattttcgaagcaggagcacaattccaaggatgacgagcagattggtgatcacattgtacaggatatttccgctgttgccaggcattatgcctgcaatacggggcagaacatctcccaggatcagattgttggaaatatgcaaaaggagactgtaccagatcgagtattccatagcgatatatccaaggatcagtccggcagccattgcaaaaggaatctgtgcaaaatttccgtgcatgagagcaaaggcaagtgaggaggccaaaagtgcgaaccacttgccgaaaggctccaatgtctttaaaacagcaccgcggaaaatgaattcctcgatcagcggagcagcaaatccggagtagagaagcatagagatcgtaacagagcctcccgtagcagcttccagagaacgcgcaaatgtaaaaccgaagtgctgtgctcccatttccataagtacataaagaacggaagaagcgttctgtgcgatcataaaaatcccgaaaaagctgagaaattttcccgggctcatatgagaatgtaccggaaaaatctgcgtacggaaaaaggaaggtctgcgccatatgacaaagatcccgagacagagaaagccggagatcagataccagacagctccgtcattaaaatgttcatcaaccggaaacagccggtacatcgccatcatgatcaaaaaagtgagttggccaaataagatcttgtaaagaaaaatcataccgtttgttttattaaattcacgtcgaatccatcgtttttcaaatttatccataaaatcaccttgtcaaatcaaattattttctacatttgttccttatcatatcatggatttttcttttgaacagcaaattcacagaaagttcttctgatttcctgtaaaaatttacttgaaaataattatcaattatggtagcatcactttgttagttgagactattgaaaaatagatgataaaaacttttggtagaagtgaaaaaaggagagcgtatgagaaaaaacccattgaaaatgttatggctggcagcagcgtttttatgtcttggaatcggagcagtgggagtgatcctgccgattttgccgacaactccattcttgctggtggcatctttttgttttgcaagaggatcggaaagatttcacaagtggtttatggggacgaagctttacaaaaatcatctggacagctttgtaaaggagcgtgccatgacattaaagacaaagctgtgtattctgcttccggcatccgcaatgctgatgtgtgcattttttatgatgagcaatctgccggggcgtatttttattcttctgctgatcctttttaaatatgtatatttctttacaaaaatcaagacgatcagaattgaggcggcttaaatgaaagatataaaaaagagtcagcaagtgcagaacaaacgggaaaaagaaaagcagatcgtggatctgatgatccacctttattgccggaaaaaacataaaactgtggaaaaacatcatggactgtgcgaggagtgtgaaaaactcagagactatgccgcaatgcgtgtggataaatgtccgtttatggagacaaagacattctgcagtaactgcagggtacattgttacaagccgcagatgagagaagaaattcgaaatgtgatgcggtttgccggaccgagaatgttattttatcatccaatcatggcaatccggcacgtgatcacttctgcaaaagaaaaaaagagaatgggaaggaaagaaacatatgattaagacgagactactcaagctgttgaagggctcgggaaaatatatcggagctaatattttctggcagtggatcgcactgctgtttcagatcgcagcagtgtttgcggcaggaaatatgatccagcagctgtttgaaaaaacattggatcagcaggtgatgctgcaaacggcaggaattgtgatcctggcaatctgtgcgcgttttctgtgcgaaaaaggagctgcatatgcctcttatcgggcaagtgcggatgtaaagacggttttaagaaagcagatttatgagaagctgctgcgtttgggagcggcctataaagaaaaggtatctacttccgaggtggttcaggtgtctgcggaaggagtcgagcagctggagatttattatgggagatatcttccgcagctgttctacagtctgcttgcaccgatcacattgtttgcggtattgtcaccgatcagcatcaaggcatgtattgtgcttcttgtatgtgtaccgctgattccgatgtcgatcgtggcagtacagaaattcgcaaagaaactgctgagcaaatactggggaatctatacagaacttggtgacagtttcttagagaacctgcaaggactcacaaccttaaagatttatcaggcagatgagcaaaaagccaaagaaatggacgacgaatcagagcggtttcgtaagatcacgatgaaagtgctcactatgcagcttaattctgtcagtgtgatggatattgtagcatatggcggagcagcaattggaatgattgtgactgtcaaagagtatctggcaggaaatgtatcactcgcaggggcgtttacgattattctgcttgcatctgaatttttcattccactgcgtttgctgggttctttcttccacattgccatgaacggaatgtcggcaagtgacaagatttttaagattctggatatggaagagccaaaacggggagagcacgagattgagggcgaacaaatggacgtcacactgcagcatgtggaattttcctatgagccggagcgaaaggtattacgggatatttcgctgaccataccatccggaaaatttgtctctctggtgggtctgtccggttgtggaaaaagtaccattgcggcacttttgacagggaagaatcgtacattttcgggacagatccagatcaataatgtaccgattcaggagattaaagagtccagtctgatggataagatcaccttggtgagacataacagttatctgttcaagggaacggtagaagaaaacctgaaaatggcggatccatctgtgtcgagagaacagatggaagcagcgctcaggcaggtaaatctgtatgagtttttgcaggcacaaaatggattgaatacgatgctggaagaacagggaagtaatttttccggcggacagagacagcgtcttgccatcgccagagcacttcttcatgatacgccgatgtatatttttgatgaggcggcatccaatattgatgtggaaagtgaggatcagatcatggaagtgatccgggagctggcaaagacgaaaacgattctgttcatctctcaccggcttgcaaatgtggtggcatctgatcagatttatatgttggaaaacggtcagattacagagagcggcacacatggagaacttatgaaaaaagcaggaagctatgcaaatatgtatcagaaacagcaggaattgtgtcaggtaagggagggaagagcatgaagcgaagaagtggaatacagattatgggaaaactgatcggactgatccgtcccctgatgcacgttatggcagcggcgattctgctaggtgtcacaggatatctttgtgcgatctttctcaccgtactggcaggagttggaatcctgcagattatgggaatatggcagggagcttctctgacgacattgtttgtctgccttgcagtgatcgcagtactgcgtggaattctgcactatggagagcaggcatgcaatcattatattgcgtttaagctgctggcactgatccgtcacaaagtatttgcggttttgagaaagctctgtcctgcaaaactggacggaagagacaaaggaaatctgatctcaatcattacaacagatattgagcttctggaagtattttatgcacacacgatttcgccgatcgcaatcgcatttctgacatccctgatcatggaaattttctttttccgatatcatgtgctgatcggtctgttcgcccttgggggatatcttgcgatcggagttctgatgcccatgtggaattccagacgaggttcagaaaaaggaatggaatttcgtacccgtttcggggatctgaacagcttcgttctggatagtcttcgtggactggatgagacgatccagtatggatgcggagaaaaacgggaagagcagatggaacgcaaaagtgtggaactggatgcgaaacagaaagaaatgaagaaactggaaggaacacaaagaggaggaacaaatgtcctgatcctgattttctcttttggaatgctgttccttacaacgtggctacatcagcagggtgaaatcggatttgacgcagtactgctctgtacgatcctgatgatgagttctttcggaccggttgttgctctgtccagtctgtcgaacaatctgatgcagacactggcaagcggagaacgtgtgttatcccttctggaagaagaaccgcagattgaagaagtatctggtcaggcaaccgcagaatttgcagatatcaattgtgaaaacattgattttgcttatgaagaagaacagattttaaaagactattcgatctcgattccgaaaggaagccggattggaatccatggaaaaagcggttccggaaaatcaacgctgttaaagctgctgatgcgtttttatgatgtagacagcggatcgatccgaatgggagacagaaaactgtccggtatcaatacaaacgaactgcgtgatatggaaagctatgtgacacagtggacgtgtctgttccacgattcaatcgccaacaacattgcgatcgcaaagccgggggcttccagagaagaaatcgtagaggcagcagaaaaagcatctctgcatgaatttatagaaagccttccaaatggatacgatacgctggtcggagagttgggagataccctttccggaggagaaaaacagaggatcggcgtggcaagagcatttctgcacgatgcaccgcttttgcttctggatgagccgaccagcaatctggattctctgaatgaaagtatcatcttaagatctctgaaaaaaatggggaaagacaagactgttattttagtatcccacagagaatcgaccatggctgtggcggaaaaggtatatcagatggaaaacggaaggatttcataagaatccggaaaacagtttcttttttcgtgatggttggctataatagaaacagtgagagtaaaatgaccgtaacgaaaggagaaacatatgagtcagtatgacgtgatcattattggagcaggtccgggaggaatctttgcggcatatgagctggtgaaagatgcaccgcagctgaaaattgcggttctggaagcgggaaatcctctggagaaaagaaaatgtccgattgacggagtgaaggtaaaaagctgtatcaactgcaagacctgtgccatcatgaatggatttggaggcgccggagctttttcggatggaaaatataatattacaaacgattttggcggaacattgtacgagtatatcggaaaagacactgccattgatctgatgcgctatgtggatgagatcaatgtggaatacggtggaaaaggaaccaagatgtattccactgcaggaagcaagttcaaaaagctgtgtctgcagaataaattaaagttgttggaagcatctgtccgtcatctgggaacagatatcaactatgtagtcctggaaaatctgtacgcagaattaaaagataaagtagaattccgtttcaattactatgtggacaagctggagaagacagaaaacggctatatagtgacacatggagaagaccgtgatgaatgcgagaagtgtattgtttcagtaggaagaagcggaagtaaatggatggaagaagtctgtcgcgacatgaagatcccgacaaaatccaaccgtgtagatcttggtgtccgcgtagaactgccggcagcagtgttctcccatttgacagatgaactgtatgaaagcaagattgtataccgtacagaaaaatttgaggataaagtccgtacattctgcatgaatccatacggaatcgtagtaaatgaaaatacaaacggaatcgtaactgtaaacggacacagctacgaagatacagaaaagcagacagaaaatacaaactttgcactgcttgtggcaaagcatttctcagagccgtttaaagacagcaacggatacggagagagtattgccagactgtccaatatgctgggcggcggtgtgatcgtgcagagattcggtgacctgatccgtggaagacgaagcacccatgacagaattgaggatggatttgtcagaccgacacttgcggcagagccgggagacttaagccttgtgcttccgaaacgaatcctggatggaattatcgagatgatctacgcactggataagatcgctccgggtacagccaatgatgatactttgctttacggtgtggaagtcaagttctataatatggaagtagaactggatgaacatctggagaccatgtacaaaggtctgtacgtgatcggtgacggaagtggagtgacacattctctgtcccatgcatcagcgagtggtgtgtatgtagcgagagagattacaaaagggttgtaaaaagaaaagtgtacgggcattccaaaaagagtgcttgtacactttgttgttaaaaaacaatagaattcctctgcatcttttttgataagtactgcctgatcaggcatagattgcgttgtgacatgcttttgaatatgggggatgtcccgctataatacccaaaagcataagataacttgacagtccagtaaagaattactggattttttgtataaattcttcgatactttttgatgtagctgcaatttttaaccagtttttcagaacagttgcatctgattcctcaaagagtttcttttcaagttctggtggtatagatccaaaatcttctaaaaaactgcgtaatatagattgacgctcttctctgcgtccggccgcacgctcatctctcaacatctcttctaaaatcatgaaacgttcctccatttcacggctttccttaatatgtcggatagaattctgcaactgcttaacatagatatcgtggaaatcttcctgactttctttcaggtctgcctttacaaatttcaaaaatattaccagttcttttggaacttcctctgcattctccccgcgggtactgagataaataatgcatcttccatcttccagagaagtttcatcagattctttacagataatgttcgttttcccatagttatttcccccatcagcagaggaattctataagcaaattatagcaaatgcttcgatgaagtcaaggtgatttgcatcaaaaagaatgttggaattatgtgttttagcagtattgagaaaggaagattcctacggataccagattataaaagatgtttctgatctgattgaaatttcagaatccactttgtatcctattttgcgaagattggagatgggtggaaaagtaaaatcctataccacacagtacaataatcgattgcggaaatattttcatctaacagaagagggaagacagtatctgaaaaattttgacaaagacagagcacagttgttaaaaatattggattatattgcagaggaggatgagaaatgaagaaggaacagtttatcaagaatcttcgatacagtctgagaaaattaaaaaaggatgaacgggagaagtatcttgcatattatgaagaaataatttcggatatgatcgaaaacggagtttcggaagaagaggcggttgtgcatcagggagagacaaaaaaatcgcagaagaaattttgcgggaaaatgcagttaaaagagagttcaaaattggctggataggttctgttttaattattttgacccttttatcgggaactctgtccggatatctgatgtatcaggaatatcgtataaagtcggaatttgccgaaatccatacagagatcgccaatgagacggtcagtattacaggaggatcggacggtccgacaagtgtatttcttgcgggaaagattacattttgggtacgtcccgatattttgattgtaataacagtaatgatggttataattacaattagttattttgtttgtaaagcgagaaaaataaaatttaaaagataaatatatctgaaaacattgaattttgaattaaaaagagctacaattatactataaagtaagaggaaggagtgtacggttatgacggaagcattgattggaacatgtattttggcaattacgacagtgatatttgtctgggtatgttcagagtatcagatttataacaatgaacattcagcagaggaaaaattaaataccccgcggttgtcgagctggtttgcagcaaagaggatgcgcttttggtttgcagttgatgatgcaagagaatatccgcaggaagtgctgaagtcagagaataagacactgcttcaaaatgggcttggaaagcatcatgaaaaacacgagattcgaagcgggaagtgcagagaacatcatacgatacagagtcaaagaacctatcgtatgcggggaaacttataaaagagagattgttttatcacagagaagaggagatgttaaatgcatctccttcatttagtttgtgcgcaagcacgacgattgcgcatggataggcggggattggtgtgaacagtaacaggcgctcatctgattgaaagaaatctcaggaaaaagttcttgcaattcgaaacctatgcacgtataatagattcgtatggagaacgaacggatattgagagttccatgcaaatatttaacgcagcagaagctgcattattgattaagttaaaagcttaaattttataagttggttactttataaccggtgcgtaaacagcacatcaacttgtgaaacggtcaataagagtattaaaagtaaaatatttgctatatagactcgaaaacctttatatctgtagtgcttatacttagaagaaaagacaaagctcctgtacttaagcaggagattggcattatataaagaagcatagcaagcgcaagaaagaatgtagatgtaacgtacgtttttctgcgctttttttatatcacaaacattcagaagtaaaggggaattgacaaaaaagggcgaggtgaaagaaagatgaagaatttatcacaggagaatgctccgatctatgaagcattagagcggttccggcggatgcggatcgtaccgtttgatgttccgggacataagcacggaagaggaaataaagaactggtggaattactgggagaacgctgtgtcagtattgatgtcaattccatgaaaccgctggacaatctgtgtcatccggtttctgttatcaaagatgcagaacagctggcagcagaggcatttcatgcaagtcatgcatttctgatggtagggggaacgacatcctcggtgcaggcgatggtactttcctgctgtaagaagggggataagatcatattaccgagaaatgtacaccgcagtgtgatcaacgcattggtgttatgcggagcgattccgatctatgtcaatccggatgtggagcacagtctgggaatttcacttggtatgaaagtgtctcaggtagaactggcgattcagaagcatccggatgcggtagctgtatttgtgaacaatccgacgtattacggaatttgttctgatttacgttctatcgtaaaaaaagcacacgctcacggcatgaaggttctggtagatgaagcccatggaacacatttttattttggagagaatctgccggtttcagcaatggaggcaggggcagatatggcatctgtgagtatgcacaaatcaggcggaagtctcacacagagttcctttttgcttgtaggtccgtctatgcatgcgggttatgtgagacagatcatcaacctgacgcagaccaccagcggttcctatcttttactgtccagtctggatatttccagaagaaatctggtgttgcgcggcaaggaatcttttgcaagagtggcggcgctggcggattatgcaagagaagagatcaatcggatcggaggatattatgcattttcaaaagagctgatcaatggagacagtatttatgattttgatacaacgaagctgtccatccatacgctggaaattggtcttgcgggaatcgaggtctatgatattctgcgggatgagtatgatattcagatcgaatttggagatatcgggaatattctggcatatctgtctatcggagaccggatccaggagattgagcgtctggtaagtgcactggcagaagtaaagcgcagatatcagaaagacaagacgggtatgctcagccaggaatatattgaaccagaggtcatcatgagtccgcaggattctttctatgcggaaaaagaggcagtgccgatccgggagtcagaaggcagaatctgcagtgagttcgtaatgtgttatccgcctggaattccgattctggcaccgggagagaagatcacaaaagatgtaatcgagtatattctctatgccaaagaaaaggggtgttccatgacgggacctgaagatgcggcaatcgaatatttaaatgttctgatataagggggataaaagtgatggaaatgtggttttcagatgaacacacggacaatgtgaaactgtccatccgtgtggacaagcagctgttcagtgcgcagagcgagtttcagcgaatcgatgttctcgaatcaaaagaatttggtaagattctcgtagcggacggagatctgatgctgacagaaaaagatgaatttatctaccatgagatgatggcgcatgttcctatggcagtacatccgaaggtagagaatgtgctggtcatcggcggaggtgacggcggatgtgtgcgggagcttgcaaaatataataccattcagaagatagacgtcgtagaagtagatcctcttctggttgaagtctgtcggaaatattttccgcagattgcaagcagcctggatgacgatcgcgtgacaatctataatgaagatggactgcggtttgtgcgttccagatccaatgtgtatgatctgatcctgattgattctccaaatccgtttggtcctgcggagggattgtttacaaaggaattttacggcaattgttacaatgccctgcatgaagacgggatcatgatcaaccagcatgaaagtccgttttatacagaagaggcatttcagtgtcagagaatgcacaagagaattatagaatccttcccgatcagtaagatttatcaggcgcatattccgtcctatccgtcaggacactggctgttcggatttgcgtctaagaaataccatccgctcaatgacctggatggagtttcctggaatctgcgggggattcatacaaaatattatctgccgagagtgcaccacggagtctttgcattaccggcgtatgtggaggagcttgtaaaagatgttgaataaaaatgtaatgacgttcatcggatgtgatgcggagtataatgaatcagagatcgtgttgttcggtgcaccttttgattccacgacttcctaccgtccgggggcaagatttggaagtcaggcaattcgcaatgagtcttatggactggaaacttacagtccgtatcagggaaaagatctgacagattataagatttttgacagtggagatctggagctgccgatcggagatacggaaaaagtgctggctgagattcaggattgtaccgagattattttaagcagcgggaaaattccgtttatgatcggcggagagcatctggtgacactgggaagtgtccgtgcagcagcagagaaatatccggatctgcatatcatccactttgatgcacatgcagatttaagagaagattatctgggcgttcaatattctcatgcctgtgtactgagaagatgctgggagcttttgggagatgacaggatctatcagtttggaatccgatccggtgacagagaagagtttcgctgggcaagagaagggcatgtgaagatgcataagttcaatcttgacggactggcagaagtaattgagaaactgcagggaaaaccggtatacatcacacttgatctggatgtgctggatccgtctgtatttccgggaacaggaactccggaggcgggcggtgtcacatttgtggaactgatgaatgctgtgatccagacagcacagggagtcaacgtggtcggatgtgatgtgaatgaactgagcccggtttatgatccaagtggagtttccacagcagtagccggaaagattatcagagaatttttacttgcactgcaagtttaatagaagaaaaaacaagaaagaaggagataaaaaaatgggaaaagtattgattgttggatgtggcggagttgcaagtgtagctgtacacaaatgttgtcagaacagtaaagtgtttgatgcgatctgtattgccagccgtacggtttcaaaatgtgaggcattgaaagaaaaactgcaggcttcctacaacggaacgattacaactgcacaggtggatgcagataacccagaagaactgatcgcactgatcgaaagggaaaaaccggacgtagtactgaatctggcacttccatatcaggatcttacaattatggatgcctgccttgcgacaggagtggattatgtagacactgcaaattatgagccggaagatactgcaaaattcgaatataaatggcagtgggcataccgtgagaaatttgaaaaagcaggaattacagcgttgttgggaagtggatttgatcccggagtaacaggagtattttctgcatatgcgctgaaacattattttgacgagattaattatatcgatattctggactgcaatggaggagatcacggctatccgtttgcaacgaacttcaatccggagatcaacatccgcgaggtttctgcaaaaggttcttactgggaagacggacactgggtagagacagagccgatggagatcaagagagaatacgattttccggaagtgggaatgaaagatatgtatcttttgcaccatgaagaaatcgaatctctggcactgaatattccgggaatcaaaagaatccgtttctttatgacatttggacagagctatctgacacatctgaaatgtctggaaaatgtaggaatgacatccattgagccgattatgtacgaaggaaaagaaatcgtaccgcttcagtttttgaaagctgttcttccggatccggcatctcttggaccgagaacaaaaggaaagacaaatattggatgtatttttacaggaaagaaagacggaaaagagaagacgatctatatttacaatgtatgcgatcatgaagagtgctataaagaagtgggatcacaggccgttgcctatactacaggcgttccggcaatgatcggtgctatgatgctcatgacaaagacatgggacaaagacggtgtttacaatatcgaagagtttgatccggatccgtttatggatgccctcaatgagtttggacttccatggaaagtggtagaaaaccctcagatggtagattaagaaacggacatcagaaatgaaaagagaagaattaaggactccatgctatgtcatcatggagtcagaaatgaaaaagaatctgcagattttacaggaaatccgacagcagagcggatgtaagatcctgctggcacagaaagcattttctatgtattcctgttatcctctcatcggagagtatctggatggaacgactgccagcggcttgtatgaagcaaagctcgggaaagaatgtatgggcaaagaaaatcatattttttctccggcatatcgggaagatgaatttgaagaggtgctggaaagctgcgaacatctcgtgtttaattcgttttcacagcttgagtgtttcggagaacgtgctgcaaaagccggaaaaagtgtggggatccgtgtaaatccggaatgttccacgcagggagagcatgcgatttatgatccttgtgcaccgggctcccgtcttgggattctggtatccgaatttccggaaacactgccatcttacgtagagggactgcattttcacacactctgtgagcagaatgcagatgctctggaaatcacgttgaaagcagtggaagaaaagttcggcaagtggatgaaacagttaaaatgggtgaattttggcggcggtcatcatattacaagagcggattatgacagagagcttctgatctcctgtgtgcgcaggattcaggacacctacaatgtacaggtctatctggaaccgggagaagcggtggcgttaaatgcgggccatttgatcacaacagtggaagatattgtacataatgatattgcggtactggatgtctctgcagcgtgtcatatgccggatgtgatcgagatgccgtatcgcccgcctctgtttgattctggagaggcgaaggaaaaagaatatacgtatctgcttggcggtccgacctgtctggcaggagatgtgatcggaagttattcttttgatcagccgctgaaagtaggagacagactcacatttggagatatggcgatctatacgactgtaaaaaataatacattcaatggaatgcgtcttccggatattgtgtgggaacgcgaaagtggagaatgtgagatcgtgaaatcgttcggatatgaagattttaaatgcagattataagatcttcaataagtgaataaaataacaggaaagtcaacaaaataacgattgttgactttctttttttgtgtgataaattgttattgtgcataaaaatacaaatcatctatccggataacagatcgtaaaataaggagttgtaataacaatgggactgcatgtcattgatgaagcaaaaagatgtttaaactgtaaaaaaccgagatgtcaggaagggtgtccgatccataccccgattcctgtgatgatccagatgctgctgcaaggagagatgccggaggcggcagaaatggtgtttgccaacaatccgctgtctgtcatctgttctctggtctgtgaccacgaaaaacagtgtgaagggcattgtgtgaaaggcataaaaggagaaccggtgcatatttcttcgattgaaaattatatttcagatacctgctttgaccggatgaagctggagcagcttccgaaaaacggcaaacggatcgcagttgtcggcgcgggtccggcaggaatcacaatcgctattttgatggcgtgcagaggatataaagtgacgatttttgaggtaaaagagaagatcggaggaatcatgcgttatggaattcctgaatttcgtctgccaaagtccattttagaccgctattatgtaaaaatgaaagagctgggtatcttatttaggcccaattttgcgctgggtggttccacaggtgtggaagatcttttaagagacggatatcatgccgtatttatcggaacaggaacctggagaccgtatcagctgcatataccgggagaaacatttggaaatgtgcactacggaatcaattatttgaacaatccggatgtctatgatctgggagaacgggtacttgtcatcggtgcggggaatgcggcaatggatgtggcaagaacggcaattcgtaaaggctcccggcatgtaaccgtctattccatcacagaaattccggcggcatccccaaaagaggtggagtatgcaaaactggacggagtagagttcgaatatctgcagacggccattgaaatccgggatgaaggagccattatctgtgatgtggaatggaccgaagatggaaaactggtgaaaaaagaagagactgccaggcttgttccggctgacagtatcattatttcgatttctcagggaccgcaggatcggatcgtgaaccgggataaagagctgcaggtagatgatcggggattgctcaagacagatgcaaatggagagaccaccatgccggggattttcgcatccggagatgtagtgaccggtgcaaagaccgtggtagaggcggtgaagtattcgaaaatgatcgcagatgcgatggatgagtatgtaaaaacacattatgaatagaaatacaggctggtgttctttgcaaaacatcagcctgtactttttttactctaaaataaaatccatataaaccggattatgatcactccatttaaaaccggtatccagaaccagtgcatcttctacagtcacattatcagataccagaaaaccatctactgttacaacaaaatcagattcgctgtaaggctgatctgcatttcggcaggatggtaccggatttttctcatcaaacggtgcgatcaactgcatgaaatcaggaatcagttcttcggatatcggctttgcccagttgtcttctaattccttgtgaccaaaaatctcagcagaatttccaagcagatctttgttgaaatcaccgcccgcaacaatataatttccagcgtcatattcttctttcatatcctcaaacagcatccgcagctgattgtccgcggtgctcggatcagatgtataagcggaaagatgcagattgtacaggacaagttcctttccgttttctgtcggaatccggttgacgctataacagcgatccagatccagcagtttcataaatccatcttcgatcggtaaagagcgtctgatggattccgtgatcttcatgttagaaactgtaagcataccggatttgttctttccgtgtggttccagaatcggatagaacagataagggctgtcatagttctgagcaaatgtgtagtttcgtgaggtgttatcggttgaaagtgtctgtgaaagcaataatttgcgttcatccacatgataacttcttgttccgtcaatatccacttcctggaacagcataaaatccgggtttaattgagctacagcttctgcatagctgctgacgttttcaatgacggcatctttggaacgggcacggctttcttttccaccgtccataaagaaagaatagtcgtcactgtatgcgccgaaaccgatatttccagatgtgatgcggtaactttttttggtttttgccttttctgtagattttccggtgatcgtcagtttttgcttgtcttccagacgatagtaactggaaaatacataaacaacatagccgactacgatcagtatcagagttccgaggaagattcccaggcgtttcaaccatttctttgaatttgttttcataaatatatggtccttctttctgtatcattttttttgaacaacatttcgcaaaatgattatatcatatcccgactgaaatgaaagaaattgtcaaaaataaaattgccgatcgtgcgaaaaggaatcaaagatgaattgagaaggcgatacggcagtgttataattgagaaatatgaacatccgaagaaaggagctaatgtgtaaaaagatatggagaaaaatagaatgttttcaaagttaacagaggcacaaaaacaattttttgaaaccggacggactcgggatcttgcatttcgtatctgccagttacaactgttggcagatgcaatgcgaaaaaatgaaacggttttggaggaggcattaaagaaagatcttggaaaatctgcatttgaatcttacgccacagagattggatttgtacttgctgatattcgatatacgattcaaaatcttcagaaatggtcggctccaaaacgtgtgagaacaccgctgtatttatttccgggcaaaagtaagattcaaaaagaaccttatggaagtgtgcttattctgggaccatataattatccggtacagttgttggcagagcctctggttggagcgattgcggcaggaaactgtgcagtactcaaaccatcagaacttaccccacatgtttcagaagcaatgtatcagatcgtacactctacatttaaagaagaatatattgcctgtgtggaaggtggagtggaggtcaatcaggaattactttctcagaaatttgattatatcttttttacagggagtgaacgtgtcggaaggatcgttatgaaagcggcagcagaaaatctgacgccggtgacattggaattaggtggaaaaagtccggttattatcgaaaaaactgcaaatataaaagaggcagcaagaagaattgcgtggggaaaactcatgaatgcgggacagacctgtgtggcgccggattatgtgcttgtggatgagagcagaaaacagcagttcttaacagagatgaaaacagcattttctcatctatatggaaaagaaataaaaaagaatccagatttcggcaggattgtaaatgaacggcatatggaacgtctgcagaaaatactggagcaggatgcgaaatatttgttctgcggaggaggggcagatacactgcaacgttatatcgagccggccattctggatctcggaaaggatcagaatgcggcgtctatgcaggaagaactgttcggtccgatattgccggttctgtcataccacaagctggaagatgcagtacgttttgtgaataaaagagcaaaaccacttgcgctgtatctgtttacgaaaaaaagatctgcagaaaagttcgttttggaacgggtgtcttcgggcggtgtgtgtgtcaatgatacgatcagtcatctgatcaatccagatcttccgtttgggggagtcggagcatccggaatgggacaatatcacggaaagtatagttttgatacatttactcatgaaaaaagtgtattttataaaccggctgactggaatcttccggtctgttatcctccatttacaaaagggaagatgaatctggtgaaattctttctcaaataggcgggaaaatgtattgactttgacacggcgtcaacttgtatactaaaatccggcaggaggtagaaagatggaatacagtattcgggaagtggcagaaatgacaggagtgagtacacgtacactgcgttatttatgatgaagaagtgtcaggatgtgcagagtttttgaaggctgctgttttgtattgggcgaaataaaggacaacatatgagcagcatgatactgtaagtaaaaagaaaagtgaattatctgaattgtgcgaaaaaaataaaaaacagaaaaaacattgacaattcacttttcccgtgataagataccacttgtcgctgagacagaccgatgaaaagaataagcccaagggc

SEQ ID NO: 6985 - DNA, 42703 bp, Unknown
  gut microbiota DNA sequence
atatggacatttatgaaattggcctcataataacgattcctaatttcattttttctatttcctcctctaatcccgcgtctccatcaggatcacgattccctccggaaacgtgatcctgaccgcctcctctgcaaatgcattgcttacacagagactgtcatacgccgttaatttatgatttttcagcggatacttcgcgccctcaatattaaatttctccacactctttcccagtggaaacaccgaaaagtacggtccgtatgcctctttctttgaaagtgtgatctcccggtccaagagccggatccgattacgactgtccacgatccgcacatctgctcctgcatccagtccgatttttaaacactgcacattcgcccatatatgatcgatccgatttccggtcgcccccaggatcaggatattctttcttcccagatccagacacaaacgcagtgcgatttctgtatctgaggcatctttgaccggattgaacttgcggatcggcacttttgtttctttctcatagtaccctaaaatttcaccggatacgctgtcaaaatctcccacaatataattcgggcagatttcatgcctgtaaagaaactccagtcctctgtccactcctatgataaactcaatctccggattttccagaacagatcttgcaaattcttcttccagcatcccgccgcttacgatcacagtccatctattcattggcgcttaaaatctccataaatccttttacattctctgccacatttcctttgaacacagcagagcctgccacgatcacattcgctcccgcattcagcacttctttgacattgctgtggtaaattcctccatccacttcaatgtctgcctggatccctcttgcattcagcagatttcttaattctttgatcttgtccaacgactccggaataaatgcctgtccgccaaatcccggttctacagacatgatcagaaacatctccgttttatccagtaccggttccagtgcagataccggtgtattcggtttaatcgatactcccgccttcattccgcatgcatggatcttatccacagtttccaccagattctcacatgcttctacatgaaccgtcagaatatcagctcctgcttttgcaaaatcttccacataacgaatcggctctgtaaccatcagatgcacatccatcacctgctgtgtatgccctttgatggatgcaagaaccggcattccgaaagaaatactcggcacaaacattccatccatcacatcaaaatggatatactccgctcctgctgcttctgtctcttttaactgctcgccaagtcttttaaagtctgccgacaaaatcgatggtgcaattctgtttttcataaatcaatacctcttcttttctttcaattctgtatacatctccagataatttttatatcggatcggatggatttttccctcttccagcgcctcttttaccgcacatcccggttcatgcacgtgatcgcatccctgaaaccggcactgcccttcataggaagcaaattcccgaaaatagtacttcaattcttctttttcaaaatcattgacataaagcgagctgaatcccggcgtatccataatgtaggaatccgcatctactgcgatcagctcagaatgccttgtggtatgctttccacgttcaatctttctgctgatcgttccggtttccatctgcacctgattctgaagcagattgatcagagacgatttcccgactccggaaggtcctgcgatcgccgttgtctttttcagcagaagacgacggatttcttctatattctcctgctccagtgcactggtaaatacgatcggatatccacatttctcatagattgcttctaattctgcaatttccggactggtcgcaatgtctttcttattaaaacacaaaactaccggtatctcttttcgctccatcatgaccagaaaccggtccagaagattgaaatgcggcgtcggctttgtcactgcgaacaccaccagtgcctgatcgatgtttgccactgccggacggatcagctcattctttctgggaaaaatctccacaatattccctgtcttattttcttcatccagtatttctattcggacattgtcccctactaaaggcttgatcttctcttttcggaacacgccttttgccttacactcataaacaccggattctactacgtttacgtagtagaatccggcaattcccttgattatttttccctgcataatttcctctgctgtcagtggttcgctcctgacgatgaaccaccgtttgatccgctgtcatttccattattgttatctccgtctgtcggcggatccggtgtcacattttccggtccgagactgaccacaatatcaactgttgaccctttttcgatctgacttccaggtgtcacagactgactgattacatatccttttgtaacagtagaatcataagattctgtcacattcgctgtcagacctaatccggaaagctttgcttctgcctgacttcttgtcagaccggagagagtcggtacttctacagtctctgtcttcttgcctttgctcaggacataattgacagtcgttcctttttccacctgttcaccggctgccggcactgtccggataatggtgccttcctcatactcatcactatactcactggagctttcacttccaagtgtcagtcccactccctgcagcgtagtctgggcactgtccggatccgcaccggatacatccggtacactgatcttctctttgcccatgctgacaaccattgtcactgtattgccctctgcccactctgttccggctgtcggatttgtggaaatcacatatccctgcggcacactgtcgctgtaatctgtctcagatgccacaacaaaccctttgtcttccagctgcttttgtgcatccgcctcagattttcctgttacatccggtactttggcagttttttctgccggtccgctgctgatcttcacagtgaccgtcgaattctcttttactttttctcctggttttggatcctgttccgcaatctcgcctttttcatatttgtctgaagcgacctgacctgctgactgatatccgatgttcttctttgtgagtgcttttcttgccccttcttccgtcattccccgaatatccggtacagaaaccttcttttccttctcttcggtcactaccttgccaggcatgaatccgccgactgccttactgattccaaagatcactccgatcgcaacaataactgccacaacgatcatcaaaatctttgtgacctttttcatctgtggatcgacttcttcttttttgccttttctgccatcttcccgacgatttcttcgatcgtatgaatcatcatcatactcctcgtcgtcataggattcgtccggatcatcatagtcctcaccgtcataatcccgattctgaactcttgcgatctcctgcgtatccatgaccacagtctcatccacattgttcacttttggtccgtttgaaataaatcctccctgcggatctaccagtgcccgtttcagatcaagcaaaagctcttcgcagttctgataccgatacataggactcttctgtgtacattttaaaataatcttctccaggctctttggcgtatccggcacttccacaattggagaaataatttcctcctgcaagtgcttgatcgccacagtgaccgtagactcgccatcaaacggaacatgccctgtcaccatttcatacatactgataccggcagaataaatatcacttttttcatctaccacgccgccccttgcctgctccggcgatgtgtaatgaaccgatcccatcacgctggtgctgatcgtattggacgaagtcgttgctcttgcaattccaaaatctgtaacctttacttttccgtcttttgaaataatgatattctgcggtttgatatcccgatgtatgatatgctggttgtgggctgcctgaattcccgtcaccatctgaatggaaatgctgatcgtctcttttgcagagagtctgccttttttctcgatatattcttttaatgtgatgccttccacaagctccatcaccatataataaactccgcggtcctgccccacatcatatacgttgactacgttcggatgcatcagacctgctgctgcctgagcttcgcttaagaactttttgataaaagtctcatctgagcgaaaatcgctcttcagcaccttgatcgccacataccggttcagcttatggtctttgcccttatacacatccgccataccgccggaaccgatacgatccaggatttcatagcgctttcctaaaaagataccttcttttaacatatactcacctcatctgcgaacggctctaccagtacgatcccgatattgtccgtaccaccgttctcttttgccgtttctaccagagactgtgcagattccacaatatctctgcccccctgtacaatatggaacagctcttcatcctccaccatattgctgagtccgtctgtacacatcagaatgatgtctccctttttcagacggtgctcataaaaatcaacctctacgctgtcttttgcaccgattgctctcgtaataatatttttatccgggtgatgctttgcttcctccggcttgatcccgccaaggcgtaccatctcttccaccagagaatggtcttttgtaagctgtacgataccctgattgatcagatacagcctgctgtctcccacatttgcaaaatacatcatctggttgacgatcgttgccagtactaccgtagtccccatcccctttaaatgaggatcctcggaagcttttttgatgatctctctgttggctgtcttgatcgccgaaacaagcgctctctctacgtcctgctcactggtattctccagctctcgttttaaaacttccactgtatacttagaagcataatcacctgcctgatgaccgcccattccgtctgctacaacaaacagattcggaagaggtcccagagaattgtctgtcatatagacatagtcttgattcacttgtcttaccatcccaacatctgtaatggaaaatgtcttcatacgctctctcctttactcattctctgtttttacatagcgtcttctgagctgaccacaggcgccgtcaatatctgcgcccatttctcttcttatagtaacatttattccgcttttttcaagtttatttttgaaattcaacgcatttttgcgggaaggctgctgaaaatcacgctctttgatcggattgaccggaatcagattcaaatggcagttgcgggattttaagattccgatcagttcctctgcatcttcctgtgtgtcattcactccgtgaacaaggctgtattcaaaagtcacccttcttcctgtctcctgaaaataaaaatcacatgctttgagcacttcctgcaagtcatatttatttgccaccggcatgagctgctttctcttttcctgagtagagccgtgcagagaaagtgccagtgtgatctgcagatgctccatggcaagctcgcggatcttcggcacgatcccacaggtggaaaccgtgagatttctctggctgatatgcagtccgtgttcatctgtaagcatacggacaaatgtcaggaaattctcataattatccatgggttctccggttcccatcacaacaacattggagactctttctcctgtgatcttctggatttgataaatctgccccagcatctcagacggcgacagatttctctccagcccaccgatggtagaagcacagaatctgcatcccatccggcagcccacctgagaagaaatgcagacggaatttccgtgcttgtagcgcatcagcacactttccaccacatttccgtcagaaagctgaaataaaaacttattcgttgcgtcaatcttcgaaatctgacgctccagcatttttaccggaaggatctcatattccgcctccaatttttcccggagcgctttggagagattcgtcatctcttcaaaactgtcagcaagctttacatgcagccattcataaatctgctttgcacgaaatttcttttccccgatctgttccatctctgcggccaattgttcatatgtatatgcgcgaatatctttcttcatcctttttctatccttttatttctttccaaatctggcaataaaaaagccgtcacttttatgaattcccgggagcagctgcagacatcctgcttcttccacactattctgaagagtgctgcacagtctgtccgcgatcggatccagtacaaattccggaaattcttttaaaaaccagtgtacattttctatattttctgccggattgatcgtacaggtgctgtagatcagcgttcctcccggccggacataggacgcagcatttttcagaatctccctctgcagtcctgccagctctttggtgctctgttcggttgctttatattttaaatctgtcttttttgcaagaacccctaatccggaacagggcagatctgcaatcacaagatccgccgcatcttttacatccgcatcacagacagtcgcatctttttgtactgcgtgaatattcgtaagaccgcttctctcgatattttccgtgatcaatcctactttatacaggcttagatctctggcttctacacttcctgttccccgcagtttttctgcaacatgaagtgcttttccgcccggtgccgcacagacatcgatcacccgatcccctttctttggatctgcgagttcacccaccagcatggaactgatatcctggacataaaactctcccttttgaaaactttccagctctgaaagatgatcatagtcctgaatccagaacgcgtaggacagatatggatgcggcgttaccgtaaccccttccttttgcaggctttctttcagattttccggcgttgtctttgccagattacaccggatcgtcaccggtgtctcttcctggaaggcctgcagcatggattcgatcacatccagatcataagtcttcttccacaattttaaaatccactccggcatggaatacacaacagacagccgttcgatcccctctgtgggatactctacctgatccagacctcgcgccacattgcggagcactccgtttacaaatccacgcagggtgccgaatccttttttcactgccagctttactgcctcgttgcacactgccgaatccggcacgctgtccatatacttcagctgatatacagcacttctcaaaatattgcggataaccggcttcatcttgttgaccttcactttggaaaactgattcaaaatataatccagttcgatcatgtgctccagtgttccttcagtcactctcgtgataaatgcgcgttcctttttctccagatactgatatttttccaggacggcattcaatgcaagatggctgtagacattctgctgtgtcacctccatcaggattgccagcaccagttctctctctgtcacctgtttagtcatctcttcttcctccgcttatgatcaacagacgaagcagctgcagaatcatagatgcggcacttgccacatacgtcatcgctgccgcccgcagcactgcctttgtctgacttaattcttccggatataacattccggatgtttccaaaatacggattgcacggctggaggcattaaattctaccggcaatgtcacgatctgaaacagcactgcagccgaaaacagcaaaattccgagattgatcagcagacttgctgtatttccattcatgaataatccgataatgatcagcggccaggctgccatagagccgaaattcgcaacaggtaccagagcacctctgatctgaagaggcgcataccctttcgcatgctggattgcatgcccgcattcatgcgcagccacaccgatggcggccaccgatgctgagttataggttgcatcagaaagccccagcgtcttatttgccggattataatgatctgtcagattgcccggaatgtgatgtactgttacatcataaatcccgtttgcatgcaggattcgctctgctgcatccttccctgtcataccggaccggctccgcacctgtgcatatcttcgataggtactgttgacatgcgccgaagctgccatacatattacggctccgataatcactaatatataagtaggatcatagtaaaaaaacatgctcttcctccaatccttttatttatgaatgaaacaacgttccttcttcgagatgatatcctcttaaaaatgcatctgtcttcattctcttctttcccggaatctgcaattcctgtacgattaaagttccatctcctgtctgcacagaaaaactgtcttttgtcacatctgtaaccgttcccggctgtgccttcgtctgctcttttgagacttttgcactccagatcttcaccactttattctcccagtgtgtatacgcactcggccaggaatttaatccccggatcagtctctcgattgcttctgcggaagcattccaatcgatgtttcccatttttttgttcaacatacttgcataatgtgtaggagtctctccctgtttttgaggaacgatggttccttcttccagtgcttttaatgtctccacgcaaagtgctgctccggcttttgacaatttgtcatgaagactctctcccgtctcttctgccgtgatcggcacttcggtcttaagcaacatgtcacccgtatccagaccttcatccatctgcatggtggtcacacctgtcacatcttctccgtcaatgatcgcccactggatcggtgccgctcctctatatttcggaagcagagacgcatgtacattgacacatccatatggtgtcagttccagaattgctttcggaagaatctgtccgaaagcgaccactacgatcacatctgccttatatcctgccagttcttccacacaggccgcttctcttaccttgatcggctgaaataccgggattccatgagaaagtgccgcctctttcaccggcggaaactgcatctccttgcctcttccttttggcttatccggctgcgtcactgccagacacacctcatgcccggcttcaatcagcgcttccagtgttcccaccgaaaaatccggtgttcccataaaaatcacacgcatctattctacctcctcttccggtggttctacatcatgcagtccgtcctccacacgttctacatacatatgtcctgcaagatgatcgatctcatgacagaatgctcttgcaagaagaccttcgccttccagttccacttcttccatttcttcattgagtgcacgtaccttcacatagtttggtcttgtcacgatcccccatttgcccggcaggcttaagcatccctcttcgcctgtctgctctccggatgtctcaatgatctccgggttgatcagcacgatcgggccttctcccacatcgatcacaacgatctgcttcaagactcccacctgaggtgctgccagtcccacaccatatttttcatacatcgtatccagcatatcctcgatcaaaatttttatgcgcatcgtcatctttgtgaccggtttgcactgtttttccaaaatgtcatctcccatgatcctgacttctctgattgccataatttcactgttcccttctatttattctttgttatcttttaaaaaacatgcatcggattgaaatcaaactgaatccgcatcttgcgatatcccggatttacttcaatatattgttccaatccgttctttatcctcacaagtgtatcataattttcatcttttatgtagattactttgcgatacacatcattaatctttccgattcccggacttgcaggtccgatgatcttcgcagtttctttcggagcaatccggatcgaaaactcttttaaatacttacaccctgtctctaacagcacctcatcctcacagcttaccagaactgcaagcagattttctaccgggggatatcccatgatctgccgataccggatctcctcctcataaaacgcctcataatcctgtgctgcggcggttacgatactgtaatgcgtgggagtgtaggtctggatcacagcttctccttctttctgcccccgtccggctcgccctgccgcctgtgtcaaaagctggaaggtgcgctccccggaacgataatcatctgaatacaacgacatatctgccgccagcacaccaactaacgtaacattcggaaaatcgtgtccttttacgatcatctgcgttccgaccagtacatctgcttctccattcgcaaatgcagacaagattttttcatggccgtctttctgtcttgttgtgtccatgtccatacgaagaactcttgcctgcggaaactgtgcttttacaatgtcttcgatctgctgtgttcctgcccgaaattctccgatatgtctggagccgcactccgggcagacaggtgtccttggttcttcatatccgcagtaatgacagaccatctttccgtttctgtgatacgacagcgaaacatcgcagtgcggacactttaccacatggccgcactctctgcaggaaagaaaccctgcataccctctcctgtttaaaaacaacatgatctgttcttgtttttccagccggtcttccatcaactcctgcagatgccggcttaagatcgaacggttgccttcttttaactcctgcctgagatccgctacatagacgctcgccatcttttgcattcccgaacggttcttcaattccagcaggcggtactccccgttttttgagcgatacattgcttccagagacggggttgccgagccaagtactacgctggcatgttccagatttgcccgctctatggcagtctctctggcatgatatcttggtatctgttcacttttataagttgtttcatgttcctcatcaataacgatcagccccagctccggaaatggtgtaaacaaggcggaccgcgggccgatcatcacgtcgatctctcccgcttttgcccgcatcaactgatcataacgctctccggcagacattctggaatttaagatggatacccgatttccaaaacgccggtaaaaccgcatcactgtctgatacgtcagtgcaatctcaggaatcaggacaatcgcctgttttccctcactgaccacccggcggatcatctcaatataaacttccgtttttccactgccggtcacaccgtacaacaaataagctgcccgcacatctctgctgtactcctgccagaagcactcgatcgcatgctcctgctctgccgtaaacacaagagtttttgctctctgctctttttctttcaccggatttcgaaacacctgctctgattccagaactgccacctgctgttcttccaatgcattgacgacactgcgcgtaatattcagttttttcgtaatcagttcgtattcaatgaccggatcctccagaagtgcttccagaagtcttgctctcgccttctgattcttctgctgataataatgcagctgcgcttctgcccgttctttgccaagcagcagacggacatactttttgatcttggcattctctttttgtttgatcggcaataccgtcttgagtgcctggatcatcgttccgccataatgttctttcatccatgccgccagcgcgatcagcttcgcctcgatctctacactgtttctggaaatatcttcgatctccttgactttggaaagatcatagtcgcaagtctctgaaattcctaccacatagcctttcgtctgccggttgcctttcccaaacggaatcacaacctccattcccacattcagctcttcttttaaccactccggaattcgatattgaaagatccgatccagtttttcatgttttatatctacaataatatctgcaaacaatccatttcccctgcttattttttctgttcctcttccagttctgttaagatctccgcaatcagaacccgctcatccatcggatgcttcacaccttcgatctcctggtaatcttcatgcccttttcctgcaagcacgatcacatccccggtctgcccgtgtgtgatcgcataacggatggcttctttcctgtctatgatttccacatacgctccgtccgtcttttcgattcccactttgatgtcatcgatgatcgcctgcggctcttcaaatctcggattatcggaagtgatgatcgtcagatctgccagacggccggacacttctcccatctcaaagcgtcggtctctggaacggtttccaccgcatccgaacagacataccagacgttttggatgatattcttttaacgtggtcaaaagactctccagactcatggcattgtgtgcatagtcgatcatcagagtgaattcatcagacactttcaccatctcgattctgcccttaaccttcgcctttttcaaagccgcctgaatgtactctttcggcacatcaaagtgtctgcacactgcaatcgctgtcagtgaattgtaaacactgaatgttcccggtacatcaatctccacatcaaaatccatgactcctgccacatgatatgccacaccgagatatcccggtctggacaccagatttacatcttcagcccgcagatccgcctctttgcagaaaccaaatgtctccactttacatgtagcatttttaaatacatccttaaaatacctgtcatctgcattggcaattccaaccctgcactgctggaacagtaagcctttgcatcttttataatcttcaaaatccttgtgttcattcggtccgatatgatcttttccaagatttgtgaaaatcccgatttcaaacggaatccctgctgtccggtgcagcatcagtccctgggatgacacctccatgaccacgctgtcacagccggcttccaccattttggcaaaatactgatgaatggtataagattccggtgtcgtattcgctgccggaatcacttcctctccgataatggcctcaatggttccgatcagtcctactttatgtccgactccctccagaatggatttgatcatataggtcgtggtcgtctttccttttgtccctgtaattccaataatgtgcagcttctctgccggatagccgaaataagcggcagaagcaagtgcgagtgcgtaccttgtgtcttccacacggatcacagtcattcccgccggtgcctctacatcctgctgcacgatcacggcttttgctcctttttttgccacatcagctacatactgatgtccgtctgagacagcgccgctgatgcatacaaacacagatccttcttctactttacgggagtcattgatcaatgttgtaatttcgatcttgtcactcccctgtactacttcatattccaaacgttccaataactgttttaaaatcataactgttcctcctgatcaaagagattttcatccctgcatacattctataggataccataaaacaatctcagttgcaaaagctgatagaaaaaagagcccggatgaatcggaaatcttttccttttcatccgggtttgttatcttctgcaaaataatactgcagatttcctatcttgtaaggtagaacgttacagaagtcgtatcgccatactgcagcatccgatacccttcttctccctcttccagttcatagcttgccggcagatcttcttttaccatagacagatcaaatctaaattctcccgtctcagttcctgtatgtgtccactgtccggtacgaacacggccatcaataaataccgtataatttactgttgtcgtgcgttcttctacttccggctctaatactttcacataaacatcaaaactgctgttgtttccagctgcatcgtatgcatagaagcgaactttatattcaccaggtgtcttggatgtaaatggctgatatccatccagaccgtgttccaatccccatttgtcaaccttaaatgttgctgtcccagaattgtcacttacccactctggttttgtgaacatctcgaccaacttttcttcggtatactcttcaccctcattgaccgggatctcttttctgtatccgtttgctgcctcgatagctgcataatcaataaccggtgcttctttgtcaatattggtgatactgaatagatgaacatctcctgtcactcctgtcacacttgtcagcgtcacactgtactctccgtttgcattaaatacctttgtgaatgttctcttattaacctgtttccatccttccggtgccacacaatctgtagatgtcttaattgtcactgtcacgtctttgtttgtccagtctgtaatatcctgtgtcagttccacaactattggtctcgaattatcgatccgttttacttctacaaactgtggctctgatacatttcctgcaaggtctgttacggtaaagtttttatctttccagtttgcatagaatgtcttcacgtaaacaaatacgccattctcttcacccttaagtgaccatccttcatccggcagctgaatttcttcacttgtttccagacggacttctttggactgtgcctgtgtcttgttgtctacgatccagttaaatgtaggtgcagttgtgtcatagtagaatgtcacggatttcgcattgcctgcattgtctgttacaactgctgtgttttcgccttcttttacaccgagtttttcgatatctgtgagatatttgtatttgctgttgatgactgtgattgtattattgactttgagttccttgactccctctgtatcatgtacagcaattcccgtgatcttgcggaagcggtcaccatttccttcacccttaacacttacattcggcgcctgtttgtcgatagccgtattcgtgattaccagctgaccattttcgtcaaacggatatacatcctcatctttcatcttctcaacactataagtagtttcatatccgtcaatcgtctcgattgcttcaatactataaattggataatatggatattcttcttttccggactcatattcgaccatatctttccatgtatgggtatatccattttcttcattcaagacaacttcttcgatttcagttacccagtcattgataaatccgcgtttcacaaaacttactttaatttccggacggtttgcttcatcaccgcctacccattctactttgacagtcttgtcttgttttctgacatttaatgcgtaggttgctttatacgcgcgttctcctgcctcttctaatgtaatcttataatttttagcaggaattcccgggctgactctccactgggccttttcaccgatcttgttatagcgcggaacattttcaaacgtatatacatagtcctgaggtgcaggtcccggggaaaatgtgacattatttccctgtgtatctgcagcatgagcagaactgctctcatcgatcagtctcggtgtcagaagtgctggtctcacaccagccagattgtcctgatcttcccagtgatatacgagtgtccacgtatctgttgctttcagatcatcgaacactgcaaatactgtcatatctccttccaccactgtctggtccgtgacttcctgaccacttccatcttttgcagtattccatcctgtaaagacaaatccatttttctccggattttccgggagtttgtcaccgatcatttctccaactggaattttttctgttgtcagtgttccattaacatcaaaggtaaccgtagcatctgtactgataccttttaatggcagattgcaccatgttcctttttcctcatctccaaattcagacttcagataagtatcctcactgccctctggaacttccagcgtagaagtctgtgctgcatccttaaatggcgaattctcgttatgctctggctctaccgttggaggtgtcgcaccttccatcactacatggaactccactttctctccaggctgtccataagattctgcaactccaaatgcggcgccgctgatagatttcaaacttgccggcagtgtaatatttaagtatcctgaagcaagaaatgcccccggtccgattttttccactttcggcatattgactgttaccagatttctacatttgctaaatccccactgagaaatcttcgttacatttggtatattaacctctgtcagtttctctgctccggaaaaagcagacgctttgattatctgtgcatcttcgatttttacagatgtcagattttttgtcttccaaaatgcataacttccaatatctgtaaatccgcctaattcaactgtagtcagactggctttttctgagaacgtccatcccggaaatacggttgactgcgcccccttcttatcttcatatgtcagaccatttttcagattacatttaaattcctggatctgatttacatttttctggatgtactccagatcccccgctgtcaccttacctgatacaaactccagagaagtcacctgatctgccgtgatgcctgcttttgcaactgcatcctccagactggttcctcctgcttctctttccttattgatattcacttttacaacatcttccgggattgcttctcctgtacaagtaatcacaatattgccggtttcatcaaacggatatacatctttatcattcttctccacactgtaagttacttcatatccatcaacagctctgatttcctcaatactataaatcggatagtatggatatttgtcttttccggactcatactctaccatgttctcccatgtgtgagtatagttattttgcatatttaaagtgatctcttctccctcatcataagcacttgtattggaccatttctggcgtttcatctgtaccttgatttcaggtctgttttctgcatctcctcccacccagttgacactgactgttttatcttgttttcttgtccgcagagtataagtagctttgaattcataatctcctgttttttctgtcttgatctcataatttgtactgtaactgcccggatttaacttccattttgctggctcaccgcgcttattgtacctcggaacctttgtaaattcatactgataatcctggcctaccggtcccggctgaatcgttacatttctatactgtgtatccgctccataagaagcactgctctcatcaatcaaagttggagcaacactattcggtctcacacctgccagattatcctgatcttcccaatgataggtaatgtaataagtgtccgttgctgtcatatctttttccaactgcagagaacaccatttgtaattctttggatcaccccaacgctctgcattgacatacgcttcccgagcctctgccggtacagtcagcgttgaattcactgcatacgcaaacggattgtttttccctggtgtgaccacgggaggagttactctttcacttgtcacattcagctttcttctgtttttctgctctacagcaaatgcactgtctcccaaggtttccagtgttgccggaagctgaagttctttcagattcttagagccgtaaaatgccttttctccaattttcaaaacttttggtacattcagtgctgtcagcgcattacactgataaaatgcctctgtctcaatttctttcacatgatccaaattcaactctttaatcttttttccattgtagaaagccctattctgaatttttacagcattcggaatagaaacagataccaaagaggaagtattttcaaatgcctgacttccaatctcctcaaatccgcccaattctactgtatgaagtgcccagaaattataaaatgcagaattcgggagcaccttgctgttctttccattcttatccacaaatttcaatgtatcactcaaatttaatttgaatgtctcaatggttttgaaaattcctttttctttcgcctttaacaatgccagatcttctgatgtcactgttcccgatacaaattcaatggatgtaatctcatctgtcacaccggactttgtgatcacatctgacagactctctccgcccacttctacaccattaatttttgcattgactgttccctggggaacttcctgtacaaccttgtatacttccaattcaccggcagatgccagtaccccgctctcgtatgtattatacgaactcttgatcgtaatctttacatctgtagcttctactgcatcaaaatcgatattacaggaaccgccctgtccaacatctgcaagtgtctcctccttaactgtctgccagtcagcttctccgtttttaacttcgactttaatttctttaaatcttccgttggcaccagtcccttttacctgataagcaattcgtcctatgttgtgaactcctccaagcgaccactggatccagtgaggtcctgtcttggaatcatactgactgtgccatcctttgttgacatctccgtcaaatgcaagtgatgcgtttccgtctccccattgagccgaatcctgataagaacttgcagttgcacttgttttcatcggttcctttggaagtgcttcgtatttcacacccacttcgttttgttccgatactgttccttcttctgcccgcacttcattcatccccactgccggctgcagaacaccaaaaagcattgccagtgtcatgacccatacaagcaacactttttttctctcttttttcataccttcatttcctcctgtttttgttttgttccttgcttcattgactcctttctcattttttataacttctgtacagttatatcccctaagcatatttacgttttcagtatactcttattccagcaaaacttccatattttatttgttttttctttgttttttacgttttttgcataaaaaagagagcttttcttttccagctctctttttctgttacttttactcaatattcttttattatttttccgccatatgcacagtcagctgattgaacggtatctcaataccttcttcatcaaatatcagcttgatttcttccagaagtctccatcttgtactccagtactcctccgtcttcacccatgcgcgcagtcccagtataacagaactgtcagccagagaatcgacaaacaccttgatatcctcgtcctgaataatggaatcatcctgttttaacagcgtttcgatcagatcttttgcttttttcagatctgcatcataggcgatccctacttttaaatccaactgccgttccggtcttgccgtaacattcgtcagactgctgttggaaagcgttccatttggaatcacgatcgtcttattatctaccgttgtcagctttgtatagaagatctggatgacttttaccgttccttctgttccatcattggcaacaatgatgtagtcacctactacaaacggtttcaaaagcaggatcagtacgcctcccgcaaagttcgaaagactcccctgcagcgcgagaccgattgccacacctccggatgcgatcagcgccgcaaccgaggatgtctcaattccaaaatttgttgcgatcataaacaaaagcagtgcatacagaccaaatttcaaaaatgattcaacaaactggatcactcctgtatccgcatttgcccgctgcatggaatgcttcaccatcttctggattccatggatcaccgctcttccgataaagaaaaatacgattgcaagcacaaccttaatcccgaaagagatcaaggttggaatctgatcctcaaaccactgtacaaactggtttacatcttttgccacttcttccggggactgtactacatcctggatttcctctgttgctaaaaatatcactcttacacctcctgatttaatgccagaaacgcacagagatttcctctggcatctcctgcctgtctgtgagaatatagaatctcactgttacaatgcgtacacagattggtcactgcaatatgctccggcaaaatccctgcctcataaaagatcagttcattggctttccacagattcagctggtacttctgattttctttttgataaaacaacgcatcccagcagtcttccggaaaatttttctgaaactgccggatcacatcttcactgacctcatagcagtcctgacagattgacggtccgaccgctgcgagaatatcctccggtctgcttttaaattctctgcacatcgtttccacagtcacctttccgatctttcctacggttcccctccatccggaatgactcagtccgatcactttctttaccggatccacaaaatacaaaggaacgcagtccgcataaaatgttaccagacaaattcccggaatgtcagtcaccagaccatctacatccgagtaggtcctaggttttacgatcccgcagcctttgtctgcttctgtcactacccgcacattggtcgtatgtgtctggtgagtaaacaccatatcctcacatcggattcccatcgctgatccgatccttcggaaattttcacgaacagcctcttcttcatcccctcttgtgaaacttaaattcaatgaagaaaaacagcctttgctgacgcctcctatccttgtagaaaatccatgctttacaatccctgtctctcgaaacatcggatattccaggtatggtggttctgtatattgttcctgaaaaatctgttcttcattcttataacgaagtcctaatcccattttttccactcccctttttatattctatgccccctcaaaggcattttcaatgtgacacacctcgttcccctctattgcaactacatcaaaccttgccgcagcatcgggtattttatgtgccgccacatattgctgagcgcatcggtacaatcgtttctgcttttttgtatccactgcttccagcgcactgcccgcactttttgttcgccggtatttcacttcacagaataccaaatactccctgtccctggcaatcagatcgatctcccctgcccgacacctgtagttatactccaggatctgaaatcccttcttttctaaaaatctgccggcaatctgctcataggcagtgccgacagctctgttgttttgtttcatccttttcacactgcgcccggaaaacaccacatttttcagacaaaatttttaataaaggtacggcggtgaatcggcgtcggtccaagtttccgaagtgctgcgatatgctctgccgagccatatcccttattgtcagcaaacccgtatcccgcaagtacctgatcatactcttccatcagacggtctcttgttactttcgcaattacacttgcggccgcaattgaaacactttttgcatctcctttgatgatcggcacctgtggaatcacaacctccgggatcgtgactgcatcatttaaaagaacctccggttctacagacagctgaccgattgcctgacgcatcgcttcataggttgcctgaagaatattgatctcatcaattcgcgccggtcccgccattccgatcccaattgcaattgctttttcctgtatctcatcatacagctcttctcttcgctttgccgagagctttttggaatcattcaaatatagaatctcggcgtctttcgggagaattaccgccgctgccacaaccggacctgccagtggtcctcttccaacctcatcaattccgcagatatagtcacaatgactatacttttcttcatactgccgcatctgctttaaacgaagtctttcatttgcaagcttttcgtcctgcttctgatatttctgaatgagcttttgcactcccatccttgtatcatacgcatacatctcatacaattctgctcttgaaccccggcacgcttcaaactctgttctgatctcactgatacttttcatttcttttcctcaatctacttcctcttaatcgtgccggataaacccaatgtcactaaacggccagatcctcacccaggctcgcccgatcagatccttcctgtgcagcacgcctacactcggatccctgctgtcagaactgtgatttcgattgtcacccagaacaaaatattcatcgtctcccagtgtgatcgattctgctgcaatccccggatccagcatcacttcttttccataatgttcatccgccagcagttctccattgatatagacctctccgtctataatctggacagtttctcccggcagtccgatgatccgtttgatataatatgtattttccttatattgataagggaatacgataatctcataccgctcaggttccctgaaacgataactgatcttgtctacgatcagattgtctccatgttgcagtgtcggttccatagaatgtccgctgacttctgtccgctgtcccacatacgtaatcagaacatataccgcagccagcaaaatcgcaatatacacgagccatcctaaaatttctttgaaaatacttctatcctgatctttctctttcatgctacgactgccccctctttactctccgtctgtctcttcataatcctgagggaattccagagtaattcttccaattcttccatttctaaaatcatctaacaacagccttgccgccttttccatatccagctcactgcctcgtaccagacaatgcctgttcttcgcaatttcttccagacacgcataaatatcctgtgactcactcacatcatatttttcctgcaatacacccggataactctgtaccagaaaccggatcagctcgcctcccagctcttctgtattgagaatctcatctttaatagaaccgataaatgccagccgaagtcccacggtctggtcttcaaacttcggccagagaatacccggcgtatctaaaagttctacatttttatttaaacggatccactgttttccttttgtcactcccggcttattcccggtcttggcacaggcttttcctgccagtgcattgataaacgttgattttcctacattcggaatcccaacgaccattgcacgcaccgggcggtttaagatcccgcgctttctgtctctttctatcttctctttacaggcttcctgaatcacgccctgaatcgacttgatccccccgcctctctttgaattgaccttgactacagaatatcctttcttcttaaaatactctgcccatgcatcattccacttttcttctgccagatcggctttatttaaaagaatgagacgtgctttattttttccgagctcatcaatgtccggattccggctgctgaccggcagccttgcatccaccagttcgatcaccagatcgatcagtttgatattctcctgcatcatccgttttgcctttgtcatatgtcccggataccactgaaaatgcatattgtccctcctcactattttacaaatccaaaattactgcccacactcgtattaaaccatatcttcccgtaaatttccgaacgttttacatttccgatatcagccatcctgctgtcatcgctgctggacgcctgatctcccagtacaaaatactcattctcaccaagtgtgatctcatcctgggcaactcccggcttttcaatttcggacacaaagatatcttttttctgttcttttccgttaatatatacttttccatccttgatctgaaccgtctctcccggcagtcccacgatccttttgatataataatgtgcattttctctgccatttggcttaaacgcaataatatctcctcttttcggagtcatggcattatacaccagacggttcaccagaacaacatctccgttttttaattccggccgcatcgaatcgcctgcattgctcactcgctgtccaaaataaaataccagtataaatgcaagtgcacagacgactgcaatctctgcgatccagagcgcaaccgcttttttgttccaatggatcttttcactcagaaaatgcagttttgccttgtgtggcgctctttttcgcttttttcgaaactttaagtgccgcatacattctccttataacagaaaagggacaatctacacttctgtaattgtccctctcatcattcctactattttactaattctttaaccttagctgctttaccgatacgtgatcttaagtagttcagttttgctcttcttactttacctctgcgaacaacttccactttctcaacgtgtggagagtggattggccatgttttttcaacaccgattccgttagagaattttcttactgtgaaagtagctcttactccgccaccctgttttttcagaactgttccttcgaaaacctggattctttcacggttaccctctttaatcttagcgtatacttttacagtatcaccaacgttaaactcaggtgcattttctttcatctgctcagcttcgatttttctgataatttcgttcattgtgttcctccttcatcttggacgttcttaataccacttcggtaccagaggaccatctcttcttttcacaactgttttattctatcatattttgtaaatagtttcaagcattttcctcatcttttgccaaaagttcctgcaaaaacttcatttctttcttatccagaactccgcttttcatgcacttttccaaaagatccggtcttctctcctttgtccggatgatcgactgctctcttctccacttttcaatattggcgtgatgtccggacagaagaatcggcggaacttttttcccatgccattcctcgggtctcgaatactgcggatattccagcagatcatcctgaaaagattcaaattctgcggatacatcattgtgcagcacacccggaatcagacgggaaatcgcatccaccatgaccatggccggcaattctccgcctgtgagcacataatctccgatagaaacataatctgtcacaatttcctccagaacacgttcatcgattccttcatagtgcccgcagagcagcaccagttcttcttcttttgccagttcttctgccatagtctgggaaaaagtcgctccctgtggagaaagatacacgacacgcggcttctttttcactttttctgcgatcgcctcatatgcctgataaacaggttctgcctgcatcagcatacctgctccgcctccatatggataatcatccacgctttgatgtttgttaaacgcgtaatcccggatattgaccgcctcaatggaaagcagcccgttgtttaccgctcttccgatgatactggtacccagtccctgcatgaccatgtccggaaataatgtcaaaatatgaaaattcatcgtatctgtcctgcactttctttcattgaaatcattgatccagcaatccgttcagcagatgcacctgcattttctgcgcttttacatccacggaaagaatacactggcggattgccgggatcagcacttccccatgtgtttttgactctacaagatacacttcattcgccccggtttcgatcacatcttttaatgtcccgaaaagttcctccggattctcatccgtgtaaacttccatcccgatcagatcagcaataaaatattcgtcttcctccagtgcaactgcatcctcacggctgacaaaaagagaacagcctttgtactgttcgatatcattgatgttgtcaatccctttgaatttcacgatgacaaactgtttaaaaaatttcactccctggacttccagcgaaagcttctctttctttgtctccagaatcacttttttgagctttttaaacctgtttggatcatccgtggtcggaaatactttgacttccccgcggattccatgtgtggatgagatcacacctacctgtaaaaactgttccatgctcttctcctatcctctctgcgaaaaagaaagggggcagctgctttgatccaaagcctgtcccctttttgtcaagttactgtatgatatcaacaacaactttcttatcttcctttgccgctgctgcttttacaacagaacggatcgcttttgcaatgcgcccctgttttccgatcacttttcccatgtcactgtcagcgacacgtacttcaataaccgtagttctgccgtcctgtctctcagaaactgcaacgctgtccggatcgtctactaatgctttcgcaatcacttcaactaactctttcatttacgcgcacctccgcgaaacagcttatttttcgattccagctgccttaaagatctttcctacaacttctgtaggctgagctccgttgttcagccattttttagctgcttcttcatctactttgaatacgcttgggttctgatttggatcgtatgttccgatctcctcaatgaactttccatctcttggtgctctcgcatccgctacaacgattctatagaaaggagctttcttctgtcccattctttttaatctgatttttactgccatttctttcacctcttcttaatatttttcttttttgttatctatgtgctaaaaaggaagcttaaatctgccttttttaccacctttacccatcagtcccggaagtcgcttcatcagttttctggattcgttaaactgctttaccatacggttgacttcggaaatatctacaccagcgcctcttgcaatacggtgttttctggatggattcaaaagatccgggttctgtctttcctctactgtcattgactggatcatggcctccatccttgccatcttcttttcattttcttcggagtcaagttccggcatctttgcccccatgcctccgagtcccggcatcataccgagaacactggataatccgcccattttcttcatctggttcatactttccagataatcttcaaaatcaaactgggcttttttcatcttctctgccatctgctgtgctttctcttcatccagctcagccccggctttctcaatcagtgtcagaacatctcccattccaagaatacgggatgccattcgatccggatagaactgctccagatctgagagcttctctcccatacccacataaagaatcgggcatccggtcactgccttgatcgaaagtgcagcaccgcctcttgtatcgccgtccagctttgtcacgatcacaccgtcaatcccaatcttatcattgaaacttccggccacattgaccgcatcctgtccggtcatcgcatccacaactaaaatcgtctgatgcacatccactgttcctttgatctcctgaagctctgccatcatatcttcatcaatgtgaagacgtcccgctgtatccagaatcacgatgttatttccattcttgcgcgcatgctcaagcgccgcttttgcgatatcagcaggcttgtttttatctcccatggagaatacttccacgccctgcttctctccgttgatctgcagctgtttaatcgctgccggacgatacacatcacacgcaacaagcagtggtttcttgcctttcagcttgtacttgcctgccagctttgcagtagtcgtggtcttacctgcaccctgaagtcctgccatcatgatcaccgtgattgcacttcccggctgcaatttgatctccgtcgtctcagaacccatcagatttacaagttcttcatttacgatcttgatcaccatctgtcccggattcagtccgttcatcacatcctgtccgactgctcgctcctgcacatcttttacaaacttctttacgactttaaagtttacatccgcctccagaagtgccatcttcacttctttcagtgccgcctttacatcatcttccgtcagacgacctttgcttcggagattcttaaatacgttttgaagtttttctgttaaactgtcaaatgccatgctataactcctctataattgtatccgatatcttccggatcttctctatcatctcttgcggtttctgatttccggcaccggattcataagcatccagcacactgtcgatctcgtgaaccttctccttgatagaaagaaatttttctaccagatgcagcttctcctcatagccttccagagccttctgacaccgcttgatcaggtcatgcactccctggcggctgatgcctgcctcacctgcaatctcactcaaagataaatcttccagtacaaactgttcataaatctctttctggtgactggtaagaagttcaccgtaaaagtcgtataacaatgcctgttctaaaatatcattcactcaaatcacctttgctatcataactcaaaaaaaaagaggtgtcaagtactttttcttgacaccttctttctttgccattcgcgcttacaaaagctcccctatattaaggagaccccacccggttccttcttcgtccagcgaaatgcaggactccctcagcttcagtttcacttctacattggtcatgtccggatattctgacagcagacatgcaaccgcacctgatacgatcggtgctgccatggatgtgccgcttttctccacataagctttcttttctttgtcaattctgccacagcttatgatcccaagtcccggcgccacaagatccggttttacaatgcacgtatcggatggtcctcttccggaatatttccaccgctgtcccatacgtgtcctgccccgcctgatttcctcataagcgcctactgtgatgatctttctgctgtctcccggtgaagcaatactgcctctttccggaccgtcatttcccgcagacgccaccaccgcaattcctgcatcccatagagattccgcaccgagtatcagtcgttttttctgcctctgttccagattaggctttgctcctacagaaatattgacgacccggatgggatattttttccgcatagacagtacccagcgcattccttccagaacactctccacacttccgtttccatcctgatccagtacctttgcaatcagcaaggaggctttcggcgctattcccgcgtaggttccgccggaaagccgcccgtcgcccgccaaaattccggccacatgtgttccgtgaccgctgtcatcatacatctgctcctttcgatgtacaaaatccctgaattccaatatccgttttccaaaatcaggatgtgcgcagatgccctcttgtgtcaagtagttgcaggcaattttctttcgctttttttacgattttatcaggtatttcagcactttttcttcaaaataacggctgggtgttaaataaatgctataaatccgcaaaaggctttgataaatagatgcaaacaaatcaagtagagtttataaaacgttagtagagaaatgattttgagggatatagcctatgatgactatacccctctccttctcttttaccatttataccttctgcaaggaaaatgtaattcacgcaatccagcctccctacaaatagaagataagattttcaatatttcttctcttgtaagattaaaccactcaccgagttctctatctgaaaaacaataaaaaacatcctgtcctgaaccatattttgtatatgtatgctctgcttcagccacctttaatcgtctacggatatcattaagcatatctgcaattgtatcgagttttttacgccatattggattttgaatcgccgattttccttccgcttgttttagtttctcaccatctctggtacgcataacccctgtattcaatgcgataagagtatcttcgatggctttatcaaaatcctccattcgaccttcctgataaatgtcatcttgaaaagctggacgatcaaaacattgaacaaagaatttgataatcgctttatcctcttccatagattgtattggcgaaatcttttcaatctctgaaagtgctgataattctgcagcctttttccactctaaaagaactgcttttgaataacgagtggtatctgtatctattaactttgagcaagactggcatagccatattccattctcagaagactttcgttcttctggtgtcatactttcatcatatcttggaccaccctttgctgcggcacaaatatggcagctacaccaatatttgtaattttatctggatcagtatttgcagcacaagttagtttttgacatttcggattgctacatcttctgcctactcgatttgcaagcaactccttcgtagccaaggaaaaatcatctctattgtttgccatcttgcatacctcatttcattttttgaataaaatttaataacctaaatatctatttcatagtaattcccattcgtttcaattcttgagccatctgataacgatgtgttatacagtctttgtcaagattattttcatatataatccaatcatttatcgactctaatgcgtaatccacagcttcctgatttaacacaacaccagacacttttaaaaagtttactctaattacaagttcaagtacatatacaaaataccaatttgcataatctgtaattttatcttcggagtcatgaattaacgcagccaaactattttttgaatatatataatgataaaatgtatgtctttcttgagataataaccccttatatttttctccatctattccaagcaaagaaattccttgttgtaacttctgactatttactattttcttaaaaaatatatcataactaccttttacattatttgtctctttataagtgtttattatgaaaccatctgcaatattcaataataaagatagtctatgatttacatttatctttccataattttctgaattcaaatagtaaaaagcattcacaactgattttgtcatttttttatctgaaatgcccgtgttacgaaatttatcatatttttctaacacttctgatgacaggtctctttgtgctctccctaataattctgaacaataccacattttgtctgttttataaaatggtaatgtaataagctctttacattccattttaaccccatcaatttcatatgatattggttcataaaaatatccatcataaagaaacagcaattcccaaagaagttggaatacaattttgacattctcttccccttcaagttctaatttacagttattatcttttatttttatatttgcagtaactcctttatattctgtatgaatttcttgatcgctccaattacgaatataatcctttactttcatgtctacttgccacttcataaattctccctaataatttttatttagttctcacttttacaaattcatatttctcactttatttataattatacatcacccaacatcattgtaaagaaaaaagcaagccgttttcagacttgcttttcatcatactttattccctatcatttccccctgctatcccatagctattcttttccatcactaaagttccagataatctccatatgctgttcatcccatacatttatcttctttataaaagtatccaccacctcttgatttagttcattgatcttacattctttccaaatgatatgagcatccggcagttctgcatgaaactctgtctccacctctgccaatcgcatctcctgctcttggatttcactttttataaaatcttcctttttctgcaattcctctctgaactctatgtattcttccctttggatttcccgctttccatatctctcataaagtgtgatctgttcttttcccacagcatctaaggcttgttgagatttttgcaacttatccctcttcacatgatacttctctttttgtacttcctgatactgactccacacttcttccaattccatctgtctgcggatttccttttgcaaagcagctaaaagaacctgttccaaaaagaatacattgacttggctcacacaattctcatcacctgtcgtataacgttcattacaataaaaataaggattttttgctttacgatagcgcaaagccttaccacactccccgcatacaacctttcctatcagaatatgtgctttttgtggctgataaggtttcgatatccccctcgtctgctgtactgcatcaaatacttcccgttcgatgatcggttcatgatgattataagtaatcttccattcacttcttggctttaagtgatttttccctccaaccttatccttcttatattttccatataccatatctcctgcataaaaatgatttttcagtatcgtgcagattgttgtatgctgccatgaaaattccttgccaactggcttccggtgtgttgctcctctctctatcagatattccacaggtgtttttaccttttctttatgaaacttctttgcaatatccacagaagtatatccttctaatgtcagtcgaaaaatttcccggacaactgccgcctcctcttctacaatctccacttgatttctgtcctctgcttttttgcgatatccaaaaggacagttcccgctgcagtaaatcccccgttcttttttagaatgtagggaagaagttacctttaccgataaatccttagaatagagatcattgaccagcgttttaaatgccagattcatcccaatcgtttttttagtgacagcttcactatcataatggtcattcacagagataaaacggattcctaaaaatggaaaaatctgctctacatagaaacctgtttctacatagtctctggcaaaacgtgaaaaatcttttacgataatacaatctacttttttctgccgggcagcggctaataattcctgcattgcaggtctgtccatactggttccgctgtaaccatcatccacaaattctaaaatctcataattttcaaaatttcgctcaatatatcctcttaacaacaaacgctgataagaaatactgttactctcctgtgcattccagtcatcttccttggacaatcgcagatacattgctatcttcagtctatttttcatcgtcagttcctcccatcaccttcgcaaactcatcattccacttccaaatgatttctacccgttttccacgatacacataaattttctctatcaggttttgcaccaattccgcatttagttcggcacagcttttgtatttcaaaatagtacggagaaattgattctgcttatctaccattctgtcaatggaagaatactctgtatgtaaatcacgtaatgcctgccgatcctgttcctttttttcttccagtttcttctttgtttccagaaattgtgcctgtgaaatgctcccgtttcgatactccagataataggaactgatcttcctgtcagcaccatccaccgatttttgcagttcatcctgtgctttctgtatctgttcttttcgtttttctcctgcctctttattaaattccatcagttttttcatctgtgtactgcttaaaagaaactcttttttcagcagatgaaggatcactttctgaatctgaagaaatgtaatctgttcgttttcacatttttcttcatcaatccgtttgctattcggacagctataaaatacaaatgtttttacttctttataagaagcctttctctccgtcaccatacggcttaacttatgcccgcactcaccgcaatacaaacccccacggaaaatatcttccatcgtatcctttctaagtggtctgcggttttgtattttaatatttccttctatcctttcccatacccgataaaatacttcttccgaaaccaaaggttcatgtgtgtgttccgctgtaatctgttctttcatgtgctttccggattgcacaagattccctatgtaggcatcgttggttaatagaaaccggatagattctctttcccactgtcttaactgctgcccctcctgctgataaaccgttttgtattttttataatcacttgggcgatgaatcttttgtctatacagccattttacaagagatacaaatgtctccccagaagcataccggttaaagatctccctgacaatctcactggtcacaggttccgacactaaagtccgttttccgtctatcttttcgatttgaaaaccatacggcggaatactccccagatattctccctgtttcatctttgcctgtttacttgctgtgaccttttctgcaatgtcccttgcatacagttcattggcaatatttttcaaatgcatggaaagcgcttcgttgcagtccgcctgtttgatgctgtcatactgatctgtaatggcaataaaacgaacacctaaaaatggaaaaatcttctctacaaaatttcctgtctcaatataatttcttccaaaccgggaaaaatcttttacaatgatacagtttatcaatccatctctcacatcttgcatcaaccgttcaaaatcactccgctgaaaatttgtcccggtagctcccaaatctgaatagcaatcatacagtgtaatctctgtatgggatttcaaatattcttttgccatctcaatctgcgtttcaatggagatttctttcccgtcatgattatccacagataatcttgcataaatacctgccatgtatgttttcaccgatacattttcttgcagtgattggctttctaaccgaaccttacgtttggatgttcttgccatttagatcacctccttcactacttctgattgtgaagaaagaaactccgacaacactagcatcttttccatttcttcctgataacaaaactgtaccgatacctttttctcctcatatacttctatcctgtctacaaaggctaatagggtatccctgtctaatgtggcaatctgcatcgtttctttcaagcgttccagcttcacaccggactgcactccattgtaaaacagtttctttaacatatcctcctgtcttgtcaatgccttctctgtttctatatactgcttttcatagattttgctaaaattcttaaagtctgtctgtgtgatgattcccgttttcaaatcttcataaagtcccgcccgcagctccagatatttttcctgctcattccttaatcgagtaatctctttatcaaatccgaccacatcctcaaagttcatttcctttgtctggagatactgcatctgtcggtttacgtccatcagaagtgtaacctgtgaccggataatctgaaacacaactctttttaagtctgtttccggaatactatgcctgctgcatccctcactccgatttctcgtagaacagatataatatattttttccgtccccttatatctgtttattcggcgtaccataggttctttacagtctccgcaaaacagaagtcccgaaaacatgtgcgctttttcttttcccttcccggctctggtatcgacttttaaaagccgctgtacattttggtaatcctctttggaaatgattgcctcatgtgtgccttccaccttaaaccactctgactccggcttttctaaaatcttatctaccttataattgactttctcccgttttccctgtaccatcattccggtgtaaatttcattggttaaaatacgctttaccgccaccgcagaccattttgatacaattccggcttgaaaacctgtggaataatgctctccgtaagatttcttatattccaatggagagaaaattccattctcattcagtcggtttgcaatggcaagattgctcataccatccagtttccatgtgaaaatattttttacaatctttgccgcatattcatctatgaccagcttatttttatcttcatggtctttctgatatccatagactgcaaatgcaccgataaattttcctttctcccgttttactctctgatgtgattttaccttttctgaaatatcctgacagtaggaatcattcacaaagtttttaaccggaatcacaagagatgtggtactctgatccgcagtcaaactatcgtaatgatctgtgatcgcaatgaaacgcacagaaaaagccgggaaggtcttttgaatgaaccgcccggcttcaatataatctcgtccaaatctggataaatcttttacaacgacacaatttacatttccattttcaatgtccgccatcattcttttaaaatctggtcggtcaaagttggctcccgaatatccgtcatcaatataaatatcgaataactccatatccggctgttctcttacaaaggaacgtgccagctcacgttgggatgaaatactatcgctctctcgttttgcgctgccatcaatatcttcatcatctctcgataaacggagataaatcgcagcatgatacattatttttttctgcattctgcttcctcctgatttttactattttttatttcagtcagttgaacctgtcctacgaggttacttcttatagtaattttcaggatttcgctgttttgtcctgcatctaagttaccataacatcctgctactgtaaagagtctgttgaaatttttagtattttgtttctgcaatttttgaaatatactgtttcatccgatcattcaatgtctcttcacagtcggaatacccaatcttcacaacatactcccccacccggacaagatagggattatgtacctgctctacatactctttcactcgtttttgtactgactgtttcgtatcaatctcaatttcactaatatccacaagctcatctggatttacttcttttatatttacacgcttcaattcctgcaaagttttcccatccaaaagcataacccccttcctatttgagattctatgcgtccagaaacttgtctcattctaaaaaccgttcttcttttgtcaaggttcatccttacataaacccaatcccggcacatgaaaaaaacaagcatcgaaaagattttcttttttctgcttgtttcttaacctcccccaaacagggttattgaaggggaaaaacatttcagagcaagattcgcctatgtccgacaataacccgtttccgggtttttgcagacttggcatttcttgatggggatttcgctccccattccctcgatataaaatctgcacttaaaacttgcaggttggctctcacaaaaagttgtgttcgcagcgcaataccgaggtattgacgatgtgcatacgcacgaagaagaaaggaggcttcctatggcaagaccgaaaaaaacaatctcccgtccgtatcgtatcacagtccgttttacagatatggaatatgggttaataacagatgcggctgaagaaactggagttaccttatccgaatacatccgcaaaatggtgttggaaggaaaaatagcgattcgctatgaagtagttgctgatatccctgaattacaaaaactgaccgctgagtttggaaaaatcggaagtaacttaaaccagattgcccgctattttcatacaggcggcgtccgatctaaaaccatgcaggatgaaattcaatcctgtatctctgaactttggaatttaagaaaagacgtgacaagaatggcaggtgactttcatggcagtgttgaaacatatcgtaagtaaaaatgccaattacggagaatctttggattatctcctattccaacatgatgagcgaacaaagaaaccgattttaaatgaacatgggcaaatgatattacgagaggaatattatctggatggattgaactgcgaaccaatgttatttgataaggaatgcgaacgtcttaacgatcaatatcacaaaaaccaaacctatgatgaaatcaaatcccatcattatatcatcagctttgatcctgctgatcgtgacgaatgtggattaaccggagaaaaagcacaggaactgggactagaatatgcccgtaaaaatttccccggacatcaggctcttgtctgtactcatacggatggtcacaatgaaagcggcaatatccatgtgcatatcgtaatcaatagtctaagaaaatacgatattccgaaagagggctatatggaacgaaacagtgattgtcttgctggatacaaacaccatttaacaaataactatctaaggcacttgcaaaaatctctcatggatacctgccaccgagaaaatctccctcaggtggatttactctcaccttctgaaaataaaatcaaaaatcgggaatattatgcctcccggtacggacaagaaaaattagataaattgaatgaacaaattcttgcagatggactaacacctcgcaaaaccacatttcagacacagaaacaatacctgcgagacgctattacagaaatttcccatacagcaaaagatgtggaagattttaaaaaacagctttatgaaaaatatcagatcgttgtaacggaacatcgtggacgtttcagctatctgcacccggaacgagaaaagaatattaccggacgtgctttaggaacaaagtatgagaaagactatctgcaacagcaatttgaatccaaccacagaactccaaatattcatcctgatatttcctctgatcctatggacatcttattcattaaatctaatctgcgactggtcattgacttacaaaactgtgtaaaagcacaacaaagccaagcctatgcccgaaaggtcaaactcaccaatcttcaggaaatggcaaagaccattgcctatgtgcaggaacatgaatatgataccagagaaattctggaagataaattttcttctgtaaaagaacgaacctctaattctagaaaacaattaaatgaatattcttgtgcgatgaaatcacacttccggaaatttggaaatcagagttccggtactcggaaatcgcctattttgtgcttgatgacttatccatttctgtttggatattggtcaagaccttgccgcatctgcggtgcgtagcagtctttaccaatgtctcaacagaaattatgattcggtatgcacaaaaacggatctaaaaagtgatttccatatcaccggacagctgatgtaaaaccatccggaatattcaattaaaaactgtggaatcggaattaaagaacctcaatcaacaactccactacaccggacagtatcttgcaaataaatctgtctatgcacaatttcgtaaaagcaaaaataagcagaaattccgtcaggaacattctgccgaacttacattttatgaaaaggctgtaacatcactaaaagagaaaaacggaacgcagccccttcccacgatgaagcaactgagagaacagaaggaaaaacttctaactcaaaaagatactctccagaaacaatacgactattaccgggattaccagaaagaactacatactgtatgtcgtaacgtggatatgatacttggatggaatcctccaatccaaactacacataccaaagaatttcaattataaaagaagtctcctcggtcttttacagatcgggagacttttttaacgggtagtgttcttatttacttattgagttctgcaaaccgaaagttggatagaaaaactaatttaaagcaattctacatcaatattttcagcatcaaaaatttcttttactttatcaaaattactgctcattattgttgcttccttaagatttggaaattgtcttatttctgagaaagttatattgtttaaatcaaagcattcatcttctccatcccattgtggaattatattcatatacacttcactcccaccatccatgtcgattttttctacatattgtgcaaattcccttgggatagacaattctctaaaaaaattaagtgccggttcaattacggtatagctatctgtatttatctctagttctttatgctcatcagcaaaatcataaatatcaaaacaaggctttaataaattcaagtcatacatcaaaacttgaattactgcaagtttaaaatttaaattttcaaactgtaagattccttctgtattattatcaccaggttctcttaagaacttttctttattatcatcttttactttatctagttcaacttctttttttcttccaaacagtccgaataaacccattttctggttctccaattattatatttttgagtatttcaacttttgtcataccatttttctcttccaataaactgagaattatcaattaaatttcaaaaaaataatctcattaacttctaatttctgttttttactcaactttagtgtagttctccatactaaaagtttctaaatcaatcactaccgcaacaacattgtcctcattttcttcaataagccataagcgagtccataaggtttggtcgttcatattagtagcagttttatcctcaccatcggtaatgattttttcgggatctaattttgttacaaaaatgttttcgggtttaagacctggcaggctgctcttaagttcctcctctgttagtcctgctatatccattgcttcagcaccgttataatactcaacatctccgtaccagtagttatcgttaacattctcgatgaattttaaccacataaacttatcgtcaacgaatttataaccagcaccagagccggtatctatttcccatgttccttgtatcagtgcattatcatcattattatctttgctgtcagtagtatcggcgcaagcggtaagcccaaatagtgtaaaacagatcatcagaatagctgctgcaattctgaaaaacccacttttgcggtatttaatcaaattcatatcatagttcataagtaacctccaagttcaaatttgttatccttattctaccatactccaactgtgttttctatccttattagacaagaacaatcagcttttatctgactgtttcttttcgctataagaaaagtaggaataccttttatggcttccctgctcagtgatactatcagttccctaaattttaaatactggtaacagtcttaactttatagccccttaatctattaagagctcttaatctatcaataaaattatctaatgcttcttcctcatcaaaataaatatcttgtgaatttgtaaccttactagctctttcatctgttgcataaacaatccacttatcattctcacaccttaacacaacttcattttctctattatacctttcttcattcatattataaccttgtaatttctcgtcctttataatttttattgcttcttttatattcatattttatcttccctttaaatgatttatttgctagagaaccaactccatgtctgatttgtctcacaccacttctttatgtgatcaggcaatcgttccatatacatattccgatatttttctggattctgcaggatggtttgcaccagctctttttcatttaatcccagattttctttcagctcttgaaactggcgtgcaaaagcattgataatatgttccctttgctctcccactataattcttggtattatttgaaacttttcccaaagatactgattataattttcgatttctttaatatgtattttgaaacctaaatctatctttattacctctcctgtcatataaataaaaaacacaggtgttactgctcttccattcaggcttgagctttcttctgcccatccgaatatagccagatcttttgctataagcctgtctcctgcataaagccaatgtgttcctgattttagtaatcctaacacttttttatccattgtattttcaataggataaaatttttcatttttcacaagctcttctagttcacattttgtaaaaatccgattaaagtatggcatacaatgatatgaaattcttatatattttatcattgggcaactcatcacaaaggcagctattccacatagtatcccaagccataagttttcacgatttccatcacgaacaagcaaaataatcgccgctacaaatataaaaacacaaaataaccacgccccaagaaataaaagtttttttactggatataatcgttgccattctaatttttttagttgcataatcaagcattcccttccttatcccttaatcgcctcatccaaaaccttatcaaacatttcgtaaaaattacggaatcgatggatttctcttccagacggctgatccaattccatataacattgatttttatattggtagacataccagctaatattactttcgcctaaaaataagtattctctctgcttttcattttcataccatatgtgattgaattccaatagtccataaacaagctgcttcatttcatgctctaataaatactgatctacaccatataaaataaatccattaaattctattccgtttatccttgaaagaacatccagatattgttgcggaatttccatgttccatttctcttttgcagttgttaccaattcataaatttctttctcggatgcaccggaatttatttcctcatcatatagttctttctcttctcttatctgctgtaaataaatttcccacataaaattctgcactccttcgagatttcataatctaatgccattgtagaatcatccgcattgcaaatccttgactacaatgcagttctttccccatttgctttaaaaaataatcttcctctttcggaaagacctgttttgtcatatattttaagaagtctattttctcagttgattcctgcatcacacaatcaagtgaactccatccatctgttacaggagtatagatatctctagttatcaatgagaaagttggtttttacagtattctctcatagcactatttatagatatatcaccatttttaaaaacaccatcgcctttatctaataaataatctaatgcatcttgatatttatgatcataaataaatgataatgcttttcttaattcgacatggtatatagaattttctaaattattgtaaaaatcacagattgaagatgattgaacagttttataaaaatgttctaaataattatctatgatttcttctaattcactgattgtccattcttttaattctgtttcatttttaaacaattcagctccgctaactgtaaatgcaccaatagttctcaaacttaaaggtgtttctttgttggtttccattttcaataaatcccataacaaatcatctaaccacaatg

SEQ ID NO: 6986 - DNA, 1060 bp, Unknown
  gut microbiota DNA sequence
cgattttttctgcgaaagtatcatatactttttttgctctttcatctgcttcattgtaacgaatgacatatggaagaagaattgcatctgcaagaccatgagaaatatgaaatactccacccaatgtatgcgccatggaatgtacgattccgagagaaacattggtaaatgccattcctgccaccattgatgcctgcagcatgatttctcttgctttcatatctgttccatctgcgcaggcttttggaagattttctataatatcgatcgctgcctgcgttgccagaatatcggacacatagtttgcccgattggataccagggcttccagtgcatgtgtcagagcgtccataccagtttctgctgtaatctttgcaggcatggaaaccgttacttccggatcacagatcgcaatatccggcatcatttccatatttccaagtccatgtttcagtccggtttcgttgtcagaaataacgatggatctggaaacctcacttgctgttccacttgtagatggaatgcagcagagtcttgctttttctctcagttttggaaattcatttggaggaagtacagattccattgtctttaattccgggtgttcatagaagatccacattgcttttgcagcatccattgctgatcctccgcctaaccctacgatcaggtccggaccaaatcccagcatttcctgcgcccctctcatcaccgtttcaaaagacggatctggctctacgccgctgatcaccattgtttctgcaccggcttcatggaaatatccttctacttttgcaagcattccacttctttccatactttttccgcctactacaatacttactttctctactttgattgttttaatatattccagacagccttctccaaacatcaattcagagcctgccagtttcattggtctcatcatgattcttttctcctttttattatgcgtttaatccatctaatacttttttcacaagatcataggaaatcggattgctgataatcccgccttctttcaggctggatccgatgatcgcaccatctgcaatct

SEQ ID NO: 6987 - DNA, 515 bp, Unknown
  gut microbiota DNA sequence
aagcttcggtagtgtgtttcagccccggacattttcggcgcaggacctctcgactagtgagctattacgcactcttttaatggatggctgcttctaagccaacatcctagttgtcttcgaaatcccacatccttttccacttaacacacattttgggaccttagctgtaggtctgggctctttcccttttgactacccaacttatctcggatagtctgactcccatgcaccatctacacggcattcggagtttgatatcccttggtaagctttgacgcccccttaggaattcagtgctctacctccgtaagacttgcatgaggctagccctaaagctatttcgaggagaaccagctatctccgggttcgattggaatttctcccctatccacacctcatccccacccttttcaacggatgtgggttcggtcctccattgccttttacggcaacttcaacctggacatggatagatcacccggtttcgggtctactccgactgactatttcgccct

SEQ ID NO: 6988 - DNA, 29788 bp, Unknown
  gut microbiota DNA sequence
aatcaagtgttttcagtttgctcagcagacactatttagggataaaggaattgtttttcattggctgatgtcgtataatagcacaaaatgtagtaatctgaaggggtggagtgtatggaaaaggatatgaccgttgggaatccaacgaagatgatactgaattttacgattcctctttttataggaaatgtatttcagcaattgtataatatggcagatacaatcatcgtcggaaaatttgtaggggcaaatgcgttggcggcagtagggtctacaggaacgatcatgtttttgatcattggttttctgcaagggatgactgccggatttacagtgcctactgcacagaaattcggagccggagatatgagatccgttagaaaaacagtaggttcagctgcgatcctgtcgctcatcgtgtcagcgatcatgactgtgatcagcatggtgggaatgagatggttgcttcattttatgaatacgccggataatatttttgacgatgcttatcggtatattatggtgatctgtgcagggatttttgcgcaggtgttatataatctgctggcaagtattctgcgtgcgctgggaaacagcaagacaccgctttattttctgatcctggctgcggttttgaatattattctggatctggtatttattattgtgttccatatgggagcggcaggcgcggcttatgcaactgtgatcgcacagggcatctcaggagtgttatgtctggtttatatcatcagaaaggttccgattttaagacttacaaaagaagactggaaattggatggaacattggtgaagatccagtttggaattggatttccgatggcgtttcaatattccatcacggcgatcggcgcaatgatgatgcagtcttctctgaatatcctgggttccgtggcgattgcaggatttacggcagccagcaagatcgagcagctggtaacacaggcgtatgtggcgctgggaacgacgatggcaacttattgtgcccagaatatgggggcaggaaagattctcaggatccgacagggatttaaaagcgcgacatggatgggctttgcatatgccgttgtgacggggatatttgtgatgtttgcaggcaaatatctgacgccattatttctgtcagaaaatctggggcagatcatgggatatgtggatatttatctgaaatgtgtcggactgttttttattccgcttactgtggtgaatgtgtatcgaaatggaatccagggcatgggatttggaattcttccaatgatggccggggtggcagaactgatcggaagaggtgtagttgccatcggggcggcacactataaaagttatgtgggagtatgtctggcaagtcctgcggcatgggtgctggcaggcgggctgctgcttgtgatgtattttcatatcatgaagaggtacacggaggatttgagcggccagaagtagaaagaattacgaaagaggaaaaagatgcgcggcaaaagagaaagaaccaaaacagtaaagtatatatggagcggacttttatttctggcggtcagtggcattttgacactgatcgcaagaatcagtctgtcattttcggaatggtattctacttatatttacaaaggcctggtgtctgtgatcgggcggttgtttgggaaagttccattttcgtttgtggagctgagtctttatgttgtgatttttttgatgattggaactggaatccatgcagctttcgagtccaggaaggcaggaagaaaagcaatttggcaatggcttgcgggattgtttttgggcggctgtattatgctgcttgtatttgtgatcaactgcggcatcaattatcatagagaatctttttcggaaaaatccgggctcaaaatacagacgtattcggtgaaagacttgcaagcaacctgtcaatggctgacagaagaggtcaatcgtctgagtacacaggtagagagaactgaaaacggagagctgcagctgccggaggagatacgacaagaagcagtccggtccatgcaggcacttggcaggcagtatcctgcgcttcagggatattatccgaatcccaagccggtgctggtttcagaaatcctgtcatatcagaaactgatgggaatttatgcgccatttacgatcgaggcaaattataatcaggatatgccgtcatatgattttccgtttaccatgtgtcatgaattgtctcacttacgaggatttatgcaggaggaagaagccaattttatttcatttctggcatgcagggagtcagacatgacagaatttcagtacagtggaacgctgtctgcgtgggagtacgccatgaatgctctatacagggcagatccaaaagtgtggcaggaagtaagagaaggtctgagcaaagcggcagaaccggatttgcgggcagacgatcagttttggtcagaatatgatgggagcgtggcagaagtggcgaatatggtgaatgacacgtatctgaaagcaaatggacaaaagcagggtgtcaaaagttacgggaaaatgacggatctgttggttgcttatgatcagagtctttgaaaagagtgaaaaagtgatttgaaaacggaatattttgggtttaggaacatagaatagaagtgtagaaaaagtaaaagaaaaaaagaataaaaaaattttcaaaaaacacttgcaattctaatggagctatgataatatataactcggtcatcactgaagcagtgatacagacaaggctccatggtcaagcggttaagacatcgccctttcacggcggtaacacgggttcgattcccgttggagtcattagtcttcggactaacaacaaaataaggcgcagtagccaagtggtaaggcgtgggtctgcaacaccctgattcaccggttcaaatccggtctgcgcctcttgggaaacctcagaaacttatgtttctgaggttttttgttgtgtcacagtaaaaataccccctggagtggtagtaggaaatcaaagcaaaccagcaagcgtatcacaaaaacccagtatgatcccaatgcagaagtagattatctggatagccagatgaaacgtattccatttattgcgcaaatgaaagcattggattttgaaagatataaagtacaataccggcaggacggaagattagaggcaggaatgccggtgatagatggacgggatcaggaggctttgcctggaaattctgaaaccgttatgcagatagattataagtttcttcaggatggattgtttcttccgggtgacagcggataaacctaacagcagaaaccaaagctaccttaaaaataaattttacaaacttttaaagcaaacttgatcataaccagaaattgtttatgttaaacttgctcaagaaaaaacgattggaattttattccgtcagactcatgacaggaggatttgagcaatgaagtttaaactaaagccaatagagaaaaaatggattctttatgatatcgggaattcagcatttgcgcttctgatctctacgatcataccgatttattttaattatctggcgggtgatgccggaatttcagaagtgaattatctggcgtactggggatatgcaacctcagcggcaaccgtaatcgtagctgtgttggggccgctccttggaacggtctctgatgtagcgggaagaaaaaagaaaatcttcatgatcgcactgttagcgggagcatttggctgtgtatttcttggatttatgcagtcctggatttggtttttgttgttgtttgtatttgcaaaatcagcgtattctttaagtcttgtgatctacgattcgatgcttaccgatattacatcggaagaacggatggatgaagtctctgcgcagggatatgcctgggggtatatcggaagctgtgttccgtttatttgcagtctgttgctggtattgttttatgataaagtgggaatttcgatgcagacagcgatggggatttcgttttttctggtagcggtctggtggattgcactgacggttccgcttctgaaatcataccgtcagacacacagtcggaaaccgacagtacacgcaggacagtccggtgtgcaaagattgggacagatcgtttctgaattaagaaaagacaaaaaagtgctgttttttctggcagcatttttcttctatattgatggggtatatacgatcattgacatggcaactgcatatggtactgctttggggctggataccacaggtcttttgcttgcactcctcttgacacaaattgttgcatttccggcggctctgttgtttggaaagatttccagaaaagtaagtgcatcgagactgattctggtatgtatttctgcgtattttctgatcgctctgtatgggatcggacttcacaggcagtatcagttctggatcctggcagtctgtgtgggatgttttcagggagcagttcagtccatgtcccgttcctactatgcgaagatcattccggcagaaaaatccggagaatacttcggaatttatgatatttgcggaaaaggagcttcttttatgggaaccattctggtgtctgcagtgagccagattacaggcagtgtaaatctgggagtaggagcgctttctgtgatgtttctggcaggctttttcttgtttttgaaagcggacaaaacagaaaaaagcgaggaagaacaagaaaatccaggcgtactttttcagcagcctggattgggtcagtgatctatgcaaaaaatgcttttgcagctttgagcagatattcggtatccttgactccggcagtttcatatggagaatgcattgccagttgaggaagtccgatatctacggtattaagtgcgacctgcgtgttggaaatattgcccagtgtggagccgcctgccatgtcggaacggttggtaaatgtctgatacggaacgtctatctgcttgcagatatccttgaacatagcggcagaaatgccgtctgtgcagtatttctggttggcgttatatttgatgacgattccttcatttaaatacgggcggttgacaggatccgctttatctgtatggtttggatgaactgcatgggcattgtccgcagagatcataaaactcttggacagtgcgataaagtaatcctgtgtatccatgccgaataccgtacagatacggaacagcgtatctctaaggaacgtagatgcagcaccctgttttgttgtacttccgacttcttcgttatccagaacgcagtgaacggaaaccgcctgtttgcggtctgcgccaagcagtccgtaaagagaagcacaggcacactggagatcatccagacgtgtagcagagagaaattcctcgtttgctccccagagagttcccttctgacgattgtagaggaagaggtcgtgactcaaaatttcctctttttcgacaccggcatactttgaaatcgtatctaagaacgtatcttttgcagaaatatccccgtataatggaagcaagtctttctgtgcattataagcgtatccgctgttggcatcccggttcatatgaatggcaagattcgggatcagaaggagatcccggtctgcgttgatcagtttcgcacagtaggtaccgttttcttttacgatcacccgtccggcaacagaaagcggacgatcaaaccatggggcacagagcataccgccatagcgttctacgtttaatttgatgtaatgatcctctacggccatctccggattttctttgatcttaaaggaaggcgaatcactgtggcttgcaatgatacggaatccattttgaagaactacagattccggaatggagaacgcaatgatagaagatccgtttcttgtaacaaaataatcattaccaggtgttaaattccatgtctgatcttctgacagctctgtaaatccatgttttgtcagaatctctttcgtagtctgcactgcatgaaagcagctgggactgttctctataaattccagtaaatctgttgtaattttatttgacatattttgtttcctcctacattcataactaatgtctattttagcacgaggctgcggcgttgaaaagagccggtgattctgttaccataaggaataggtaaaacgattttcagagaaagaagaaggtgagaacaatgcggattttagtagcagaagatgaaaaagacctgaaccgtctgctgagcaccagattgaaagcagagcattacagtgtggactcctgttttgatggacaggaggcgttagattatctggaaggggcgccatatgatgcggtggtccttgatattatgatgccggttctggacggtctgagtgtcttaaagacgatgagacaaaaggggagtcagactccggtcttgcttttgacggcgaaggacagtgtggaggatcgtgtccgcgggctggatgcgggagcgaatgattatctggtgaaaccgttcgcgtttgaagaacttttagcgcgcatccgggtgcttctgcgcaaaccaaaggaggcgccgcagacagtctgcaaactggatgatctggaagtacatctggatacccatcaggtgctgcgtgcagggcatgagatcaagctttccggaaaggagtttgcgctgctgcgctatctaatccagaatacgggaattgtgctctccagagaccgtctggagcagcatttgtggaattatgattatgcaggcggctcgaatgtaattgatgtatatatccgttatctgcgtaagaagattgacgaagggtcacagacgaagctgatccatactgtgcggggtgccggatatgttatgagggcggaaccatgaaacgattttctttgaaattaaaattgacagcgatgtattccttttttatggtactggtgacctgtctctgccttgcagtccttttttctctgagcggaaatgaaatcctgacgtctgcacagatgcacttaagagaacgtgtgcaggaaagtgcagatgaaatcgagctggaagacggggaattcgaaattgattcggatttttattcactggataacaatgtatatctggcgctttatgatacaggtggaaacttcttatatggaaaggttccgccgggactggaacaggctccgcaattcgaggatggaaagattcagacggtgaaaagtggaacagagcagtggtatgtgtatgatgtgcagtatgaaatggaaaatggtcaggaattctatatccggggtgtagtttctgttacagagacacagaaggagtttttgatcgcagtccgatttgcggtgattttactgcctttgactgtgattttaacggcgctgatcgggtatcgtttgatcaggcgaacgcttcttccggtacggcagatgacagagaccgtacaggagattcaaaaagacggagatttaagccgcaggatcggagtcagtcaggataccgggaaagacgaattttatcagctggcaggaacatttgacggtatgctggaaagtctggaacaggcgtttctcagggaacggcagtttacatcggacgtttcccatgagctgcgaacaccggtcagtgtgattctggcacagtgcgaggcatctctgaatcgcacagatttgtcagaagagcagaggaaagaaattcttctgatccggaaaaaagcaggagaaatgtctcagatgatctctcagcttctgttattgtcacgggcagatcaggggcggcagcagttaaataaagaagagatcaatattagtgaattgacagaaataattgtggaagaacaaaagatgctggcgcagaggcgtaaaattgaggttcatacagagatagaaccagacatcacaggctatctggatgaatccttttatatccgtatgttggataatctgatttcgaatgcagtttcttacggaaaagaaggtgggaatattaaagtgacacttcatcagattccgtcaggggtacagggaacggtagaagatgacggaatcggaatcagcagagatgatcaggtgcatatatgggagcggttttaccgggtggatgcctcacggactggaaaggaagaaggttcgcactccggccttggactttccatggtaaaatggatcgcacaggcacatggagggaatgtccgggtggagagtgagctcggaaaaggaagctgctttacatttgagttaaaattctaatcttattttaatcttcatggaatatattatccttacagacaaagaataacagtgtagaaatgcagttgatagaaagagaggaattaaaatatgatgaagaaaagatattttgcagcggtagcagtatgtgtgatggcaatgagcatgtttacaggatgtgcaggaaatgatggaaaggatatcggaaaagatgcagcgaaaacagcagcattttcagatgcaggtgtaacagaagacgaaatcacaaggctgaaagtaagcaaggatcacgatgacggaagaagtatttatgaggttgattttacagttgcatccacaggggaagaatatgattatgagatttcagcagaagatggaagcatacttcaggttgacaaagagatggacaagggaagtgtgagtacgacgcagaatcaggatcagaacgcttctgaaaattccacacagcagggaagcagtaacacagcaaatcagacagaggtagcaatttcagaggaagaagcaacaaaccttgcgttggaaagagtgccgggggcatctgcacaggatttgagaattcagctggagtttgacgatggagtccagaaatacgaaggcgacattatttatgacggaaaagaatatgattttgaaattgacgccaacacaggaacatttctggaatggagtgaagaacgggttggataagggaaaggataaaaaaatgacaggattaagtacattatgttatatcgaaaaagacggaaaatatctgatgctgcatcgcacagtaaaaaagaatgatgtcaataaagataaatggatcggtgtgggtggacattttgaggcagacgaaagtccggaggaatgtctgctgcgggaagtgaaagaggagacaggatacactctgacttcctggaaatatcgtgcgatcgtgacatttgtgtcaggtgacggtgtgacagagtatatgtccttatttacagcagatggatttacaggagaacagattgcctgtgacgagggagaacttaagtgggtagataaaaaagaaattgaccgactcaatctctgggaaggggataaaatattcttccgactcctggaggaatcggaagaattcttttctctgaaactgatctatgatggaaacggaaagctattgaaagcgatgctgaatggaaaaccgatgaattagatcaggtagcaatacatgacaataaagtggcaggcacttccggccataacaaaaagatgaaaaatctcgtggcttccgaaattcttatgtttactattgaagatcggaagctttaatgcgtagataataccgccgatcgtgtagatgattccccctgctaaaagccagccaaatgccgccggcgataatgagtggaaaatttgtgtgaaagccagtacgcaggtccatcccatcccgatgtagagaatggaagatacccatttcgggcaatagacccagaaggccttgatcagaattcctacaatagcgatcccccaaacaatggaaagcagaatcagtccggtacgtcctttcaaagtgatcagacagattggagtatagcttccggcgataaggataaagatcatcatgtgatcgatctttttcaatatcgtatttacttttgcagaaatatcaaatgtatggtaggtcgtgctggcagcatacagcaggatcaggctgatcgcatatacggcaagggaaatgagagataccctgcccggttcatgggctgcctttatcaacagaggaatcgcgccgcagattgccataagcataccaataaaatgtgtgatcgcgctgccggggtcttttaaatgttgtgttttgttcattgatatcttcctccttaaaatttgaaaattgcatgtagttttaaaaactatattaagtatatgtgtatattacaccttgtattccttgaatgcaagtgattttaaaaaatttttataatcaaagaaattttgacagaaaaagaaaattctgatatgataattcagattgtattgtgggactgttatacagtcccctatttttgttttgagaaaaggagatttatggaagaattaaaatttgaagagttagagttgtgtcctgaaatattaaaagcagtaaaacatatgggatttgaagaggcatcaccgattcagtccaaagcgattcctgtgatcatgagcggaaaagatgtgatcggacaggcgcagacaggaaccggaaaaacagcagcctttggaatcccgcttctggaaaagattgatccgaagaataaaaaacttcaggcgattgttctttgcccgacaagagagctggcaatccaggttgcagaagaaatcagaaatcttgcaaaatatatgcatgggataaaagttctgccaatctatggaggacaggagattgtaaaacagattcgttctctgaaaagcggcacacagcttgtgatcggaacaccgggacgtgtgatggatcatatgcgccgcaaaactatgaaaatggatcatgtgcatacgatcgtgctggatgaggcggatgagatgctcaacatgggattccgtgaggatattgagacaattttggaaggaattccacaggaacaccagacagtgcttttttctgcgacaatgccaaaggcaatcttagagatcacaaaacagttccagacaaatgcggaactggtgaaggtgacgaagaaagagctgaccgttccgaacattgaacagttttactatgaagtgaaaccgaagaataaagaggaagtgctttcccgtcttctggatatttatacaccgaaactctccgttgtattttgtaatacgaagaaacaggtagatctgcttgtgaatggactgcttggaagaggatattttgcggcaggacttcatggagacatgaagcaggcacagagagaccgtgtgatgcagggattccgttccggaaagacagatattcttgtgtgtacagacgtagcagcaagaggaatcgatgtggatgatgtggaagcggtatttaactatgatcttccgcaggatgatgaatattatgtgcaccgtatcggaagaaccggacgtgccggacgcgtgggacgttcgttctcttttgtttccggaagagaagtttataagctgaaagagattcagcgttactgcaagacgaaaatttatgcacagaaagtaccgtctttaaacgatgttgcaaatacaaagatggaaaatgtgctggaagagattgaacagatcattgaaaatgaagatctgacaaaattccttcagatcattgaagaacgtgtcaatgaatctgattatactgcaatggatctggcagcagcatttttaaaatactgttccggacagcaggagacagaagaaaaagatatggaatttggtgataccggggcagaagaagccggaatggttcgtctatttattaatatcggtaagaaaaacaaagcaaaaccgggagatatcgtgggcgcaattgccggtgaaagcggaattccgggaaaactgatcggaacgatcgatatgtttgataagtatacatttgtagaagttccgagagaatatgcacgagatgtactcaatgcaatgaatcatacgaaaatcaaaggaaaatctgttgcggtagagccggcaaatcagaaataatcaaactggactggttaaaaatacaataactggacattttcatctatccactttggtggtaggataagaccatcaaaaatgaaaagagggaaaacgatggaaaagagaaagcagacagtagtaaaactggcacagacagcacttttggcagcactttgctttgtatcatttacatttttgcagattaagatcccgatgccgggtggagatgctacatcccttcatatcgggaatgcattttgtgttctgggagcattgctcttaggcggttggtacggcggactggccggcgcaattgggatgacgatcgcagatgttctggatccgatttatatcgtaggagcaccaaagacatttgtgttgaagctctgtattggtctgatcgtaggacttgtggcacatcgtatcgggaaaattaatgaaagtacagataagaaatatgtatttcgctggagtgtccttgcatccgttgcaggactgggatttaacgtgatcgcggacccattggtaggatatttttacaaacagtatattttaggacagccgcagcagatggcagaagtacttgcaaaatggagtacagcaaccacatttgtgaatgcagttgtatctacgattctggtggcagttctgtataatgcactgcgtccggtgttattaaaaagcgggatgctgcagattgtaagaaaaacagaagaagtcaaaatttgaaatagagaaatatgaaaaccacaggagaatctcaatcaacatgattcgcctgtggtttattttacttaagcatgaatcgtagttccggtcttacccttgagtgcatcattgatcttgtcataagatgtgatcagagcggtacgtccttccctttcttctacaaattcaacggcagcctggaatttcgggagcatgttgtagactccgaaatgtccctgttccatatattcttttgcctgtgcagctgagatttctcccagtttttcttcgttgtcttttccgagattgatacatacctgctctacacttgtcaggatgatcaactgatcggcatccacaccttctgcaagttttccggcagtcaggtctttttcaatgactgcgctggcgccttttaagtgattatcctgttccagtacagggattccgcctccaccggcagcgattacgacctgatcagcatccagaagtgcgttgactgcatccagttccacgatcttcacaggatgcggagcggaaacgactcgtcggaatccttttccggcttcttcgatcacataatttccttttttacgctcttcgttggcttcttctgcgctcatgtaacgtccgagaactttggttggtgtatagaaagcctcgtcataaggatctacgataacctgtgtcaatacagtgctgactgtacggtagattccgcggttcatcagttcttcccggattccgttctggagatcgtatccgatatagccctggctcatggcagaacatacagacatcggtgcagctgtataattttcatgacgctgtccgaattcattcatggcagtgtggatcatccctacctgtggagcattgctgtgggtgatcgcaacctgaaatccggcttcgatcaaatctgcgattacttttgatgtattttttactgcgactttctgctccggcaatgtagttccaagagcacggtgtcccagtgcaacgacaactcttttcttcatagtcatatccctttcgttaaataattgtgatgagtaaattatattatttttcgtacaaaaaagcaacgttattccacgcagaagttgtggattatcgataaaaggcaaagaagacatccagcaacatcagcattcccagcagaacacatacgcaaagcaggaaccagagcgggatttttctggtaacctgtttccattttggtgcgatgaaatactggcaggtgcatccgatcagtcccaggaacacggcatccgcaaaaaacggaggcagcagagatggacgaaagtattgagaaattttgtgcaggtctgcgtgccagatcatctggactgtaaaatctgaaaggtatccaatcacagagtataataacccgttcatacagaatgccagaatcggattttttgcaaatcggtgcagcatcgttacgctgagaacaccgcaaattccataaagaggaatccatggaccaagcagaatactacggttcaaaaagaccccttccattgtgagatagctcagtgtttccagaatccatccaagaatggaaaacagaaagaacagcgaggccagtgtcagcgagtgatagaaaccggtcggagccagaggctgatgcacagcacggaccggcggctggacagaaaacagaaaggccggatactgatgtggttcaaaataggcaatctttgtataaggtccttcggaatcgtcataaagcgctttgcggatcagtagctcgtcatcagaaagctcctgttccagaagtggatcattaaacagttcgtaacggggagcgcgggaccggatataattttttcgcagggtcatatataattcagcatcggtggctgtctgataaggattgacaaacagaaaatccagaataccgaatgtaaggagagaaagaatgctccatccgataaaagacagatgcagaagaaacatccgccatttgtttccgcgcatcagctgtctggataaaaagaatgcatcctttcgtcccatcgtcgggttctcagccagtatataaggaatcatgctgtattcgtactttttgatgatgccgccgatgaacgtcaggttccagaaagtctgaaaaacacaacggcaggtcatgatccatgcagggtgggaaaagaagttcactttgtaaagaaagaaaagcttactgatcgttgtctgctgataagtgcgtgcctccagaaagaaacgggcttctccgacaagcagcacgttttgaatgaagacagtgtagagaaaagagagcaatacccccaggagaagcagaaaaaacgaggtggaaaacggatcaaggaaggcctcgttgacagtctttaaagtggcaaagataaaagatcttccactggtatatatattgaggatgtgttcgaacagagttgccagtggtgcaccggaaaacgaaatctgaaatacgtgctgcagcgtgtctgttgcgatcgaggaattggaggcatctggaaaattcagatgtgtctgaacaaaaattgtttgcagtcccgggcgaaactgccggaaaataaaagtggaagatgcaaatgaggtcgttaaaaatgcgatcagaaaacagacagataccattttctgatagttgctctttagtgatttttttgcctgatgtttcagatgttttcttgtccacataacaggattcctccgattctgatgatagacctattatagttgcttcacgccagactgtcaaagaagatttgcaccttgtcaacagaacctgaaatctgctaaaatttagattgctgtgaacagtaaccatagaacaaggaggatgaaaagttgagaaaattgattccttatttgaaaaactataaaaaggaaagtattatcggaccgctgtttaaacttttagaggcggtatttgaattgattgtgccattagtcactgcaagaattgttgatatcggaattcagaaccgggatatcccgtatatctggaagatggcggcattgctggtggcgtttggtgtaatgggacttttgtgttccctgctggcgcagtattttgcggcaaaagcagctgtcggtttcggaacagaacttcggcatgatctgttctgccacattgaacagctttcttatgcggcagtagataaggctggcagcgccacgctggttgtcaggatcacaagtgatatcaatcaggtacagtccggtgtcaatctggtgcttcgtctgttcctgcgatcgccgtttattgtggtaggtgcaatggtcatggcatttacgatcaatgtaaagaccgcattgatctttgtcgtgacagttccgcttctggcgcttgtgatctacggtattatgatcgtgacgatcccgctgtataaaaaagtacagaaagcactggatcaggtgcttgtctctaccagagaaaatctggcgggaatccgtgtgatccgtgcgttttgtacacagaagaaagagcaggaagagtttgatacaaagagtgagatactgatgaagctacagtttctgaccggacggatttcagcgctgttgaatccgatgacatatattatcgtcaacgccgggattattgcggttgtctggtatgggggcggacaggtatatgaagggctgctgacacagggagaggtaatcgccctggtcaattatatgtcccagattcttctggcgctggtggcgctggcgaatctgattgtttcctttacaaaagcagtagcatctgcagcccgtctgaatgaggtgtttgcactcagatccgagcttgtggacggagagtgggagaaagcagaggcgaaagcggaagccgcgaaagtaaagatggaacacgtgacattctgctatccgggcagtcaggagtcggcgctggaggatatttcttttaccgcgaaagcaggagagacgattggaatcattggagggacaggttccggcaagacaactctggtcaatctcattccccggttttatgatgtgacagagggaaaagccgaaatcgatggactggagatttcaaaataccggacagaggctctgcgaaaacagatcggagtggttccgcagaaggcagtgctgttttccggtaccataaagagtaatcttcaaatgggaaatgagcaggcatctgaacaggagatgtatgcagcattaaaaaccgcacaggctttggagtttgtggaggagaagccgggaaggctgaatgctcctgtcagtgaaggcggaaaaaacctgtcgggagggcagagacagaggctgacgatcgcaagagcactggtgaaaaatccacagatactgattctggatgacagtgcatctgcgcttgatttcgctacagatgcggcacttcgaaaagcattgtcccaggatacggaaaatatgaccgtatttctggtatcgcagagagcatcctctgtcatgcatgccgataagatcctggtattggatgacggaaagatggtgggatacggcaatcatgaagagctgcttggagcgtgcggtgtctatcaggaaatctgtcggtctcagttttcgaaagaggagggggttcagtatgcataaaaagaaaaaaagtgtatggaaaaagatactctggctgattcggccctatctgcattttttgatgctatcattcgtatttgcgggtatttctgcgttgctgacattgtatgctccgattctgatcggtaatgctgtggatctgattattggaaaaggaagtgtggattttgacgcgatcggcaggattctgttcaggctggcagggattattgttataacaagcgctgcgcagtggctgatgaatctgtgcaacaaccacattacgtatcgggtagttaaggatgtccgtacaaaggcatttgcaaagctgcagaagcttcctctgaaatatgtagacagccatgcatatggagagaccatcagtcggatcatcaccgatgtggagcagttttcggatggactcctcatgggatttactcagttctttaccggtgtggtgacgattttgggaaccctggtatttatgctcctgatcaatgtgaagattgcgttggttgtaatcctgatcacgccggtatctttgtttgtggcaagctttattgcgaagagaacctatgtgttttttaaagcacagtcagagaccagagcacagatgacatcccttgtcgatgaaatggtgggaaatcagaaggttgtgcaggcatttggatacggtgaccgggcagtggagaggtttgatacgatcaacaaaaagctccagaaagtcagcctgcaggcgattttcttttcgtccattacgaatccgagtacccggtttgtcaacggactggtgtatacaggggttagtattgcaggtgcgtttaccgcaatcggaggcgggatcacggtggggcagctgtcttgctttttaagctatgcaaaccagtatacaaagccgtttaacgaaatctcaagtgtggtcacagagcttcagaatgcactggcatgcgcacggcgggtatttgactttattgaggaacaaccggaagagccggatgcggcatcggcgatcgaactgaaaaatccagacggcagtatgacactggaacatgtcagtttttcttataatccggagattaagcttttacaggatctgaacctgaatgtaaagccgggtcagaaaattgcgattgtaggaccgacgggatgcggaaagacgacgctgatcaatcttctgatgcgtttttatgatattcaaagtggagagatccgtgtcggcaataccggaattcagaatattacaagagacagtttgcgggccaactttggaatggttctgcaggagacctggctgaaagcaggaacgatcgcagagaatattgcgtatggaaaagaagatgccacaagggaagaaatcattgcggcggcaaaggcggctcatgcgcatgggtttatccggagaatggagcaggggtatgatacgctgattcaagaagagggcggaaacctgtcacaggggcagaagcagcttttgtgtattgccagagttatgctcagaattccggatatgttgattctggacgaggcaacctcttcgatcgatacccgtacagaaatgaagattcaggaagcgtttcagagtatgatgaggggacgtaccagctttattgtggcacatcggctttctactattcgggaggcagatgtgatccttgtgatgaaggatggaaatattattgaacagggcagccatgaggagttgttagaaaaaggcggattttataaaaatctgtatgaaagccagtttgcgtcttagaaaaaagcccggggagatcatgcatttccccgggcggtcatatattcatgctcgcgttttaattctgcaagacagtcttttgcgagccagtgctgattggtcggtgtgaggatcgctttgtacggaaacggtcccgcaccgctttttttcaaagcaagaagcgcctgatccagcttctggttggaaagtccgcagaatacgatcattgtatcggagagctcttctccgtcataaatttcttcagaaggtgtcatgtccggcagccctgcaagtacaccgagaggctggctgtaatctttgagtgtaatgtggcggagacgcacacgaagcggaagcagtgcacgttccactttcttttttacttctttgtctgatatatggaataataaaatactttctctcatacagatgaaatctcctatctatctttttgcatttattgtaatagattttatcttgtaaggaaagggcagattataaaaaatctattgacgggtacagggaaaagaaatataatagctgtattaagaaaataatacaataatacgacaggtgtacagcacaccaggcacagccgggaggaaaagtatgattgagattaagaatctgacaaagacgtataagttgaataaaaagcagatgaaagaatccagaaccacaaatccgatcaagacggcagtcaatgctcttacgctgactgcgaaaaaaggtgagatttatggccttttgggacccaatggagcagggaagacgactacgctgcgctgtatttccacgatcatcaagccgacaaagggcgagatttatgtagatgggcatgaggtgcgcaaagagccggagaaagtgcgggaaaagatcggatttctgaccggagatatcaagctggatccacagttttccccggattatatgtttgactttttcgggaagatccatggagtgaagccggagaagctcaaagaacgaaaagaggaactgtttacttattttgggatcaaggattttgcgcacaaaaagatgaaagagctgtcaaccggaatggggcagaaggctgcaatcgcagtcagcctggtacatgatccggatattgttatttttgatgaaccgacaaacggtctggatgtcgtgacggcaaggagtgtgacagactatctgaagcgcctgaaagaggagggaaagctggtcattatttctacacatatcatgtcagaggcagagaagctgtgtgaccggatcggagtgatcattgacggaaggaaagtgatggaagggcatctggaggatatcttaagagagacacagacagaagatctggaggatgcgttttttgaattgtacagtcaggtaaaaggaggcggggaagatgcgtgagattcgattgatctgtaaaaaagaattatccagagtgctgacagacagaaagatgttattttctgtatttcttctgccggcgatcatcatggtggtcgtaatgaatgtaatgaccagtttttcgaaaaatttggagaatgatgtcaaatctcatgcgcccattgtttatctgcagaatgccccggagggtgtggagcagtacttgaaggcgtataatgagaagatggatctgcgcacggtggatgacgaacagaaagtgacagaggaaatcagagatggatcagccgatttgtggattgcttttccgcaggattttctggagcagatagaagtttataagacaggggatgagattcctcagatcaaagtttattacaatccgtccgaagagtattcgcaggctgcctatgaaggtgtggcaggcggatgtctggaggtttaccggcaggcactgttgtcagagcgtgtcggagatatgcagtctttgacagtatttacggtgaattcagacaatccggacatggtaatccaggatgaacagaaagccggcggcaaagcacttggcatgatgcttccgtattttgtgacgatcttactttttgcgggagcaatgggactgggaaccgatatggtggcaggagaaaaagagcgcggtaccatggcaagtatgctggtagcgccgatcaaaagaagctcgatcgtactcggaaaagtatttgcgctgatgatcatttcaggaatcagttcggttgtatatgttgcggttatggtaggcttcctgccacagatgatgggggcctacggaagtgaaggtctgggactgagtctggaagtcgggcaggtgctgatgatggcatttttgctgattgcgattgcattcctgtattccggaatcatcgttctgatttctgtctttgcaaaagatacaaaagaggcaaacagctatattatgccggtttatatgctgatcctgattttggggattgcgacaatgtttacgacgcagaatattgaaagctggtattatgcagtaccggtgtttaatacagcgctggcgttacagggaattcttacaggagatgtgagtgtgatgcagtatgcggtgacactggcagagacattgatcctgggaatgatactgatcacggtaatcgcaaaagcatttgaaagcgaaaaggtaatggcaaaatagaagttgtttcagacagagcatttcacaaagagaaggtgcctgcatatagtaacagtaagaaggctgctgtatgcaggcgctttttatagcggcagaacggatttcgggaagcgggtgtgaggtgtgaggctctgtgaactgagggagaaagaagtgatcaatatatgtaactgcagaagacttggctgtgtggtggatgtggatattgatgtctgcgatggaaaggttctggcgatcattattccggttcccgggaagatctgcgggatacttggcagtgacggagaatatgtgattccgttcggttgtattaaaaaaatcgggccggatatcattttggtggaaatctgtgaagaaaagtttttgcaaaagtactagatgttggttataatggggaaaagaaaccaaatgcaaaggaaaaagaaaggcggaaacgagtatgaaatgtccgtattgtggtcatccggatacgcgggtgatcgattccagaccggcggaagacaacaacgccatccgaagaagaagatcctgcgatgaatgcgggaaacgctttacaacctatgaaaaagtagagacgattcccctgatcgtgatcaaaaaagacaataacagagagcagtatgacagatctaagattgaagccggagttttgcgggcatgctataagcgtcctgtctcagcacagcagatccagcagacgattgatgatatcgagctccagatatttaaaagagaggacaaagagatcccaagtaaattgatcggggagatcgtgatggaccgtctcaaagatctggatccggtcgcatatgtccgttttgcatctgtatacagagagtttaaggatgtcaatacatttatgtccgaactgaagaagatcctggagtagccgtatgcgaacctataaattgacgatcgcttatgatggaagccggtatcagggctggcagagacagagcaatacggacaagacgatccaggggcttttagaacaggcagcatctgagactgccggatatccgctggaggtacagggatccggccgtaccgatggaggtgtccatgcgaaggggcagacggccagtgtgatcctgcgcggaaaagtacaggagtctgagtttttacaaaatatgaaccggctgcttcctttggatatccgggtgatcgaaatggaactggtaaagaacgggtttcacgcgagactcagtgcagttggaaaatgttatgaatactggatcgatatgcgggaaaaaccagatgtgtttatgcgaaagtatacctatcattatccgaaagagctgaatatagaggcgatgcaaagagcagcggatgatctgattggacggtatgattttgccgcatttacggacaaaaaggaggaaaagtccacaattcgcacaatttatgctataatcgtggaggtacagggggacaagttgaggatcgaataccggggcagcggttttatgtatcatatggtgaggatcctgacaggaactctgttggaagtaggagacggaagaagaacgccggaatcggtaaaggctgcactggcaggcagagacagggcagatgccggatttcttgcacctgcaagagggctgacattaaaagaagtgtattattagattgggggcgggtacgaaagtagacggtccctttttgggtttttctaaagaaaacaggaggatttatgaagctgatatcatggaatgtaaatggaatccgtgcctgcgtacagaaaggatttctggaattctttcgggaagcagatgcagatattttctgtctgcaggagacaaagctgcaggcaggtcagattgagctggatctggaagggtatgagcagtactggaattatgccgtgaaaaaaggatattccggaacggctgtatttacaaaaaagaaaccattaaatgtgacttatggaatcggaatcgaggagcacgatcaggaaggtcgtgttattacactggaatttgaagaattttattttgtgactgtgtacacgccgaattctcagaacgagcttgccagactggattaccgcatgaagtgggaatctgattttctggcgtatttgaagaaactggaagaggagaagcctgtgattttctgtggtgatctgaacgtggcacacaaagaaattgacttgaaaaatccgaagacgaaccggaaaaacgccggatttacggatgaagaaagaggaaaattcaccgagatgttaaatgcgggatttattgatacattccggtatttctatccggatcgggaagggatttattcctggtggtcttaccggttcagtgccagagcaaagaatgcagggtggaggatcgattatttttgcgtttcagaatgtttgaaggaccggcttgcggatgcgaagatcctgacagatgttatggggtcagaccattgtccgattgagctggatttaaaataaaaaggagagaatgaacatgacaaagattgatattatttccggatttttaggagccggaaaaacaacatttattaaaaagatgctcaaagaagcattttcgggagagcaggttgtgcttatcgagaacgaattcggagagatcgggattgacggaggatttcttaaggaagcgggaattgaaatcagggagatgaattcaggatgtatctgttgttcgttagtcggagactttggaaaatccttaaaagaagtggtagatacgtatcatccggatcggattctgatcgagccatccggtgttggaaaactttccgacgtgatcaaagcagtgcaggatgtgcaggatgagatcgaagcagagctgaacagttttacaacagttgtagacgtgacaaaatgcagattatataagaagaatttcggagaatttttcagcaatcagatcgaatatgcaggtgcgatcatcttaagtcgtacagataaggcaaaaccagagaaagtggaagaaagtgttgcgctgcttcgcaagttaaatgaaaaggctccgatcatcacaactccaatcgagcagttgtcaggagagaagcttctggagacaatggagcacagcaaatctctggaagaagagttgctcctggaagaggaaatctgcccggaatgcggacatgtgcatgaacacgcacaccatcaccattgccatgaagaacacgatcatcatgagcatcaccatcatcatggagaggagtgtggctgcggacatggccatcaccatgagcaccatcacgagcatgaacatcatcatgatggggagtgcggttgtggctgcggacacaatcatgaccatgaacatcatcaccatcatcatgcagatgaagtgtttacaagctggggacgagagacgatcaaaacctacagcagggaagaaatcagcagaatcttaaagacgctggaagaggatgacacatacggaactgttcttcgtgcaaagggaatggtcgcaggtgcagacggagagtggatttattttgacatggttccgcaggagcatgaagtcagaagcggggcagcggaatatacgggaagaatctgtgtgatcggttccaggctggaagaagacaagctggaagcattatttggactgaaaaaatagaaactacagacaggagagagaacaatgaatgaaccggatgtaatggtttatctgatgactggatttttagacagtggaaaatcccagtttttaaagttcacactgacacaggattattttcagattgatggaacaacgcttctgattctctgcgaggaaggtgaggaagagtttgatccgctggaaatggcaaagcatggtgtgaagatcatcaaaatagaagaacaggaagagttgacagaagcattcttaaatgaactgcatgaaaaatattcgccggagcgtgtggtgatcgaatacaacggaatgtggaaagtcagtgactttgaagcgttaagtcttccgcaaggatgggaaatcgaacagaaactgacaacagtggatgcaagtacatttcagatgtatctgaacaacctgaagccgttgtttgtggaaatggtacgcggggcggaactggtgctgtttaatcgttgtacagatattgaacctctggcaggataccgcagaagtgtgaaagtagtcagcccacaggcagaagtgatctttgaggatgaaaacggtgagatcgagaatattttcggggatgatgtgccgtatgatctgaacgcgcctgtgattgagattccaagagaggattatggaatctggtatgtggatgttatggaaaatccggacagatacaagggaaaagtgattgaatttaccgcaaaagtattaaagccgaaaggatttccgtccaaggtatttcttccgggacggatggcgatgacctgttgtgcggatgacactacatttttaggatatatctgcaagagcgcctacgcaccgaagctgcaggcaggagaatgggtgaaggtgcgcgcaaaagtacagtatggacatgtatcagtgtataaaggtaccggaccgattctggaggcagagcatattgaagaagccgaaccaatcgaagagctggtttactttaactaaaaagagtgagggagagacaagatggaaaaaagatttgacgtaatcgcaatgggagaacttttgattgattttacaatgaacggacagagcgaacagggaaataacctgttcgaagcctgcccgggaggagcgccgtgtaatgtgctggcaatgctgaacaagcttggtaaaaagactgcatttctgggaaaagtaggagatgatcagtttggaagactgctgcgggatacgatcagcagtgcagggattgatgcatctaatcttctgactgatgatgaagtgaacacgacgcttgcatttgtacatactttcccggatggagaccgagaattttctttctatagaaatccgggggcagatatgatgcttcgtgaggaggaagttgaggaagactttatccgtcaggcaagactgttccatttcggaactctgtccatgacacatgaagaagtcagaaaggcaacaaaaaaagcgcttaaggcagcgaaggacaatggacttttagtatcctttgatccgaatctgcgcccgccgctgtggagttctctggatctggcgaaagaacagatggagtacggattccagtactgtgatattctgaaaatttctgataatgagattcagtttgtatcaggaaaagaagattacgatgagggaatccggtatcttcaggagaaatatcagattccgttgattcttctgacaatggggaaagacggaagccgtgcgtactacaagggaatgcgtgtagaaagagccggaaaatcagtgaaggcaatcgaaacgacaggagccggagatacattctgcggaagctctttaaattatattctggagcatgattttgaaaatctgacggaagaacagctgggagaaatgctcacatttgcaaatacagcagcagcgctgattacaaccagaaaaggagcgattcgttccatgccggagaaggaagaggttctggaatttctgcaaaaataaaaaactgctttctttttcccgataaatagtgtacaatgaagcgcagtacatgaagatatgggaggaatatacaatgccggaagcagtagcagaagaattgtgtgtgaagtttagaaacatcgatgaaatacaggaatttgcaaaagcagtgaatcagtttgatggagatgttgatctgaaacaggggagaattacgattgatgcgaagtctcttctgggaatctgcagtatgaatatagaggaagagatggaactgcaggtgtttaatggggatgcagaagaattgaaagaattgatcaagaaatttcttgtttaaagtatgtatacatcgataacataagggtattttccagtggatgggagataccctttttcgaaaaagaaaggagagagcaggatgaaatttacaaaaatgcagggattgggcaatgattatgtctatgtgaatggttttgaagaacggattgaaaatccttctgaaatggctgtaaaagtgagcaaccggaattttggagtcggttcggatggactgattctgatcaatccgtccgagaaagcagattttgagatggagatgtataatgcagacggttccaggggagagatgtgtggaaacggaattcgttgtgtggcaaaatatgtttatgattatggtcttaccgataagacacatatttctgtggagacactgggcgggattaaatatctggatctgactgtagaggatggaaaagtggttctggtaagagtggacatgggaagtccgatcctgacaccggcgcagattccggtcatcgcagatgaggcggaagcggttgctgttccgatccttgtggacgaaacagaataccagatgacttgtgtttctataggaaatcctcatgcagtcatatttatggatgatatcgaacatctggagattgagaagatcggaccgaaattcgagcatcatgaacgatttccgaacagagtgaatacagaattcgtgaaagtcttagacagacacacggcaagtatgcgtgtctgggagcggggatccggggagacacttgcctgtggaaccggagcctgtgcagtggcagtggcatgtattctcggaggatatacagaaaacaaagtgacggttaagctgctcggaggagatctgctgatcgaatgggatcgtgaacagaataaaatctatatgacaggaccggcagaggttgtttttgacggagtgtggaaggcataatagaaaaagagacaaaacgttcgttacggtttatctccggttactatcaatacctgagatgaacggtaacgaactttgcttaaaaaataaaaaaagtgcttgactttttgaaaaattgcgatataatgtaaatgttgagtctgacagaaagagaaatgatgcggattggtgtaatggcagcacagcagactctgactctgttagtagaggttcgagtcctctatccgtagcttgtaagacagtcataaaggctgtcttatttttatgtccggagtatgttactgtgtacagttgcagagggatttttactgttgtttttggagaaaaaaacattgacaatcaaggacaaaaagaatataataaagcagtatgacataaggagaaacagcttacaccaaagccccggagtatgctgatttcatatagaagagttaaagtaaataatctatgataattagtaagtaggaggaacacccatgaaaacttatatggctaacccagacaagatcgaaagaaaatggtatgtggttgacgctgaaggatgtacattaggacgtctgtcttcagagatcgctaaagtgttaagaggaaaaaataaaccagagtacacaccacacgttgatacaggagattacgtaatcgttgtaaacgctgataaagtgaaagtaacaggaaagaaattacagcagaaaatctactacaatcactctgattatgtaggtggaatgagagagacaacactggctgagatgcttgcaaagaaaccagaaaaagttgttgaacttgctgtaaaaggaatgcttccaaaaggacctttgggaagagcaatgatcaagaaacttcatgtatacgctggaccagagcacaacaaccaggctcagaaaccagaagtactgacattttaaggaaaggttgaaaggaggacattacattggctaacgcaaaatattacggaacaggaagaagaaaaaaatctgttgcaagagtatatcttgtaccgggaacaggaaagatcacaatcaataaaagagatatcgatgagtatcttggactggaaacattaaaagttgttgttcgtcagccactcgttgctacaggaacaacagataaatttgatgttatcgtaaacgtacacggtggtggatacacaggacaggctggagcaatccgtcacggaatttcaagagcacttcttgaagctgatgctgagtacagaccagtattaaagagcgctggatacctgacacgtgacccacgtatgaaagaacgtaagaaatacggtctcaaagcagctcgtagagcaccacagttctctaaacgttaatttcagttcagcaagagataatcttcggaactcggatttacgttcaaatccttgttttacaagggtttgtggagttgtcagatgtggtgaaaagcggtggaatttactcagttcgcaacgcatttgcaacacgtttgcaacaaaaatatctaaaaaatataggacacttttcggtgatagacactggagagtgtcctttttgttatgcagattttgtatcggcagttacgctgtcctcattttctaaggttttgttgattgcgtctacaagaacctgcatatctaagtgagtataaactttttctgtcaaagtca

SEQ ID NO: 6989 - DNA, 948 bp, Unknown
  gut microbiota DNA sequence
cagccccaggatgcgatgagccgacatcgaggtgccaaaccactccgtcgatgtgaactcttgggagtgataagcctgttatccccagggtagcttttatccgttgagcgatggcattcccacttaataccaccggatcactaagccctactttcgtacctgctccacccgtcggtgtcgcagtcaagctcccttctgcctttgcactcttcgaatggtttccgaccattctgagggaacctttgggcgcctccgataccctttcggaggcgaccgccccagtcaaactccccgcctggcattgtcccaccgccggcttacggcggctggttagaaacccaatactgcaagggtggtatcccaacagcggctcccacacaactggcgtcatgtgttctcagcctcccacctatcctgtacatgcaataccgagtcccagtaccaaactggagtaaagctccatggggtctttccgtcctggcgcaggtaaccagcatcttcactggtacttcaatttcaccggatgcattgtcgagacagcgctcaaatcattacgcctttcgtgcgggtcggaacttacccgacaaggaatttcgctaccttaggaccgttatagttacggccgccgtttactggggcttaaattcaatgcttcgtttcctgacatctcctcttaaccttccagcaccgggcaggcgtcagcccatatacctcacctttcggtttcgcatagacctgtgtttttgctaaacagttgcttgagcctattctctgcggccaggtctccctggcaccccttctcccgaagttacggggtcattttgccgagttccttggcaatgcttcttccgtcggccttaggattctctcctcatccacctgtgtcggtttacggtacgggtacgatatgaacaatagcggcttttcttgacgcatggctcacacact

SEQ ID NO: 6990 - DNA, 35243 bp, Unknown
  gut microbiota DNA sequence
gggcagaggtggaagtgcggtaacgcatggagctgactgttactaataggtcgagggcataaccaagcaaggtgataggaaaaggatgattctttgtatgcagttttgaaggtataggaaatacagatggaatgagaggcagcaccggttggtgttgtttttttgtttcttattatataaagaaattatattattgaaaataagtttagtgaatttgtaatggatgtagtaaaagagtagcaggaaatcccttgactattctctggtttcttcttataataattttgtattttaatatcaaaaagcgatgacaaagagagtaggatctttctgaacgtttcagcgagccggtggtggtggaaggccggtatcagtaggatttttccgaagatcactttcgagctgcagtccttgaaccgcgagaagtaaaggctgacggggttccgccgttaaaggaacgcatataacggatatcagaatatgatatctaagtatgttgtaacaggtggttaacgtaagatttttaaactttcgtcctattacaggacgaaagtttttttactatagaaacgaaggcagcatcagttcctgtacagcataaacagtaactcagaaaaataaaagaaaagtagaaaggaaaagcgctatgtacaagaaagtttccacggatatgaatttcgtaggacgtgaaaaagaagttgaagcattctggaaagagcatgatatcttccagaaaagtatggaggaaaaagaaggatgtccggagtacaccttttacgacggacctccgacagcaaacggaaaaccgcatatcggtcacgttctgacacgtgttatcaaagatatgatcccgagataccgcacaatgaagggatacaaggttcctcgtaaagcaggatgggatacccatggtctgccggtagagctggaagtagaaaagctgcttggtctggacggaaaagatcaaattgaaggatacggactggagccgtttatcgacaaatgtaaagagagcgtatggaaatacaaaggaatgtgggaggatttctccagcacggttggattctgggcagatatggagcatccttatgtaacatacgacaacaatttcatcgaatccgagtggtgggcattgaaacagatctgggacaaaaagctcctctacaaaggatttaagattgtaccttactgccctcgctgcggaactccgttgtctgcgcaggaagtggcacagggatacaaggatgtgaaagagcgttctgcaatcgtaagatttaaggtaaaaaacgaagacgcatacattctggcatggacaacaacaccttggacactgccgtcaaaccttgcactttgtgtaaatccaagtgagacttatgtaaaagtaaaagcagcagacggttatgtatattacatggcagaggcacttcttaatacggttcttggaaagcttgcagaagaaggaacaccggcttatgaggttctggagacatatgtaggaaaagatctggaatacaaagagtatgagccattgtaccagtgtgcagctgacagtgcagagaaacagcataaaaaagcattttatgtgacatgtgataactacgttacattgacagacggtaccggagtcgttcatattgcgcctgcatttggtgaggacgatgcaaatgtcggaagaaattatgaactcccgtttgtacagcttgtagatgaaaaaggggatatggcagcagagactccgtttgcaggagtatttgtgaaaaaggcagatccgatggtactcaaagatctggatgagagaggacttctctttgacgctccgaaatttgagcacagctatccgcactgctggagatgtgatactccgctgatctactacgcacgtgagtcctggttcatcaagatgacggctgtaaaagaagatctgattgcaaacaacaacacaatcaactggattccggaaaacatcggaaaaggacgtttcggagactggcttgaaaacgttcaggactggggaatcagccgtaaccgttactggggaacaccgctgaatatctgggagtgtgaatgcggacatatgcactctattggaagcattgcagaattaaaagagatgtctgataactgtccggatgatatcgaactgcaccgtccatatatcgacgatgtgacgattacttgtccagagtgtggaaaacagatgcaccgtgtaccggaagtgattgactgctggtttgacagtggttccatgccgtttgcacagcaccactatccgtttgagaacgaagatttgttcaaacagcagttcccggcagactttatttccgaggcggtagaccagacaagaggatggttctactctctgcttgcgatttctacattgctgtttaacaaagcgccatacaagaatgttatcgttcttggacatgtgcaggatgagaacggacagaagatgagtaagtccaaaggaaacgcggtcgatccatttgacgcactggagacatacggagcagatgcgatccgctggtacttctacagcaacagtgcaccatggcttccaaaccgtttccacggaaaagcagttgtagaaggacagcgtaaattcatgggaactctgtggaacacatacgcattcttcgtactgtatgcaaatattgatggatttgacgcaacaaaatatacactggaatatgataaattaggagtcatggataaatggcttctgtccaaactgaatacactgacaaaaacagtggatgagcatctggcaaactacagaattccggaaagtgcaagagcactgcaggatttcgtggatgacatgagtaactggtatgtcagaagaagccgtgagcgtttctgggcaaaaggaatggaacaggataagatcaatgcgtacatgacattgtacactgcgcttgtgacagtatcgaaagttgctgcgccgatgatcccgttcatgacagaagaaatctaccagaacctggtgaagagtgttgatgcatccgctccggaaagtatccacctttgtgattatccggaggttcagaacgaactgatcgatgaaaaactggaagcagatatggacaatgtattaaaactggttgtcatgggccgtgcatgccgtaacgcatccaacatcaaaaaccgtcagccgatcggacagatgttcgtgaaagcaggattcgatctgccggaattttatcaggagatcgtggcagatgagctgaatgtaaaaaatgtaaaatttacagatgatgtaagagactttacttcttatagttttaaaccacagttaaagacagtcggaccaaaatatggtaaaatgttgggtggaatcaaagctgcgttagaccagctcgatggcaatgcagcaatggatgagattaacgaaacaggttctctgaaactggatattaacggacaggaagtaacactgttcaaagaagatttgttgatcgatactgcacagattgaaggatatgtttctgaaaatgacaatggaatcacagttgttctggatacaaatctgacagaagagcttctggaggaaggatttgtaagagagatcatcagtaagatccagacaatgagaaaagaagccggatttgaagtgatggataagatcaaagtgacctacaaaggaagcgaaaaggcagaggcagtcttcgcagcgaacggtacacagatctgttctgaggttctggcagtttctgcagaaaaagcagagccggccggattcgtaaaagaatggaagattaatggagaagctgttttcatgggagtcgaaaaagaagggagataatcgacatgtacagcaaacgttttgaaaaggaaacatttaaagaggcagtcagggaaaatgtaaggactctgtatcggaaaaatattgctgaagcatctccacagcagatatttcaggcagtttcctatgccgtaaaagatattattatggatgactggatcgctacgcagaaggcttatgatgaagcagatgcaaaggccgtctactatatgtccatggagtttctgatgggacgtgcgcttggcaataacctgatcaatatgacagcatacaaagaggtcaaagaagcactggaagagatggacatcgatctgaacgttgttgaggatgaagagccggacgcagcacttggaaacggaggactcggaagacttgcagcatgttttctggattcattgtccactttgaattatccggcatacggatgtggaatccgttaccgctatggaatgtttaagcagaaaatagaaaatggttatcaggtggagacacctgataactggctcaaagaaggaaatccgtttgagctgcgccgcgaggaatatgcaaaagaagtgcgcttcgggggaaatgtacattttgacaaagatccggagacaggaaaagatatctttgtacaggaaaattatgaatccgtacttgcaatcccatatgatatgccgatcgtgggatacggtaatcacgtagtcaatacactgcgtgtgtgggatgcaaaggcgatcacagatttccagctggacgcatttgacagaggagattatcacaaatccgtagagcaggagaatcttgcaaaactgatcgtagatgtattgtatccgaatgacaatcactatgcaggaaaagagcttcgtctgaaacagcagtatttctttatttccgcaagcttgcagacaatgcttgaaaagtataaaaagaaacacagtgatgtgcgtaaactctacgaaaaggtagcgattcagatgaatgatacccacccgaccgtggcagtgccggagctgatgcgtcttctcatcgatcaggaagggctcacatgggaggaagcatgggatgtgacaacaaagacctgtgcatatacgaaccatacgattatgtcagaagctttggaaaaatggccgattgatctgttctccagactgcttccgcgtatttatcagatcgtacaggagattgacagaagattcctgattgaggtgcgtgcaaaatatcctggaaatgaagagaaggtacgcaagatggcaattctctatgatggtcaggtaagaatggcacatatggcgatcattgcaggatattctgtcaatggtgttgcaaagctccatacggagatcctcaaacaccaagagttaaaagacttctatgagatgatgccggagaaatttaataacaagacgaatggaatcacgcagagaagatttttgcttcacggaaatcagctgcttgcagactggatcacgaataagatcggagacggctggatcactgatcttgcccagatcggaaagctgaaagcctatgtagatgatgagcaggcgagaaaagagttcatggagatcaaataccgcaacaaagtccgtttggcagcgtatatcaaaaaacacaacggaattgaagtagatccgaattcaatttttgatgtacaggtaaaacgtcttcatgagtacaaacgtcagttgttaaatatcatgcatgtaatgtatctgtacaatcagatcaaagaacatccggaggtgagcttctatccgagaacctttattttcggagcaaaagcagcggccggatataaacgtgcaaaagagacgatcaaactgatcaactccgtagcagatgtagtcaataatgacagaagcatcaatggcaaattaaaagttgtatttatcgaagattaccgtgtatccaacgcagagcttttatttgcggcagcagatgtcagtgagcagatttctacagcttccaaagaagcttccggtaccggaaatatgaaattcatgctcaacggtgcgccgacattgggtacgatggacggagccaacgtagagattgtggatgaagtcggcattgaaaatgcatttatcttcggactcagttcagaagaagttatcaactatgaaaatcatggcggatacaatccgacagagatttacttcaatgactgggagatcaagcgtgtggtagatcagctgatggatggaacctatgcaaacggaaaccacgagatgtacaaagatctgtataactcacttctgaacacacagtgtacagacagacctgacacatactttattctgaaggatttccgttcctatgcagatgcacagaagaaagtagaagaagcatataaagataaggacagatggtccaaaatggcgatgatgaacactgccagcagtggaaaattcacctctgacagaacgattgaagagtatgtggatgatatctggaaactgaagaaggtgtttgtaaagccggtcgaagaataggaggaagcctatggaattttacagtgaattgccatatgaggactttagttactataatactccgtccactcatgaggtgggaggaagtattctgacaggaattttgatgttttacctgatcatattactggttggactgaccgttgcggtcgtaaactatattttccgcggaatcggaatgtacaacatggcaaaaagagaaggaatggattatccatggctggcgtttgtaccatttgccagaacgtaccttcagggagagcttggcggaacggtacatctgaaaaataaacagatcaagaatccgggaatctggctgatcgtactgccatttatttcttccatcgttaccggtatcctgtatgtggtcatatgggtagtgcttggatttggtgtggttttctcatcttacggcggctttagctttggcgcagtgacaggaatcattatcgtgacagttatcgtcattgtattttttacagtgtacaatgcagtctacagtgtgcttcgaattcttgtaaaccgtcagatttatgagaaatttacaacaccgggaatggcagttgcacatgcggttctgggagtattacttccgctgtatgaatccatttgtctgtttgtgatgcggaatcgtccgtataatccgggaaaagaaccggatctgggaacaccgtttatgacaacacctccgccgatcgcgccggcacctgagatgccccggcagacatcggaagaggcaccggctgctcctgcgccgaagcaggaggaaacgcctgcagaagatcagaatacagcggatccggtagacggagagtttaagaaagtagacgaagagatcatcccgggagaataccgcagggtggaagaactgtcaagaccggagcatgagcagatgacttccagctatacgtatggcgggacaaaagaagaaccgaaaacagatgacaaaccatctgcagaagaataaaaggatatcagacctccatggtgcatatactgcatcatggaggttttttatgaagataaaacatcaaaaactaaaatcagcgggagcgtttttgacaatcctgttattgcttccctatgtagtcacagtttttgtaaacggaatcgatgtactgggaatgtcgcaggaaccttgtgttcaggcagaaacagaagatcaggacggtgagaagactgttaggacagttccgtggacagaatacatgatgggaattttagggaaaacaatgccagcatcctatgaaaaagaggcactgaaggcacaggcagtagtacttcgtaccatgctgtatcagcaggctgcacaggatgttgtgttcaaagaggcatatctgacaccggaagaattgaagaaaaaatggggagctgaaaattttgagaattattataagaaattaagagaggtgctggatgaaacagagacacaagtgcttttttatcaggattcttatgcctgggttccgtatcatcaatccagtaacggaaagacaagaagcggaaaagaagtgatcggcggggatacatatccgtatcttgcgacaagagaatgtctggaggatgtgaaggcggaagacgagatgcatgtgtatcagttttcgtatgatgagatcaagaaaaagtgccggtcgttcctggaagcggcagagggagaagcagaagccaaaaaagcgctgaaattcgaagattttgaaatccaggaaaaagattctgcaggatatgtttccaaatttcggattggaaacacggtctgcagcggagatgaatttcgagatgcgttatctcttgcatccagtgcattttccatacaggaagaatcaggaggactcaaaatcaccacaatgggaaaagggcacggacttgggatgagccagtggacggcaaatgaactggcgaaaaacggtcaaaattataaagagattctggaattcttctttgagggaacaacgatcacaaactccgaagaaattttggaaaaaccagaataaacagcagtgcttctggcaaaaatatagccagaggtgatgaatatgaataacaatgaaaagccttccttaaaaagtaaaggaatgtcagttgcgattgtgatctgtttcgtcgttgtagtatctgtcgtgggagccgttgtatacaacagctatcaccgaagagcaacgggaagccagcttgcaaaaaacaacaccgttacagaagagaccagaacaaccaataccaatgatattgttctgccgcaggccgaagaagatacatccgcagaaaatggatcagagacaggtacgaatgaaagcgcagagacacagacagagacagcagcaccggcaaaacaagtttattttgatgaaaacagtacacttgcatggccggcaagtggaagtgtgattcttggatacagcatggataagacggtattttttcagacactggaacagtacaagtataatcctgcaatgattatcgcaggagaagccggagaaatgataggagcttctgcagacggaatcgtaaccaatattgaagaaactgcacagacaggagtgacagtcacactggatatgggaaacggttacagtgcagtttacgggcagctcaaagatgtgccgcttgcaattggggattttgtggcacagggacagactgtaggatatttaagtgaaccgacaaaatactatagcgtagaaggtccaaatctttatttcgaggtgacaaaagacggagaagcgaaagatccggcagtatatatggaataacagtcagggggtgcgaaaaataaaatgtttcgtatccctttttattttccataacgatgcttgatttggagcacaaaagaggagtaaaatagaggacattgataagaggtgacaaaatgaactatacatatatcttaaaatgcaaagatgattctctgtataccggatggaccaatgatctgaaaaagcggattacaagccacaatgccgggaagggagccaagtatacaaaagccagaagaccggtggaactggtctactatgaagaatttcagacaagagaagaggcaatgaaaagagaatatgccatcaaacagctgtccagaaaagaaaaagaggcactgatcaagaccaggcctctttaaaggttctatattaagataggaaaatcttagccaaagtatctctttaacagaccttcgaaagcttttccgtgacgagcttcgtctcttgccatctcgtgtactgtatcgtggattgcatccaggttagcagcttttgcacgttttgcaagatcgaatttaccagctgtagctccgttctcggcatcaactctcatctccaggtttttctttgtgctgtctgtaacaacttcacctaacaattcagcgaatttagaagcgtgctctgcttcttcccaggcagctttttcccagtataatccgatttccggatatccttctctgtgagcaactcttgccatagcaaggtacataccaacttctgtacattctccttcaaagtttgctcttaagtcagcaaggatgtcttcgcttacgccctgagcaacacctacaacgtgctctgcagcccaagatctttctcctgtctgctctttgaatttatcagctggtgcatgacagactggacattcagccggtgcagcgtctccctcgtgaacataaccacatactgtacaaacaaattttttcatagttcaaatctccttttcttaattgaatttgaccggaatgagtcggcctttggttaatattataatacggaatcagaaaactttccatattatggacaaatttaagattttttgatgcagtttccgcattttccataaaaagtcatcgtgcagaaatcaatgattccatcaaaatctttagcagcaatttcatttagctctgtgacattttgcatatccatgttgatatccagaacccttttgcagcaagtgcagaaaaagtggttgtgaggtctcacatcaccgtcaaatctgtccccgccgtcaggagttgtaatcttgactgcctcaccgagatcagtcagcagatttaaattccggtaaacagttccaagactgatattcggaaactcctctttgacatgcatatagaccgtatcagcagttggatgctcagtggtcgatgccagatagttcttgatggactctcgctgtctgctatatttcaaagtagccaagtgagttctcctttcaaaacaataatagtaatcgttgctatatttagactataatacagttttgaaagtttgtcaataggatttttgaaaaaagaatattttatttgataaaatgttacaaaaaagttaataaataaaaaataaacagacataatatatcgtgatatgtcgaaatacaggagaaaaaacccttttaaaactgttgacacatcgtataaccactgatataatcacactgtaacaaatttaataattatgtaacatttaaaacttcctacaaaagataaagacagaaaacagaggaggttttatatgaaagcagcacacatgaaacaaaaaatagtcattcctgctctggtaggaatgatgatgattccggggagtgcagtttatgcggcagatcagaaagcggaagtatatccggttttgccggctgcaggaatcgaaacagtagtaacagattgttatgaaacgaaagtaaaggagaatctgcagttatatctggtaccgacaggtgagggtgagtatttgaatatggcgttttcgaatacaggtgaagaatttacttatataagaagtgcgccggatgagaacagtgactggatcggaaaattgtatccggattcggcagtcagagttctcgaatataaagaagactgggtgaagatccagtcaggagatgcgcagggattcgttccggcagatacattgtacctgggagaagatgcaaagtcacatgcaggggaatacgaaaaagaggttgcaacggtaacagctgatgttctgaatgtgagggctggtcagggagtagagacacaggttctgacacagattatgcagaatcaggagtatgaaattactggggaaccaaaagatggatggtatccggtgcaggcaggggagatcgccggctgggtatccggggagtatatcagtatagggacaacgtattcttacgcagagacgagggaagcagaagaggcgaagaagccagagcagaccatagtgcaggaaacacagaaggttcaggaagcttccgcccagagtattgtgcaaaatcaggctgcttcgggacaggctgtcatagattacgcctgtcagtttattggaaatccgtacgtatggggcggtaccagtctgacagaaggagcggattgctctggatttgtacagtctgtgtatgcacatttcgggattagcctgccaaggacgacatgggatatggaaaatgtgggagttgctgtcagctatgaacaggcacttcccggagatattgttttgtatgacgggcatgtcggactgtacatgggagacgggacgattgtaaatgcaatgaacgaagctgacgggattggaatctgcagcgcaacttatacaaatatcataacgatcagaagagttctgtaaattcagaccgcattttaaagttgactgactttgaaatgcggtattttttcgggggaaaatgagatagaaagaaacaaaaaagtcaacaggaaaataaataaatggcaagatgcacaaaaatgtaaaaaaatgtcgaaatttgaaaaataggagttttcaacttatccacactcaaaatatgaaaaaacgtggaaaacacgacatttccgaaaagttattcacattatccacactcaaacaggtgttttttgtgaattacttttgtgaaaaaaagaacggatgttttgtaaggttattatgaaattgcttgtttgtcgaaaaagaaagaaaaatatattgacttttgagtattcgaaaagcaataaaaacagaagaaacaattcagaaaattcaagcaaaataaggttgattttaaaacgtattttccggttttggtggttgataatttaaaaaatagagattataataaagaacattgaataatagaaggaggaatcataatggaaacatttacaaagaatacaacaatcggcgaattattatccgtatatcctgaatgcgcgccgatcttaatggaaatcggaatgcactgccttggatgcccgtctgcacagatggagacactgggtgaggcagcgatggttcacggaatcgatgcagatctcctggtagagaagatcaatgcggcaagagcagcaaaataagacttataacataaaagagtgcggactgggcagtaaagcttaagtccgcactctttttatatgcgtttatacctgtgacagcttttgaatcgcatcggaagaaatcacgacctcgcagtgttcttccagaaatgcaagaacagaagcagaggctttctccagactgccgtattcagaaagcatattgcagatcttgttaaattcattggcggaatgatccgatggtgtcagtgccagaatatacatatctgcttcatcgtctcgatacagtgtattggaaccgtggtacgcaggagccagaagatgggctgcctgaatgaccagatcaatatggttgaacgagaacagacgtacattgagcggtgctggttcctcctgtggtttggaggcaggcttgatgtcggctgccgcttcttttactttattgagcaggttcaggaagtcttctgcgccctccagcttttccagctgttctgtcgggcttgcttcagaatccatgctttgtgtaaatttcgagaatcttgtatccagttcctcgggatcttctacttttgtgatgatcaaaacgatggaatcaccagatgaaggaatcgcttcgatcatcagaggtaaatcttccgcttcaaatccaaaatcaaaggatgcctgctgcatcatatcccgaaacagagattttgctttttccgtaccgtaagccagttcactcagttttaagtgacgagctgctaaatcagcatgtgtcaatgtacaacgaatttgattttcattcagtttttcgattttcatgtgctcacatccttacgaattgaaatgttgaaaaatatagtcattaagtaggaaaataataacttatatttcttcactattagtataaacaaaaagaaaaaagatgtaaaggaaaatagtgagacttctgcattctttcatgttatcaacaaaagggaagtagttataaacaaaaaacacattgaaatgacggaacacaatccctataattggcagtacagaagatagtgttccggataaatatcacttatttaagaaggagggatacaaaagagacgatcagatcatctgaaacgagttgctgaatttttcatttatcaagacatcaaagagcatatctatcattaaaatattcgaaattcaatgttctcgaatcggggacgaaatcaatatcagacagaaaagtaaattcaatgtgagttcatgctatcttttgtaccgtgataattcaaaggtacgtcacataccttctgcggtcagttattaccggggatatttatcagagctcacggagggaaggagaagaacatgaaatctgatgagacagcttatcaggaattatttgaggaactggaaaaatatgaaaataaaggagtatacatcagtatggatggattcccggccagtccgatgcagattgtagcggcacatatgacaagggaagaaggaagttatatgcgggactatattctggatacagaaggatatattgaatcactttcatttgtaaatatcaagacaaaagaacaggcgtagatccccttttacgtcggacaaaaagatttaaaatatttctgaagaatgtttaaaatacttcttaaaatggcaaattagtaatgactggtaaaaaaagtatgttataatggttctgtataggaggtacgcatggacgaaagagaagagagggttgtgaaaacccgcagcacggcgggaacacagcaaaacaaaacaagaaggcgcccacgcaggattgccggagaaccagaggatacaaggatggattcgaatcgcataccgccgtctaagagacggaaaaagagccgcagggcaaggcgaagacgaagaaatatgctgatcaggatgctgctggtgatcatattgatcatagtggctgttgggggcctgattttctggaagcgatatggctcatcgaatgagaaggcgaatctggaacaatattatggaatgacaggtacggacgatatcgcagtgatcgtgaataatcaggtgatcgcaaaagcggacaacggagaatatggggcaggaggccgtctgatagacggacaggcttacattgaatattctgttctgcatgattttgtgaataagcgcttttactgggatgcgaatgagaatttactgttgtatacattgccgcagggaagtgttgttgcaaacataggaagtaaggaatatacagaagtcagcgaacaaaaaagtgaagagtatgtcatctggcagacagtcgataataaggcatatgttgctttggactttgtgaaaaagtacacgaatatggaatgcaaagaacatcaagatccgaatcgtgtgatgatcgtgaatgagttcggaaagacgactgtggcagagatgaagcgggatacacaagtgcggtttcagggtggagtaaagagtccgatcctgacagaggtaaaaaaatcagaaaaagtgactgtgatcgaggatgaggatggctggaagaaagttcgcaccagcgatggatttatcggatatgtacagacgaattcgctgaaacatatcaaagaggagacgatttccagcagctttgaagaaccacagtacacaggtatatcgaaagattacaagattaatatggcctggcacaatgtagagaatacgactgccaacgggtatattcaggatatgcttgcatccacgaaaggtctgacgacgatcgcaccgacctggtttcatattgcagatacgcaggggaatctgaattcaatcgcggacgcagattatgtgaattatgcgcatcagtccaatttggaagtgtgggctgttctcagggattttcatgggggaatcaattcggcggatgagacttatgaggtgttaagtcatacttccaggagaacgaacctgatcgatcaggttatagcagcagctctgcaggctgggattgatggaatcaatctggattttgaactgatttctgcagagtgcggagaagattatgtacagtttgtgagagaactttccatcaagtgccatcagaatggactggcattttccgtagacaattatgttccgatgccttacaacacattttatgatctggaagaacagtcagtatttgctgattatgtggtgatcatggggtatgatgagcatgtggagggttcttatgaagcaggttctgtggcgtcttacggatatgtaaaagacggcatagagaatgcgttaaagtctgttcctaaggaaaaactgatcaatgcgatcccgctgtatacaagactgtggtttgagacaccgaagacgcaggaagagctggcagcagaagccggtacagaagcggcagattatccaaataaagtgaccagtacggcactgggaatggaggatgccgaaaaacgggtgcaggaagccggtgtacaggcgtcatgggatgaagatacaaggcagaattatgcacagtgggatgcagacggaggaacatacaagatctggctggaagacagtcagtcgctggaagagaagttaaagctgatcaaaaagaatgatcttgctggtgttgccgaatggcgccttggctgggagaattcgggagtatgggatctgatctcgcagtacatcaattaaaaagtgaatagaagaatataaaaaggacgctggaattccgctttggaatttcagcgtcgttgttttctgtaaagttgaattagagaatcgatttgacaaaattcaggatttcgctttcacaggcctctctggcagggatacttgcaaagttgtgatttcctttcgggatttttacaaaagttccgtttccgttgtatccttcaagatatgtttcacaggttttatcatctaccagattatcttctgttccgcgaagaatcaggactttgccgtcatatccttttgcatcctcaaaaggagagtaggttgccaggtcatagttgaaatcaagaccgaatttcagtccttccatatcagcaaatgtcattccctgatttttgaagaaatctgctttttctttacatccattccacattccggcacccgggcacatcaaaatcagtccgtaaggattcaactttggagcagcggtagcagcgacaaatccgcccatgctctgtccggataagatgatcttatctgtatctacaaaatcttgtcctttcagccattcatagacatcctgagtatcttccagaagtccggtgaaggtcatttcttcgaattctccgtcactttctccgcagccgtagaagtcaaagcgaagacaggcgattccgtttgcttccagaacgcgggcaagatgtgtatgtgcgtatttataaccggataagctgccgccgaatccgtgaaggttgagtacgaccggaggatggctgactccatccggaagatttaacattgcccgtagagtatgattttttctgtttttaatttctgtgtaacgaatcatggtattattctccttgttttgctctttttttcgcgagtgtttctaacatttcttctgtctttttcttggaaagcggatatacaaaatacaggatcagtacagcaatcaaatatccgatcgcatagatcgcagtataagatttccagatatgtgcttttacagcagctgtctgtacagcttcatttacgttatatccgatcagagccagggtaaagctgcttaagctggagcttactgcagaagcaagcttgcggaagaaggaataggttgcatagaccataccttcttttctgtcgccggtggtcagttcctggtaatcgatcgcatcgtttaccatagcccagatgagtacctggaaaccacttgcaccgaggtagcagattccgttgataacaatgaacaaggtcggattcttgatcgggaagaagaataaaattccgaatacgatagcggcaaaaccggctccgtacatacaccattctttttttccgaattttttagatacaaattttgttccgacaaaagtgataatggaatatacggtactgagcataccggatactgccatgatctgaacattaccaaagtaatctttaaataaataagtattcagtccgtttaccacactggctgcaatcatacctgcaaggctggagaaaatgagtcccagaagcgctctgtttttaatgatatgtttgagtgcttcaaaatagttgaatttctctcttttttccacagtgatggaaactctctctttacaccagctgcttgtgatcatcaggcagaatacaccgattgttgcacagatcagtgccatcagggtaaatctggaaggaatcgggttgttgtctttatataaaaccaaaggacctgcaatcacgacgactgtcataaagattgtaccgccaaggcttctgtatctggacaagtctgttctgtgattgacatcatctgtcataacgctggacagagaaccaaacggtacattgacacatgtatacagggcttcatataatacgtaggttactaaaatgtagatcagttttaatttataatcaaagctgctcacatccaggaatccaatcacgcacataatggccataggaatggaaaatgccttgatccatggaataaaacgtccgcctttcgtagattttctggcatcgatcaaagcgccgatgatcggatcattgatggcatcccagattttagtgatcaacagaatcgttccgacatgtaaaggatttactttcagtacgagcgtgtagaatacggtcaaaaacattgcccgaaactgttctgtacagcagcaccccagatctccgagcgtgtagccgattttgtctttcatagaaaactctctcacaattcttcctccttatcgtgtggctttttgttttcgtttgtttacgatgttcattatatctttatctgaataggaaacatatccaattcttgcttgaaaactatcaaaaattgatatactatttattttgaatagttttaatagggatttacagtgattttcatatattttaacgaggtgatcatgaaagaatatattgcaaaggaatacaaatatacacaatcaaaatgtaagaaatttccggcgactacatattatacagtgttttttattactgccggaaaatgtacatgcagaagcagggagaaaacatatttttgtgcaacggaagaaatcatactggtcaatccgggtacatcggtagaaattgaatatccggcgtcgaaaactccgctgcattttcttcagatttcgttttctgcagaactgctgaaacgtttgtctgatgaacaaacggatctggagtcctgctttcatgtggttccatatcaggttgtagtcattcaggcagaatcagaaatcagtatgctgataaaaaatctttcgaaaaggcttctgactcttccaaaagaaacgacagatttcgggcatgcactgtttcaggacagtattctgtcaatgctgatcgtgctgcttttacgtgcctgtattcatgtggaatttcacacaaaaagtaaaacacgatcccgacttgcactggatgacatttttatttttatcaaacatcatctgtacgaagaaatttcactggaacgtctggaaaaggaattttttatcagtaaatatcatatttccagagaatttaaacggcagacaggaatcaccgttcatcagtatattgtcaaagcgaagctggatctgtgtaaacggcttcttgaaaagggatatcctatgacggaaatctataaaatatgcggactcggaaactataataacctgtttcgggcatttaaaagggagtttggaatcacaccaggagaatatgtgcgtcaattccaggagagacaaaaaactaaatctgatgttcattaaaatgattgttctccataaaacgggtgacggtgtcaagcatttcctgtggtgtgtaggacttcacggttccttttttattatgagggagggagtcgctgttcatgttttttttgaactcattcggagtctgcccggtatattttttaaatgcattattcatatagcggtaatccgaaaatccgcagccgtagcagatatcaatcagagaaagttcacctttcatcagcagtgcttttgcattgagataccgggtgtaggtcagaaattcactgaaagaacggtgcagatttttctgaataaaatgtgataaataagaggcggagagctgcatgtgttttgccaggtcagacagagtcactctttcggcagaatgttcctcaatgtaaccaatgatttcagagagctggctgtttctcttggtagtgagcgcaagtttgtctccatacatttcatagtaagcgcagctctgcaggatgtcatgcaccataatgttgatcagaccggcacactccagctggtaataaggcgcctgcaggagataaatctttaaaagtttgcaaaacgagtaggtgaacagtcgctcatttttactcaaaagtgtattttccagaaagctgatatgactcatctgcggaaaatatccttcaaaatactgtggaagaatatgaagggagagcagggtggacggcgctttctccgaaataatctcgtggagctcgttggcgttgatcaggatgatatctttttcagaaaaagacgtagtattgccgttgatgttgaatgccggatctccttttaagaccaggatcagctcaatttccgggtgcaggtgggcagcacggtatcctacatcatagacggacagattcatatttttaatttggggatggtggatattttcaatttccagatgcataagagaactccttttttattgttgcttctatcataatatagtgcgctttattattcaatcaaattcataaaacagcaggaaagtgataggaagaaagcttaattgacatataaaagaaaacaggggatgtgtatagtagaacatgtattgagcagaaagaaaatgttaaggaggggctgattatgagattattagaaccaattaaagtgggaaagatcgagctgaaaaacagagtgatgtttccgccgatgacaacaggatatgaaggcagagacggcacaattgtagaacagagctttaacttctataagagactggcagaaggtggcgtgtcctatattgtattgggagatgttgctcctgtaaatacaatctcaccgacaccgaagctgttccatgacggacagatcgaagcatttagaaaactggcagatgcagttcatgaatttgactgtaaactgggaattcagattttccatccggagtatgatgtagaggcactggctgaattattccgcaaaggggatatggaaggcggacgtgcaaaaatgcgtcatgatatggtacatttcattcaggaagtgacggaagagcagttgaacagtattttggataagatcggggaatgtgtaaaacgtgcacagtcagccggagttgatattatagaagtacacggggaccgtctgatcggatcattctgttcgactttgattaaccgcagaacagattcctacggtggaagctttgaaaacagaattcgttttgcacttcgcgtggtggataagatcagagaagtggcaccggatatctgtattgattataaattacctgtagtcacagaaaacccactgcgcggaaaaggcggtctgatgatcgatgaggcagtagagtttgcaaaaattctggagagatccggagtggatatgattcatgtaggacaggcaaaccatacaggaaatatgaacgatacgattccggcgatgggaacacagccatattgtttcatgtcaaaatataccaaacagatcaaagaagcagtctctattccggtatcctcagtgggacgtatcgtcacaccggagaacgcagaagcactgatcgaaaatggtgtctgcgacatcgtgggtctgggacgttctcttctggcagatccagattatgtaaagaaactcgaagcaggagaaggaagacgcatccgtcactgtatgatgtgcaataagggatgtacagatgcgatccagaaccgaaaattcttaagctgcgtactcaatgcggaaaacggatatgagtatgagagaacgatcactccttccgatgagaagaaaaaagtagttgtgatcggcggtggagttgcaggtatggaagcagcgagagttgcaagtgtaaaaggtcatgaggttgttctgtttgaaaaagaaacgacacttggcggtcagctcaacattgcatcgattcctccgagaaaatctgagatgaaccgtgcactccgctatctgacaaatgagatgaaagagctgcatgtagatttacgtcttggaagaacagcagatgcagagatgatcctggcagagaatccggacaatgtgatcgtggcagcaggtgcgcacaatgtgattccgccgatcgagggaagtaaaatgccacatgtatttgatgcatggaaagtattgaatcatgaggaacttccgagcggacgtgtggttgtgatcggaggcggtctggtcggagcagagacagcagagcttcttgcagagatgggatgtcaggtttctgtagtagagatgatggaagaaatcgcaaaagaagaatccaagacagtaagaccggtattatttgagagctttgaaaaatatcaggttcagctgctgacaggaacaaaagtaacagccattacagcaaacagtgtggaagcagaaaatgcagagggcaaagtgtctcttccttgtgattacgtagtactcgcagtgggagcaagaccgaatctgtttgacgtgcaggcactggaagacaaaggcgtacaggtgagctttgtcggagactgcaatgagagagcagcagatatcaatcgtgcagtagaagaagggtatctggcagcaaacgttttataaaaaacgtacaggtggatgaaacatccttctttcgcatatacatgaaacagagtatatgcgaaaggggatgtttttttgaggttcaaaaaggcattggggatactgcggacaaagattcgtctgctgctgatgatcggggtacttctggcggtggcagcgggatgtcagtttgccggagagtatctgcacagtcattatattcgggaggaagtatctgagacctccggaaatatatcagagaaaaagacggttgtgattgattccggacacgggggaaaagatcccggaaaagtcgggatcaacggggcgcaggaaaaggaactcaatctgcagatcgcagaaaaattgaagaaatatctggaggaacatcagatcacggtggtgatgacacgtacaaaggatgagggacttgcagattctcaggtggaagatcttaaagccagagtagagttgatcgacaaagaatctcctgcacttgcagtctgcattcatcagaacagttatccacaggaaagcgtaagaggaccacagattttttattttgcgcactcgaaggaggcaaagaaagcagcagaggtaatgcagacagagctgaaaaatttcgatcaggagcatgccagagagattaagggaaatactacatactatatgctgaaaaatacaaagtcaccaattgtgatcgtagaatgtggatttttaagcagcccggtggaggcagggatgttgatcgatgaggcgtatcagcagaagcttgcccaggcaatcggcaatggaatcctgaaatatgttgagcgctgataagaaaaatggtataatgaaagctatggaaacgataattaagaaaatagacaaaaaccaaatagacgaagatgcaatacgagaagcgggagagattctcagagaaggaggacttgttgcattcccaacagagacagtttacggattgggggcgaatgcactggacgaggaggcagcgaaaaaaacatatgaagcaaagggccgtccttctgataatccactgatcgttcatattgcagatctggaagatttaagtgagattacggagaatgtacctccggagacagagcttcttgcgaagcatttctggccgggacctttgacgatgatctttgaaaaaagttctctggttccatatggcacgacaggcggtctggataccgttgctgtgaggatgccaagtgatctgatcgcgagaaagctgatccttgcggcaggcggatatgtatcggcgccgagtgccaacacatccggacgtccgagtcctactacggcagagcatgtgtgggaagatctgaacgggaagatcgagatgatcatagacggaggaagtgtagatatcggactggagtctacgatcctggatatgacagtttttccgccgatgatcttaagaccaggtgcgatcactgccgatatgctggaagaagtgattggcgtggtaagcgtggatgagacgattctgggcagtgagagcagccgggcgccgaaagcaccgggcatgaaatatcgccattatgcgccgaaagcaaagctgacgatcgtagaaggaagcctcaaggaggaagtgtttgccatccggcagcttgcttatgagaagagtcgtcagggtgttcaggtgggcattatcgggacgaatgaaacggttgagttttatacccatggtctggtgaaaaatatcggttcccgtgaaaatgagaagaccattgcaaggaatctgtaccgaattttgagagagtttgacgaggaggatgtgtcagagatctacagtgagtcatttgcgatccagggaatcggcaatgccattatgaaccgtctggaaaaggcggcaggacactgcaggatccccgcatcagttcttacgaaagagcaaaaatacagaaaaatcgtatttgtcagcaatacagatacctgtcgcggaccggttgcggcagagattttcaggcatcagtcattagatcaggaatattggatcgaatccaagggaatggtcgttttgtttccagagccggtaaatcagaaagcagaagctattttaaagagcaatcagatgacgctggaaggatatacttccagaccgtttacggagaagaacctgaatccggagacactgatcctgacgatggcacaggctcagaaggagaagatactttctgaatatccgaacgaatatacagacaatgtatatacacttactgagtttacgggagaaacagaagagatcccggatccatatgggcagcctttgactgcatatggagagtgttatgagaagattacgttgttgatagaaaaattagcagaaattttaaattcatttactaaaggaggacaataatgtcagaagtacatgttatggatcatccgctgatccagcacaaaatcagctatatccgcagagaggatgtcggaacaaaagaattcagagaggtaatcagtgagatcgcgagtctgatgtgttatgaagcaacaagagatctgaagcttcaggacgttacaatcaaaacaccgatctgtgagatggtgggaaaagagctgacaggaaaaaaactggcagttgtaccgatcttaagagcgggacttggtatggtagatggaatgttatcattgattccggccgcaaaagtaggtcacatcggtctgtaccgtgatccggaaacattagagccggtagaatattactgcaagcttccggcagactgcagtgaaagagaagtatttgtagtagatccgatgctggcaacaggcggatccagtgctgctgcgatccagatgctcaaggacaaaggagtaaagcatatccgcttcatgtgtatccttgctgcaccggaaggggtcaagaagatgcaggaggcacatccggatgttgatatgtacatcggagcgctggatgatcatttaaatgatcatggctacattgtgcctggactgggagatgcgggagatcgtattttcggcacaaaataaaggagttgaaaatcatgtcagataaaagagaagattatctgacctgggatgagtattttatgggagttgccatgctgtccgggatgcgttccaaggatccgaatactcaggtcggatgctgtattgtgagtcaggacaacaagattttgtccatgggatacaatggatttccgaaaggatgctcagatgatgaatttccgtgggcgagggaaggcgaaaatccgctggagacaaagtatgtgtattccacacacagtgaattgaatgccatattgaattacagcggcggaagcctggtcggagccaagctgtatgtgtcactgtttccgtgtaatgagtgcgcaaaagcgatcattcagtcgggaattaaagaggtcatttatgattgtgacaagtatgcggacaccccgagtgtcatggcatccaaacggatgatggatgcagccggagtccggtatcatcagtatcatcgatcaaaccgggagattaaaataaaattatagactgcgcataaactaccttctgtgggaataagatatatcagatgtttccacaggaggtagttttgttatgaaaaataaagcggcagctgtgattttaaacttttttctgagggcagtgatgggaatctgcctgatatattttgttaatcaatacgtcctgccggatcaggattcctggaaggtaggaatcaacgggctgtcctttttgacatccggaagccttggtattcctggagtctgtatgctttatggaattctggtgtatcaaagtttgtaaggttttcacaaaaaactgcaatttaggaaaagcgtatggacaaggcgggaaactgcgtttataatacatttcacacagcagatcattcgagtgctgtttttatcggacctgcttcacaggtcttttgtatcaggagatcagaggattctgatcgtcagttatttttattcaggctgcggttcgcagcggtattttcatccaaaagattgaatgaatcatacagaacaggagggataggttgcatcagaaaaattttgtaatctgtgatcaggaggcagattatgcgagaaaccttatgcagatgatcggaggcagaaaagagcttggatttcagatgcatatgtttcagaaattggaaccactgaaaaaattcgcagaacaaaagccaatccagatcttgctgatcggagaggaatattcgcaggaagaaagactggaaattccggcagcagagcgatttgtactggtaaaagcagaagggaggtatctggcagacgaagaaaaggagctttataagtatcagtcagttgatcagattctgacaaaggttctggagctttctgtggacaaggaacgggctgtggcaaagacgctccgaaagacaaggggaagtctgatcggtgtttattcacccatacacaggatcgggaagacgaagtatgcgttggaactgggaaaagagctggcagaaaaaggacctgttctgtatctgaatctggaagagtatgcaggaggtgagcattatttttcaaaagaacaggaacagaatctgggagatctcttgtattattcaaaacaggagaccggaaatctgggacttcgtatcagcatgatgacaggccagattggaaacatggattatatacgtccgattccggtggtacaggatctgcaggcggtcacagcagaagagtggctgcagctgtttgagcagattgtggaaaaaagtatttatgaagtgttgatcctggatttgggagacagtgtgaacggactgttttcgattctggaaaaatgtgattctgttcatacgctttcgatcgaagagccggcagcaaaggcaaagctgcagcagtatacggagaatcttttgcggaccggacatgagaaaatcctggagcatacggtacagaaggtggtaaggtcgagaaacggcggtactgtcatatgagaaacacagagcgattatatgaccgggtgattgaaaagatggatatgacctgcgatatggaagacgaggaactgcaggagctgattcatgaagtgttggaggaggcttcaaaagaagagtttattccgcttcaggaaaagatacggatcagcaaagagttgtttaatgcgttccggaaactggatattctgcaggagttgatcgaagatgatgagatcacggaaatcatgatcaatgggacggatcatatttttctggaaaaagcggggcgtatttttgagtcagatcgcagatttgtgtcagttgcaaagctggaagatgtgatccagcagattgcggcaggtgcgaatcgctatgtcaatgaagcatctcccatcgtagatgcgagactggaggacggttcccgtgtaaatgttgtactgcgtccggtggcattaaacggtccgatcatgacgattcgaaaatttccaaaagaggccgttacaatgaaacagctgattgactggggaagtatcagtcaggaagcggtaaatttcttaaaaattcttgtggaatcaaaatataacatttttgtcagcggagggacaggctccggtaagacaacatttctcaatgcgttatcagactatattccaaaagatgaacgaattattacaattgaagacaatgcggagctccagatcaagggtgtttcgaatctggtcagactggaagcgagaaacgccaacctggaaggagaaggggcggtgacgatccgtgacctgatcaagtcagcacttcgtatgagaccggatcggatcattgtgggggaagtcagaggtgatgaaacagtggacatgatatcttcagcaatgcttaacggccatagtggttcaatgtctaccggtcatgccaacaatccgatggatatgcttcacagattggagacgatgatgctgatggggattgaattgcctctgatcgcgattcagcagcagatcgcttctgctctggacgttatcattcatctcggaagactccgggataagagcagaaaagtactggagattacagaagtacttgggtatgagaatggaaggattcagttacagacattatataaatttcaggaggagggaatggaagatggaaaaattaaaggaactcttatgaaggaaaatgaaatcactcagagagaaaaactgctggtagcaggatattcagaaacgggaatacatggcggcagcgggcaaaggaattctgatcacggggatgacggcctatctgttttatgatcattggacagcgtggatcttgatggttccgatcgcattgctctatgtgaagaactgggaagaagagtgctgtaaacagaagaaagaggaattcagagaacagtttcgcgagagcatacagacattgtccgcaattttaaaagtcgggtattctgtggaaaatgcaatccgggaaacgtggaaagaaatctgccccatttacaagaaaaaaacacgaattataaaggaatatgaaacaatggtccatcagctggatctgaatatgacagcagaagaagtgatgaagcagtttgccgatcgtgtgaaagaggaagatgtggaaaattttgtaacggtatttggcgctgcaaaacgtctgggaggagacagtattgccattattcggcatgcggcagacgcaatcggagaaaaaatggaagttgaaagagaaatacaggtgatgctcacttcaaaaaagctggaatttaagatcatgtgtgtgattccgtttgtaattattctgtatatgagaagcgcatttcctgagtttatggcagtgctttacggaaatcttgcaggcactttgtttatgacaatctgcctgatggtatatctgacagcttatcagctgggcaaaaaaatgacacagatcgaggtgtaaggggatggtatgaaaacagaaagaaaaggatatcaaaaggcagtactggtgatcgcagtgtttacgattctggcgggagccttatatgcgactgataattttcggaaaattccacaaaacaaatccggaagcagtatattaaaacggaatgaacacggacagggggagaaaaatcaaaagctggtcgcaaaaacaaaaaatcagaaagcgaaaatcactgtggaaatacaggaacagtcgtatacacaggaagaattgcaaagagtatttgacacagcagggaaaaagctggaaacgcttatacttggggaaaataagagtctggatgaagtgaggtatgatctgaatcttgtaaaaacagtaccggatacgggaatcgaggtatcctgggagttaagtgattaccagacagtaaacattcttggcgaactgcaggataaaaatctgtcggaagagggaaggatcattgagttaaaagcattactcacatacggagatgcaaaggcagagcatcagttttcggcaagagtgtttccgccaaagctggatgattccgggcagtttcaaagacagctggaaaagaaaatgaaggaagcagatgagacagaccgtgaatccgggtatgtggtgcttccggatgaaattgaaggaaaaacaatatcctggcattatgcaaaagatatgagaagtgtgggaatctttgtactggggattgtggcagcggccctgatgctggtgctggaaaaacagaatgaaatccagaaaaagaaggcacgccgacatcagctggcaatggattatccggaatttatcagtacatttacattgtatctgggagccggaatgcctgcacgaagagcgtggtttcagattgcatcggtttatcggcagcaggaaaatacgagatatgtgtatgaggagatggtctataccatgcgggaaatgcagagaggaactccggagagtgaatgctatgagcattttggaatgcggtgcgggcttccggtctatcgtaaatttgcggtgatgctgtctcagaatttaagaaaaggaacaaagggactggcagaattacttcagagagaagcagcaggagcgtttgaagagcgaaaagcagcagccagaaaactgggagaagagaccagtacaagactgctggggccgatgtttctgatgctgggagtggtgctgatgatcattgttgtaccggcatttttgacgattcagatttaagaagaaaggaagaggacgatatgttgaaaaaatttacagagagcatgagagaacgggtgcagatgtttgtggcagaaatgcaggcagaaaccgggctgtcagtcgtggagatgatattgatattggtcgtgatcattgcgctcgtcttgatatttaaaacacagctgaccacactggtcaacgatattttcgaaaagatcacaagtgaaagtgcgggaatctaacgtggaaaaaggggagatcacagcatttttaagcctgatatttgtactgatgatctcatttgtaacagcaattctggaaagtgcatccgttcaggcagagaaaaatcaggcaaggctggatatggatcgtgcggtgtattcggtatttggagaatatcagaaagaattattggaagagtatggaatctttgcggtggagggaagttatgaaaccggtaatttctcagagaaacagctgatcgacagaatgcactattatggagcgtcaggaatctggccggaagtagaagggattcaatttctcacagatcaaaacggacaggcatttcgggaaggcgctgtcaaatatatggaagatctgtatgggatttcgattattcaaggattgggggctctggcagaaaagtgggaacagcaggaaattaccggggaacagacaaaggatgagagcaatcagagtctggaagaactggatgatatgttgaatcagaatcagagctctcttccgatggaaaataatccgcttccccacattgaacagttgaaaaagtcgagtctgatcagcctggtatttccgaaagaaaagcaggtttcccaaaagcagattcgaggggaagaacaggcttcctcccgtgcgctgcgggtagggagggggacattttcggtcagaagtgatgtggatgaagttacaaaaaagctgttatttcatgagtacattcttaaaaaatttggaaatgctgtggaagaagaaaaagaaaaacgatcgcttgcctatgaagtggaatatcttctggagggaaagacatctgatcaggaaaatctggaggcggtgctgaacaagatgcttttgatccggatggggctgaattttgtatatctgcagacggatacagcaaaacaggcggaggcaggagctatggcattggcgctggcaacggcagtagcgcttccgatgctggagcctgtagtcaaacaggtattgctggcagcgtgggcattcggggaaagtgtcatggatttacgttctctgatgtccggaaaacgcgttgctctggtaaaaacagcagagaactggcagctgtcgctctcttccctgatgaagatgggaaccagtgaagatacacaggaaggggctgatgtaacagatggatgggattacaaaagttatctgagaatgctgttgtttttagaaaatggagatcatcttaccatgcgtacgctggatcgggtggagcaaaatctgatctatgaaaaaggacttgccttttttcgtgcagatgcatgtgtaacaaagctcagactgcaaaaccttgttcagatcagaaacgggttatcttatgaatttccactctatttcggatatgaataaacaactcccgcacccggcacaggtgcccggatctactgccgaaacgtcccctctggcagagacactcacaaattttaaagaaaggaaaaatgatgacacaatcaaatcaaaaaccatccaataagaatctaaaacgggcatctgtgccgggggcgggaggaagtattactgtagaagcagcgcttagcgtaccgatcttcttttttgcggtagtatgtctgatctattttattgaaattcataatgtgcagacaaccattcgggcagcggcagttcatgcgtccaagatctgtacggaagatacagcacttgttccggtcttaaatacatcgaagctggaatcggaaattgtcaggagtattggagcaaagcgtctggagaacagtattgtgagcggtggaagtaaagggatacaatgtgcgggatcatattgtaatcccaatgggaatgagctgaatgttgttgtacgatacggaatccggcttccgtttttacagtttggaaatctgtctgcagaatataaggaagaaatgaaattcagcagttggaacggatttcagaagaaaggtctggagtcaggagatgaacagatcgtctatattacaaaaacagggctggtttatcatgaagattatcagtgtacgtatctgcagctttctgtcaggtttatcccttatgcagacctggacggaattcggaacgaagacggcggaagatattataaatgtgacaaatgtgtccatggaagtgcaatggcaggagtttatattacaaatacagggggcaagtatcacaactcactcacatgtggcggtctgaaccggacgatttatgcggttcagaaatcaagggtgataggaagagggggatgttcacgatgtacgaaataggagaaatttgttttggaggatatttatgtgttgtttccatgtgggatatcagaaaaagagaaataccggtttggcttattgcggcaggtgggattctttcggcaagtcttggatattttcatggaaaaattccactggtactaatggtcacaggcgcgcttgtgggcggagtgtttcttctgatcagcagattgacacaggaggctttcggatatggtgacagtctgatgatcgcggtgacgggggtgtatctcggattttggaatgtgttgtatctccttgtctgggcatatgttctggcagcagtgtttgcaggatacgtgctgatcaggaaaggttttcaaaaagatgcggcatttccgtttgttccgtttttgctggctgcgtatatagggatcgtctgtctgggagggatataaatgaggtgtgtaaaagggagtaccacagttgaaatggcatatgtgatgccgttgatttttctggtatttctgatcattgtccgtacgacattttattatcatgataaaagtattttagacgggatggcatatgaagcagttacgacagcggttcagacggcacggaatccaaaagcgaaagaagcggatgtggagacgttttgcagggaacggatcaggtggaaacttatttatttttctatgccggaggtgtctgtgaatgtgacagatgatgaggcagagacgacaatttccgcgaccagagggaagatgtgtatccgggtaacaagacaggtaaaaatcccgcatccggagaaaaagatccgtttgaagaaaaaactggaaacaataaaataggagaagttggaagtgaatacaaaatatgaaaaagaattaaacagaatctgtctgcatattcatgtaccggagatttatgaggaagattatcagatgccgatgctgagagcaaataaaattccgggcattctggaagtaaacggctgcggaatcgatggagagagccggtatacatatgaaatcacaggattagtttccatggcggttttatttgaaaacaagcaggttcaaaaaggggatattgagcagtttatctattgtcttctggagagtatttcgcagctgcaaaagtatatgctgcatccgggctgtctgttgttagaaccggaatatgttttttgcagaaaacagaaatatttcttttgctatctgcctggagggaaacaggagctctgtgaatcatttcaccgaatgacagagtattttgtagaaaagctggattatgaagatgagcaggggatcacgcttgcttatgaactgcataaagcaacacttgaggagaactatgatctggatgccattatgcaggaataccgtacagaatgcgaagaagcagaagaggaggatgaggcggatacagaggaagcgtgggaagaagaggaaatttctgattctctgtttacgttggatacggaagaggaatatgaacctgcaaaggatacggaggtcatccgggaatccggcggtgtatggagtgcctggaaaaaagcggcgcataaaatcagcagagggagacttggaagatggggaagctgggatgatctgatattggaaacagatggacaagatgaatccactcacttataataactgtattaaattgcgcctgatgaagggcgcggaaaagagggattcaaattgcagaaaaacaaacagacagtctgtacagcggcactgatcgtgatcaatatgggaatcttttttctattgtcatttctgggtaacccggaaaatgcggtatttatgataaaatacggagccatgtacccaccgttgatttttgaagatgcccagtattatcggttgataacctgcatttttttacattttgggatcgatcatctgatgaataacatggtaatgctcggtgcattggggtggaatctggagaaggagattggcagttttaaatttttgctgatttattttgtgagcgggatcggggcaaatctgatttctcttgccatggatttttacactggaaatctggcagtctcagcaggtgcatccggagcaatttttggattgctcggggcacttctgtgggttgtgattcgtaacagaggaaaggccggaaggctcaccggaagagggatgctgtttatggtactgttaagtctttattttggctttaccagtacaggcgtagacaatgcggcccatgtgggcgggctgatctgtggatttctgacagccgtgcttttgtat

SEQ ID NO: 6991 - DNA, 13519 bp, Unknown
  gut microbiota DNA sequence
aatgctgtttatggtactgttaagtctttattttggctttaccagtacaggcgtagacaatgcggcccatgtgggcgggctgatctgtggatttctgacagccgtgcttttgtatcacggaaggaacgtgcctagacaggaagtgtaacggtaaatgtagtggattcctgcggagtggaaacagcagtgagagttccttcatgagcctctgcaatcttgcgggagaatgccagtccaagtccggttccgcccggtttgtaggtgacaaatggctggaagatacattccatctgctccggagtgattccgcagccggtatcggtacaggtgatggtaatgatatctccgctgcgggaagctgccagatgaatggagccttgttcggtgatggcttcctctgcatttttcagcaggttcaggacaagttcctgcagtttgatcttgtctccggtaaattcaccgagagagtcggagatagaagaggaaaattcaatatctgcttcatttgtgtccagcgagattgcaaaagagattgcaacgtttttcaaaagctgttctatagagaagacagaataatacaattcattgctgctgttaaaggcagaaagctcttctaaaagctgaataataaaatcgacgtcacccattacctggctccagtgcggaatgtctttgagctccggattttgtttttccattacctgcagggcagaggaaacaagagtaaggggattgcgaatctcatgtgagatcgtggaaattgtatttcggtgattgcgcagaagctgcgggatgatctgccgtgcatcttcattattgctcatcaatttgttcattttattaatatcgatattgtatagcatagttatgtcctccaaagtagttctgtttaagtgtagtctatcatgcgaaaaaggagggttcaataaaataagtatgacaaaattcgacaaaaaaggcgatttctgtaagtaaaatattcttctattttctggaaaaatgttttatactacaagtaaacaaaaaaggagatgcttagataatgaaagatgataactgtattttttgcaaactggcatcaggtgagattccttcagtaactatttatgaagatgctgattttcgtgtaattctggatttgagcccggcgtcaaaaggacatgcactgatcataccaaaagaacattaccgcaatttatatgatctggatgatgaactggcagcaaaagcgctggtgctggcaaaaaagatgatctgtaagatgaaagatattcttggatgtgatggatataatattgttcagaataatgaagagccggcagggcagactgtattccattttcatatgcatttgataccgcgttatgaaggagatcaggttggtcttggctggaagatgggtgaactgacagaagcagacaaggaagagattctgaataaaatcaagtaattactggagaaaacatgttgacggataaacaagattatgatgagatataccaaaaatacaaaaatctcgttatgaaggcagcatataaatattcagggaattacgatattgcagaagatattacacagagtacatttctgcaattatatatgtatatcgatgaattgaaggatatcaatatcaaagcttggatgtatacgactgcaaagcatatggcattgaattataacaagaaagcagaaagagaagttctctcggaaacaggggatgatcctgttattttagatctggaggacagcgcagaagatacatacatggaaagaatgaaggatgatgaacagaccagtctgcatgaagagatttttgcagccttgtacaagcataatccacgttggtatgatgcaattcgttatgtatattacttggagattccgcagtctgctgttgcagaaagaatggagataagcatagaagtgctgcacagtttactctacagagcaagaaaatggatcagaaaaaagtttggtgtagagtatgaggaatttttggagctgtaaacgaacaggtgtcaaaacgacacctgttcagctgattttagtggtgatataaaactatctgcgggaattctcgatgagatcgatgattgtatcgattgaattttgctgattcgaatcacgcatggcatccataaaacggctgcgatcgttatacaatttccgcactgcctctaaaagagattctttggtcagctcttcttcttcgagaaccatgctgaagccctgacgttcaaaggagcgggcatttaaaatctgatctccgcggcttgcgttggctgagagcgggatcagcagattcggttttctcagagcaagaagttcgcagattgcgtttgcaccggctcttgagatcacaatatctgcaagtgcaaagatatcacgaagctcatccttgatatattcaaactgtgtgtagcctttcatagaagtcagagagtcatctaccttgccttttccgcagagatggacaatctggaaatgctctaaaagttccgggagtgccagacgaacagcgttatttactgcaacggatccaaggcttccgccgatgacgaggatgactggcttgtcagcagaaaaatgacacagatccatagccgcgatcctgtttccggataatagttcctgacggatcggagaacctgttaatacggccttgtctttcggaagatgctccagagtctcaggaaagttacagcatacctttgtagcagatggaattgcgatcttgttggcaagtccgggtgtcatatcagattcgtgaatgatcgtcggaactttattgtgtttgccggcaagtacgacaggaacagatacaaatccgcctttggaaaagatcacatccggctgaagttctttgatcagtctctttgcttcaccgaatcctttcaatacgcggaatggatcggtaaagttctgaacactgaaatagcggcgcagtttaccggaagagattccgtggtaagggatgccgaatggctcgatgagctctttttcgattccctgataagagccaatatactgaatatcgtatccgagttccaaaagacgtggaatcagagcgatattgggggtaacatgaccggcggttccacctccggtaagtatgattcgtttcatataaaaacctccagaaaaaatgtgttagttagtcggctgcaacgaaaatagccgaggaaaacatataatttcatattaaccttatttagtgaaatgtcaagacaaaagtaggaaccataaatagaatcgtgtaaggggtagaacgatgaaaaaaaagaacgtgctttcacttcatgaagaaacagaaaaagaagcggcaaaaatcgaaaaagagattctgaaagactccaaactggaagaaatcaaagtctctgatgaaatggaaaaaaggctggcagagcagatacaggcatatgaaaagacacaaagtcaaaagaaagtgcatcggcacagtccacttttcagaagaagagtgatggtggctgccgcagtgctgatgatcgcggctgttgcaacaagtgtgactgcggtggggagtaaatcttatctcaaggagatcattgagaagtttacaggggaagaagaacaggcatcggtgatcaatgtggaggatatggatacgcaggcaagtgagagtgcggatgagacacaggtgtatcgggagatagaaaaagagctgggaatccaagccgtgagaattcagtataagcctaaaggaatgaggctacagaaatatactcttgataaggcacaaaaaagagtacagatgttttatgaatatcagggagaggtagtttggtactccatttatatgaatgcagaggattcgtctcttggacagaaagaatccgatgagaacgtagacgagtttgtagtagaaaataatggaaaagagatagatgttatagaaaacgatgtagaaggatatgaaatgcatcgatatattgggaaatttgaagattatggtgttcattatcaacttagaggaatcatggaaaaaaaagaatttgaaaaaattttaaaaaatttaaaatttttttgaaaaaacgcgtcagtttttccaagttcgattgtttacttaatagagggggaaggagagagttatgagaattagaaaaaaaatgctgtctgtattctgtgcggcaatgttactgggagtgatcacatcagtcacagtccctcaggtgcaggcatcagatgagcagacgaaaaaggtggatggttcctatctaaccatgcaggagagtgcatcgggtacaagtcagaatgaagatacaaaaggccagtacatcatgttaggagaatgttccgttacaaaagcagggcgtaaccgaatctatgtatattcaggaacaacggctaatcgaacagtaaattttgtttctacaattatatatgtggatcagtacaatgaaaaagatgacgcttgggatcaaattgatgcttggagcaaagatgcagagaatgactattttgtgagcacttcgaaatacataagtgtggatccggggtattactatcgggtacgagcagagcatttcgcaggtatgcagtatccatatgagagtacatattcctttacagacggaattatgatcaaatagccaatcacttaccttttataattccatagtctctgagtggttgaagcagccgtcatagtatgatgcaactataaaataaattataagagcctgtacgaaaacaccacaatgaacagacatgcttatgacggctgcttcaaccactcagggatacaaaatcatattgatatgaaataagaacagcaatcggaattactttccgattgctgtttttaatgcttgtgcgagctgatccgggcaggaagttgccttgaatccgcagcggattccttctactctgtcaatgacttcctgaacatccattccttctacaaggcgcgcaattccctgaagattgccgttacatcctccgataaagtgtacattttttactttattgtcttcgatatcaaattcgatgttctgagaacagactccagttggtttgtaatgcataatatcagacctccaattaaaaaattcatttgtatgttatcagaagaattataacagacctgttttagaaattccagaggaagtttattcactttcgtatgtcaggattcgagtgtttttgtggaaaaacgacaacatctgaaagtggactgtggataactttcaaaaacgctcacgccttgaaaatcaagggaaaggtgaagtttaaaaggggaaaaatccaagcgggaaatcagagaaaagaagcatggaaacagaccgaatgtagaattatgtagaacggttttgcgggcatcctggggagacttgttttataatggccacaggcacacaattgaacgaattgtgaaaaagaccataaacaggaggtttaactatgtggaaagaagcagtagcggagacaggcatcatattttatctgatgctgggagtaggaattgttgggatacttgcaaaggtaatgaattatgtgactttgcgtaagctggtgaatgcggccgggagtatgtcaaagagtacacacaaactgatgaagcttgttcgtgcaaaatacgaacatgcctgtatggtacatgacagagtagaaaatgtgaatgcatttgtagaaaaatacatttatgagtacagagggtttttcctgaaaatacatacctggagacagatccagattcagtcgatctggtttgcgggaattctggcggcgattggagctgtgggacatttcatggcgcatggattttgtgagcaggtgtatcagtatggtgcgcttggggtagcagagatggtagcgttgtttgtaatcagccagctttccgatgaatcgtataaaatcgaggcggcggagaattacatggtggattatctggaaaatgtgtgtgcgcaccgatacaaacgaatgcgtaaaaatgaaaaaaatctggaggtaatccgtacggaggcaggagaatcccagaaattatccggcgcccagaaagcatcgcagagagcggcggctgtagtgaagaaacaggatgaggagcttgccatcaatatagaagaagaaccgaagaaattcaagaaagaactggagaagacgatggaaaaagaggatctggaagaaccggcgctcaaagaagatgcgattcgtcagattttggaagaattccttgcctaacaaagtcagatttgataaaatgagcttgtaaatgatacctgttcgggcattctggaatggatgctgaatgggtggactttgtccaataaagtagagaagttagagaggaaggataaacgatggctaacaaagtaacatttgattattcaaaagcagctggttttgttcaggagcatgaaatggcatatatgagcgagcttgtggcacaggcaaaagagaagcttgtggcaaagagcggagcaggaaatgattttcttggatggatcgatcttccggttgattatgataaagaagagtttgtacgtattcagaaagcagcagaaaagatcagaaaagattcagaagtacttcttgtgatcggaatcggcggatcttatctcggagcgagagctgccattgaatttctgggacattctttcgcaaatgtggtatccaaagagatcagaaaatctccggagatctactatgtaggaaacagcatcagcagtacatatatcaaacatctgatcgatgtagtgggagacagagatttttctatcaacatgatctcaaaatccggaacaacaacagagccggccattgccttccgtgtatttaaagagattctggaaaagaaatacggaaaagaagaagcagcaaagagaatttatgcaacaactgacaaagcaaaaggtgcactgaagaaccttgcaacagaagagggatacgagacatttgtagtaccggatgatgtaggaggacgtttctctgtactgacagcagttggtctgcttccgatcgcagtaagtggtgctgatatcgagaaactcatggaaggtgcagcagcaggaagaaaagaagctctggagaatgatttcgcagagaacggagcacttcagtatgctgcgatccgtaacattttgcttagaaaaggaaagacgatcgaagttctggcaaactatgagccaagccttcactatgtatctgagtggtggaaacagctttacggagagagcgaaggaaaagaccagaaaggaatcttcccggcatctgtagatctgacaactgatctgcactctatgggacagttcattcaggatggaaacagaatcctgtttgagacagttatgaatgtggagacatccaaagaagagatcatcatcaatgaagagcctgtagatctggatggactgaactatcttgcaggaaaaacagttgatttcatcaacaagagcgcgatgaacggaacaatccttgctcacacagatggtaatgtaccgaacctgatcgtgaacattccggaacagaacgaatactatctgggacagttattctacttcttcgaattcgcatgtggaatcagcggatatctgctcggtgtgaatccattcaatcagccgggagttgagagctataagaaaaatatgttcgcactccttggaaaacctggatttgaagcagagagagaagagctgttgaagagactgtaataggaaaagaataaagtaggacaagtagaaagcctccggcggggaagataagattctttccccagccgggggctttttcattgctgcattttaaaaattctgtttttatattcttttggagaaataccatattgttttgtaaaagctttgtaaaaaacggaataatcagaaaatccacatagttcaggcaatttttttaatggtgtctgactggaaattaaatttttagcttcgatcaggcggcgttgtgtaatataccgataaaggctcaaactgatctgtttactgaacaattgattgatagaagattcactgaccagaaagtgcgctgcgattcgtttcgcacttaattcttcggaaagatgattttctataaagtgaatgatctcgtccaaaagaatggttttttccggctttagaggatttatttcatgagaatttaaaaattgatgaaataaagtaacgatttgcgcagacaaaccaatcttatagagttctgcacccgaaaaatcaggaggaatgtttaacattttttcgtaaagttcttctacctgatatagaatatttccggatagaaggaatacattttgcggtagcaaacaggacgatttttcgattggatcattgttcaaaaggttcatatattgatgatagattttattgctgatccacatcacagttctgcggtaaggttctgaaagctgttccagataaagcggacagtggctgacaccgggaggaatgcatacaatggaatttttaaccagctgataacgggtattgccgaccatatattgtaaagaaccactttgacaaaataaaatttcaaaaaaagtatggctgtgtaaatctacattgtctttcgagtaactgatatcttcatgtacatccacatagtcgctgtccatttctaattcctgataagtaatggaatcgatggaaaatgtggggtcatttaataataatttagcttcgtgaagtttcataaaaatcctctcatgtttttgtgcaaataatataaaacgataaaattaaatattagatttgcaatgtaatttgatgaatttgcaatataaattgcaattattataacttataattaggataacacaaatcacgtgaattgaaaagaaaaagaaaagaggacaagcaggatgaacaaaaaacaaattcgcccgttcggggtgaaggatgaaatcgggtatgtatttggagacatggcgggcagctttgtaaatttatttgtagatgcatattttctgattttttgtaccaatgtattgggaatcagcgcaggatggatgggaacgttatttttagtggccagattatgggatgcgatcaatgatccgattatgggatctttcccagatcgttggatgattggaaagtccggagataaattcaaaccatggattaagatttttatgcttccactggcattatctggtgtgctttgcttttttaatgttccattggaagggattgcacttcatgcgtatgtagcatttgcatatgtgctgtatggaatgagctatacaggaacttccatgtcatttggtgcgatggcaagtgtagtaagtgatgatccgattcagagaagtaaactctccagagcaagaagtatcggcggaacgattgtaggaatcgtagggctttcaattgttccggttgtctgctttgacaagcagagcaatattcttccggaacgttttacactaatcgcggtaatcttcggtgttttaagtattatcagctattttgttctgctgaattttacacaggagcgtattcgacagaattctgaaaaagcagagaaatttaattatggaaaagtattaaaagcaaccgtacacaacagaccattgatcggagttatggtggcaacattaggaagtatgctctttatcactggatcaaaccaggtaagaagctacatttttaaagagtactatgcaagaacagatgtaatgtctattatcagtcttgcgacaatcccgattttggtgatctgtttcccattggttccgaaattggtagcaaagtttggaaaaaaagcaactttaatggcagccattgtttccagtacaatctttagtgtcatcccggttgtcatggaaattaaaaatgtatatatttattctgcattggttgtgttgggaacgattggacagacggtatttacaatgttgatctgggcgcttgttacagactgtctggattacagcgaatggaaatttaatgaaagaagcgatggttctatgtattctttatatacatttagtagaaaaataggttcgaccattgcctctacaggagtttctttcggattagcagcaatcggatttgtttccggttccaatgtagtacagacagcggaagcagtgaatggaatttatttcctggtcaatatcattccagtggtaacttgcgctttagagttgattggagtagggctgatctttaatttgaataaagagactacagaacagatgtatgcagaattaaaggcaaaataaagtacagaaaatgaggctgagtatgctatgaaaaaaatagatattcatttacatgcagcgctaaatccggttccgggaacagaaaaattcaggatatcaacaggcgaagaaatgcttgctcatctggaagagcttcagattgaaaaagcggttgttatgtcatccggagagacagaaggagcaatggcttctgtctccggaaaccagaaatgtagagagctggccagaagatttccggataaatatgtatggatgtgtaatctggatgaaaattgtgaagaaaccattgaagagaggctcagggaatatcaaaggcagggagcggcagggattggtgaatttatgatctgcagaaaaataaaccatccgtttattcaggctgtatttcaggcggcggaaaaactgggaatgccaatcctgtttcatatgagtccgcaggagggatatgaatatggcattgtcgatgaaccgggactgccgatgttggaagaagctttagaaaaatatcccagattaaaatttataggacacagtcagccgttctggcatgaaatcagtcaggatgcgaagccggatctgaaatctcgaatggaatggggaaaaggtcctgtcaaggaaggcggcagattggtctgtcttatgagaaattataaaaatttatatgcagatctgtctgcaaacagtggcggatgtgctattatgagagatgaaaagtttggtttacaatttttggaagaatttcaggatcgtctgatgtttggcaccgatatggtaaatacagatatggtatttccattgggagaatggctggacagacaatatcaggaaggaaaattatctgtacaggcctacagaaaaatttgttttgagaatgccaaaaagatatttcagttataagaggaaaggtgaaaaatgagaacaagaattataccgaagatgttgaatgatgaagtggaagaatatcttacacgaaatgatattgtgatcgttccggtcggaactgtggaaatgcacgggggatttcctctggattcggaaaccgtagtcagtgaagcgtttgcacttaaaatggcggaggcatgtgacggacttgtattaactggccttccatatttttatgcaggagcgactgcaagtggaagaggaacggttcaggtcagcattcaggaaggaattcgttatctgacaggaattgcggaaagtcttttacgccagggatttaaaagacagatttatatcagtgcacatggtccggcacatatgacagtgagtccgatggtaagagattttatggataaaacaggaactccgatcctgtatatggatatgatcatgcagctgatgagaaatggacaggatgtttttaaatctgcagatacattccatgcaattacggtgggcgcttatgatatgctgggcagattggaagatgtaccgctgactacaaaatatgagcatcaggagaagcagagctgtgcggagtttgatgatgtattcgcattggcatatcaaagtggttccatcggatattattttggaaatccgaaagaccacatgagtacaccgtcaattcctacagaagaaagacgcaaagaactggcggaagaaggaaaagaaacaattcaggttcttgtggaacggatgaatgtgcctcatattgcagaacagatgaaaaatctggaagcatataatcaggaaattgcaaaacgctgtccgtgggttccttttgcgcagtagtcatagtaaggaatctataacgtagtaggaaaagaatggggtgttgcatagaaaaattatgaattttttagaagtgtggaaagaaaataaacatcgtaagcctctttaatgcagcgttttatatctaacaggcggcggatgtctgggtggtgtagagattaactagacaaaaagttcttttctttttgttgccctcgtagaaaaagtatagtaagataccctcagaggagttgatgaattatgttatactggattattatcggggtattgatcgtagggattattgcggtaattttctttacagtttcaaaattattgaaagagaaaaaagactataatcagtttgaacgcagatatcattcacgggaagacgattatgatgatgactacgatgacgatgacgacgaagaggatgattatgaaccagagccaagacgccgtccggcgagacagcagtcagaatgccgtacatcttcagcaccggcgaagcgccgctggaagattgtgttggaggatgtggaccagcaggatcagtacagttttatcttctatgattcattgggaatcggaagagtcagtgcatcgtcagattatgacaagtttctttcattaccggaagatctgagagtatcaaaggtacactgcgcgatcatccgaagtggggataagctgtacttgagagatgaaggttcaaaaaaccatacatatttgaatggaaaacagattcataagccaatcgtgatccagaaagaagatgtgattacggtcggggagaccagactggaggttgtaaaaattctgcgggagacaagataatcccgcagaatttttttgcaattccctctttaacatgctaaaatgataaacagttagtgaaattattggaaagacaaaggaggttaccatgattaaattatatgataacggtgtgtacttgttaaacggcacagaaatcctggaagatacgggaaatgtgtcacttcctgtctcgaaagaagaggctgcaaagaatacgattgcctatggaatcctggacagtcataatacttcaggcaatatggaacgcctgcagattaaatttgataaattgacatcccacgatattacgtttgtgggaattattcagacggcaagagcttccggattggaaaaatttccggtaccgtatgttttgacaaactgtcataacagtctctgtgcggttggaggaacgatcaatgaggatgaccatatgtttgggcttacctgtgcgaaaaagtacggtggtgtgtatgttccgcctcatcaggcagtcatccatcagtttgcaagagaggttcttgcagagtgcggcaagatgatccttggttctgacagccatacccgctacggagcattgggaaccatggcaatgggagaaggcggaccggagcttgtaaaacagcttttgaataagacatatgacatcaagaaaccagaagtgatcggaatctatctggatggagaaccggcaaaaggagtcggcccacaggacgttgcactggcgatcattggagccacatttgcaaatggctatgtaaataacaaagtcatggaatttgtgggacctggagtttc

SEQ ID NO: 6992 - DNA, 258 bp, Unknown
  gut microbiota DNA sequence
acagagacaacctgtctgtcttctatctggaaaacagatgaaaagatccaggaattctatgagatccatggaagaagcgagggatataaggagctgaatccgggagcagtgacttactatgatggaatggtttatgtcaatatgagcgagatcaagccaatgatcgcgatgccgttccacccaagcaatgtatatacgattgatgaagtgaatgcaaatctggcggatatcctccatgaagtggagaaaaaggctctg

SEQ ID NO: 6993 - DNA, 65915 bp, Unknown
  gut microbiota DNA sequence
ttgatgatcacagcagcggcaggaagaaattggatgaagtcagtcattcccggagggaaaaggaacgaacctatcgcggattcaacttttttgattcccgtgatctgtctgtactggaagccatcagcaaaggggaatacatgacattcgggatacaaggaaacccggcgtccagcattcttggcagcttccgtcttctcagaaacttcgagataaatggcttctgtcattttcccagaatgttgatggctttttttaatacatcaagcgcatcttgggcgtcacgtaattcacgtctgagacgagcgatttctttctgttcatcagaagcataattaccggaaccacgaacagagatatcgccagattcccggaaatctttcagccactttgttaaagtgctgtatccgattccgagattttccgcacatccacgtacacctaaatccttatgatcttcgtagtactggattgcatcaagtttaaactgtttgtcatgttgtcttgccatatgagatcctccttcagcatgtctctattgtaccatgcttatgtgtattttgggatttctcttttggcttgtactatttatattctaactcctgacgatgattcagaatataagtggatttataggaagcataaaaaggatttggtgtggatgcaatatttacatcggatgatatagtaccgctgggtttaatgctgcaggaatgtttttacgacaggttctgcttcggagagggattccattttagttgaaagagcggaagattgcagaatgaatcaataaagatgtagaaaaattacagaaaatcttaaaaaattcccatagattttgtttgaaatatactactatgtttatagcaatatgtgggatagaaatacacaaggaggtattttgatgaaagatatagcaagtatactttcaaaagtagatgcagaagaaatgctgacaaaagaggatgcagtgacattgctcaatatagacaatcagtcgaaagtattttatgagctgattgcgaaagcaaatgaactttccagaaaagagtatggagacaaaggatacattttcgcgcagattggattaaacagtgagccttgttccggtaactgtggattgcggtagaattgcttgataaaatgaaaggctgtaaaaactttattttagcacccgaatgcgatatgccttatgatgttcctgtggaaaatgcaatcggagttgcacaggcagtttatgagacagattctgtaagagaaatgttaaagaactatgtggcagaagacgaagatattgaagtagagcttccggattatgagcacttagaaaaaccactggtagaggtatttactctggattctgcgacatgtgcggcatgtacctacatgatgggcgcagcaaatgaagtgaaaaagacatttggtgatgcgattgatatggtagagtataaatttacgctcaaagagaatatcgcaagatgtaaaaagatgggcgttccgaatctgccgtccatgtacatcaatggtgaattgaaattccgttctctggtaccatctaaagaagaattggaaggcgcgatccgtgcggcaatgaaataatgagtagactgtatttgatcaccgggtttctgggtgcaggaaagacaacatttttaaaacagtttatgaaacaattctcttcggaacggatgcatattattgtgaacgagtttggaaaagagggcattgatggagagctgctttcggagctggggattgcactggacgagattaacaatggctcgatcttttgctcgtgcaggctggataaatttgagaatgtattgcagcaggtattacaggagaagccggatgtgattatagtagaagcatcagggctctccgatcccacaaatgttaagaaaatattgaatcatagggaaaatttccaggattggaatatatgggatgcgtctgcctgctggatgcacggcaatttccgaaagtgtatgaaacggcagttgtagtaaaaaaaacagattcaggtatcagatctgctgcttctgaacaagaaggatcttgtaaaaacagaagagatagagcagattcaaaagattctgaaggcccatcgaccggatttgccgttgcatatgacatcatatggcatgatggaagagaggtggctgcaggagatgcaaaagccaaatctggaaacagaagaacagctgttgcaaactgcagatgtgattttgcgaaaatatcttctgcacattcaagaagagataaaattagaaacactttctcattttctgaatatgcttttagtggatacatttcgaatcaagggctttgtatatctggaagacacgtggtatctggtcaatgctgtaggaaatatgttgtatatcgaaccgtgtagtgagaaaaaagaaacgcagaaaaatatactggttattttatcaggatatggactgccaacgaagaaagcaatcaggaaagcaatggaatggtatccggaggttgttttaaaaattgaataagggaaattcaccaaatcaccactttaccttaaaaaagtacttgacaaatcctaaataggacattacaattaaaaacatcaaaagcaaaaccgatgagaaagaagagtaggttttaaaagagatcacagagagcagcaggcggtgagattgctgtatggattttaattctgaatggactttcgagggcggcctgaaatgaaaagagtaggcgtcgtcgggaaccgaacccgttatcaatcaggagcgtatgtcagtacgtgagaaagtggacatttgtcaatttgagtggtaccgcgataatgaatttgtatttattaccgtctcaagcatatagcttggggcggtttttttatacgatcattgcagagcatccaccctgtatccacatgatcggctcctttgcttttggaatatagtaatagaaaaggagaaccaaattatgaaaaagagagtattcgcagttattttaggaagtgtaatggcagtcagcctgatggcatgtggaacaaaggaaaatgagacaaaagatggtaccaaaacatatacagtagggatttcccagtttgcagagcatgcctctttggacaactgcagagagggatttattgaaggactcaaagaagccggatttgaggaaggaaagaatcttacgatcaaagaggagaatgcggcggccgatcagggaacagcaaagcagatcagtgatggatttgtttcagacgatgtggatctgatctgtggaatcgccactccaagcgcgcaggcggcatacaattcagcaatgaatacagagattccggtaatctatacagcagtgacagatccaaaagcagcaaagcttgcaaatgacgatggagctccggtgggagaggtcacaggaaccagtgatgagcttccgatcaaagagcagctggagatgatccgcgagatgctgccggatgcagagaagatcgggatcctctatacaacaagtgaagtgaactctgtatcagcaattgagaaatatgaagagctggcaggagattacggatttacgattgtgaaaaaaggtgtgacgcagacagcagatatttcgctggcaacagaagagattttatccgaggtggactgtctgacaaatctgacggacaatacggttgtaaattctctggcaacgattcttgacaaagccaatgaaaagaaaatcccggtgtttggaagcgagattgaacaggtgaaactgggatgtctggcagcagaggggttggattatgtggcgcttggaaaacagaccggaaagatggcagcagagattttaaaaggagagaagacggcgtctgagatgaactatgagacgatttctgaacctggactttatatcaatacaaaggcagcagaagaactgggagttacggtagacgagacactgcttgaaggtgcagcggaaacgtttgacagtatttcaaagtaaaaagtagaaacggagaggaattgagatggacatttttgtaacgattttggaacagggactgatttacggaatccttgctcttggagtttatatcacatataaaattctggattttccggatctgacagtggatggaagttttccgctgggggctgcagtgacggcgacaatgatcacacagggagtgaatccgtacctgaccataccggtctcttttctggcaggagcagcagccggaatctgtacaggattgatccatgtcaaaggaaaggtcagggatctcctctccggtatcattatgatgactgcgctgtggacgatcaatctcaggattgcagggaaagcaaatgttccgatttttggagaagagaatattttcgacaatgagacaatgaatgggattttctcaggcggggcagcgaaatataaagttcttgcagtagtacttattcttgcagtgatcgtgaaaataattctggatctgtatctgcagacaaaatccggatttcttctgagggctgtgggagataatgcaaatcttgtgacttcccttgcaaaggatcagggaaatgtaaagattttaggactggcgatcgccaacggaatggttgctatggcaggcggaattttctgtcaggagcagagagtatttgagatttccagcggtacaggagctatcgtgatcgggctggcaagcgtgatcatcggaaccagcctgtttaagaatctgacatttttgaaagcaaccacagcagttctgatcggttctgtcgtttacaaagcctgcgtggcagttgctttgaagttttttgaaccacaggatatgaagctgatcacagcggtattattcctcgcgatcttactcattggaatggaacggaaaaagaaggtgaagacaaatgcttgagttaaaacatattcataaatattataatccaggaacagtcaatgaaatgtgtctgtttgaagattttaatctgacagtagaacagggagattttgtttctgtggtaggaagcaacggctccggaaagacttccatgcttaatatcctgtgcggcagtattccggtagaagcaggacagattctgatgcatggggaagatatttcccgcatgaaagagtataaaagaaaccggaagatcggaagagtgtatcagaatccggcgcttggaacctgtccttccatgacaattctggaaaatatgtctcttgcagacaacaaaggcagtttttacggattgagaaaaggaattaataaaaacagaaagtctcattatcaggagctattaagccagttgaatctgggactggaaaataagctgaatgtaaaagtcggttctctctccggcgggcagcgtcaggcaatggcacttctgatgtcaaccatgacaccgatcgattttctgatcctggatgagcacacagcggcgctggatccaaagacggcagatctgatcatggaactgacagataagatcgtgaaacagaaaaacctgacaacgatcatggtgacacataatctccgctatgcagtagaatatggaaacagactgttgatgatgcatcagggggaagcagtgatggatctgtcagcaaaagaaaaacaggaattgaaagtagaagatattttggaaaaattcaatgcaatcagtattgaatgtggaaattaagagaaagatagcaagtacagatgtaataagtcaaggaactgcattgtgtcagtcccttgacttttaaattttttgctattctacagattttaatgcgctgagcatatctaagtatttgagttttcgattcattatgtatcctagaataaatgtaatgactgcaatcaaaatggcaggaatcacaaatgcttttgcacaaagagcggggttaaacatcacttcatccggtggaacaactgccagtatgtactggtaaagcagatcaccgactccaaatcctgctaaaataccgagcagggaaaggagtattgtttcccggtaaatatagagtgttacttctttgtcgtagaatccgagaaccttaatggttgagagttcacggatacgctctgccacattgatgttggtaaggttataaaggacttaaaaagattcttttatacagaggcaatcgcgggcacattactggaatggatcgtgaacaaagaaaagcatgacaggcagcagacgatcgattatatttctgttattttccgtaccgggctgcctgctgccatcaggcaatattcagacgaggcaaaataagttttatgatttcaataatctgaaaaaacttcttgacaataaaaaatatcctccgtataatggttaaaagttagggaactaactatataaagagagagggatggaattatgcaggatatagaagataaggaaaggtacatcaataccggcaggctgattcacattctttccaatcagatgaagcgcagaaatgcgtctgaagcagtgggagatgatggcctgaccaccatgcagaagcatgtgttaaagcatattcttttggaaacgatgcacagggaagtatatcagaaagatatagaagaagagtttcaaatccggaagtccacagccacagggattttgcagctcatggaaaaaaatggatttatttcccgggaaagttcgaaaaaggatgccagattaaaacgtattgtaccgaccccaaaagcagaagcactcagacctgagattctggagcacatcagagatacggaaaagcggctgatacaagggatagatcaggaagatgtaaagatttgcagaaaggtgcttgtgcagatgattcaaaatcttgcagaaaacaaaaaagaaaataaggaggaagacgagaacgatgaataaaacacttttaaaatcagtccgggaatacaaaaagcagtctgtgttggctccatttttcgtaatcctggaagttttaatggaagttctgattccgatggagatggcgaagatcattgatgttggaatcatgcagggaaatttgagctatatcgtacggcggggattgattctggtcattatggctatgctggctctgtatttcggtattatagcaggaaaaatggcagcaacagcaggtgcaggatatgccaaaaacctgagacatgatattttttataaagtacaggaattttcattcaaaaatattgaccggttttccacatccggtcttgtaacacgtatgacaacagatattaccaacgtacagatggcatatatgatgagcattcgtctgttggcgagagctccgatcatgattgttttatcctggatcatgacacttttgatcaataagaaaattgctttgctgttcctgatcatcataccgctgcttggaggaacactgatctttattgcaaagaaagcgcatccacattttatcaaagtatttgatgagtatgatattctgaataattccgtacaggaaaatgtcaatgcatcccgcgtggtaaaagcctttgtacgggaagatcatgaaattgaaaaattccatggaatttcaaaatatgtctatacattatttacaaaagcagaaaagatcgtggcatggaactcaccggttatgcagtttacgatctatacggcgatgcttctgatggtagcgatcggaggaagagaaattgtattcggtgcgatggaaatcggagaaatgaccagtgtgatcgtgtatgcgttccagatcatgatggctctgatgatggttacatttgtatttgttatgatcatgatcgcagaagcgtctacagaccgtattacggaagttctgacggaagttccggagatgcaggacaaaaagaatgcggttacagaagtggcagacggagagatccggtttgagcatgtagatttcagttatgcgggagaaggcggaaatctttcgttaaaagatgtcaatcttcatattaaatccggacagacgatcgggatcatcggaggaaccggaagtgcgaaatcaacattggtacagctgatcccgagactttatgacgtgacaaaaggaactgtaaaagtcggcggactggatgtcagagagtataatctggaggcactgcgcgatcaggtatctatggtattgcagaaaaacgttctctttacaggaacgatttacgataatatccgctggggaaatgaacatgccagcgaggaagaggttcagagagtctgcaaacttgcacaggcagatggattcgtaaaagaatttccggcaggttatcatacgatgatcgtgcagggcggaaacaatgtttccggcggacagaagcagcgtctgtgtattgcacgggcacttctgaaaaaaccgaagattctgattctggatgactccacaagtgcggtagatacaaagacagatgcgctgattcgaaaagcattccgggaagaaattccggatactacaaagatcatcattgcgcagcgagtttcttctatagaaaatgcagaccagatcattgtactggatgaaggaaagatcatgggagtcggcacatccgaagaattgcttgcgacaaatgaaatctacagagaagtatatgaatctcaggtaaagggaggtgaggacgatgaatagaaaaccaaaggtttcaaaagaaaatttacagaccgcaaagcggcttttaaaatatgtgaccggaacgtacaaggttcggtttgtgatcgtatttatctgtattttgttaagttcgatcgcatcaatttcggtatcattgtccctcaagtttttaatcgatgattttatcagtcctctgatcggacagaaagatccgaattttgcagaactatatcgggcacttgcggtgcttggaagcattttcctgatgggagtcattgctacatttacttatacacgactgatggtctacattggtcagggtgttcttaaaaaagtaagggatgatatgtttgaacatatgcagactcttccaatccgttattttgaccagaatacgaatggttctatcatgagtctttacacgaatgatacagatacgctcagacagatgatcagtcagtcgatcccacaggcactgatgtccttttttacgattatcgtaacctttatttcaatgctgatcttaagtccgctgcttacaattttagcagttctgatcattggtcttatgatcttcgtaacaaaaaagatcggtggaaacagtggaaaatattttgttcgtcagcagaaatctctggcagatgtgactggatttgtggaagagagaatgaacggacagcgcgtagtaaaagtgttcaaccacgaaagaaagtcagaagaagaatttgacaaactcaacgaggcgctctttgaaagtgctgcacaggcaaatacctttgcaaatatgatgggaccggtaatcggaaacatcggaaacctgcagtttgtactggtctctgtacttggaggattcctttctattatgggaagcggagggatcactctgggagttatggcatcttatctgcagtttacaaagagctttacacagccgtttatgcaggtggcgcagcagtttaactccattgttatggcacttgccggagcagagcgtatttttgctctgatcgatgaagaatcggaaaaagacgagggatacgtaacactggtcaatgcgaaaaaagacgagaacggcaatattatcgaatgcaaagaaagaaccggaatgtgggcctggaagcatccacattcggcagacggaagtgtgtcttatacagaactgaccggagatgtgcgttttgaagatgtgacatttggatacaacgaagataaagtgatcttaaaagatatcagtctgtttgcaaaaccgggacagaagctggcatttgtcggttctaccggagcaggaaaaacaaccatcacgaacctgatcaatcgcttttacgatattcaggaaggaaagatccggtatgacggaatcaatattacaaagattaaaaaggatgatctgagacgttccctcggaattgtactgcaggatacccatttgtttacaggaaccattatggataatatccgttatggaaaactggatgctactgatgaggaagtatacgaggctgcaaaactggctcatgcagatcagtttatcaaaatgcttccgaagggatacgacactatgttaagcggtgatggagaagagctttcacagggacagagacagcttctttccattgcgagagcagcagttgcaaatccgccggtactgattctggatgaagcaacttccagcattgatacccgtacggagagtattgtgcagaagggtatggataacctgatgaaaggacgtacagtatttgttatcgcgcacagactttctacgattcgcaacagtgatgcgattattgttctggaacacggaaagatcatcgagcgtggagatcatgcggatctgatcaaaatgaaaggaacgtattaccagttatataccggaaaactggagctttcataaaaatttactgtgaatggcagaccataaagcggatggagttttcttacagaaagtgtaagtgtttttcatccacgatacggcttataatattcttatcacgaaagggagggatattatgagccgtactattttggaaatagaatcgttgtacaaaacatatggggaaaaggagaatgcagcagaggcactcagaggaatctcgtttcaagtatatcagggagaattcctcggaattatgggaagcagcggttcgggaaaaacgacgctgttaaattgtattgcttcggttttaagacctacacgaggtaggattcttctgaaaggacaggatatcggaatgtatacggatgctcagctggcagcgtatcggggaagacagatcgggtatctgtttcagcagtttgaattgctggataatctgacgggtggagaaaatattcttttgccggcacagattcacaaaatgccggaaaaggaaagcagaaaaaggatgcagaagctggcggaatattttgagatcgaggaggtgctggaaaagtttccgaatcagatgtccggaggacagaagcagagggtagccgcattaagagcgcttcttttgcatccgcagatcgtactggcagatgagccgaccggtgcgcttgacagccgaagtgcacgaagtctgatggagcaactctccggagtgaatcgagaggatgaggctgcggttctgatggtgacacatgacgcacaggctgcgagtttttgttccagaattttgtttattcaggatggaaaagtatttcatgaattacggaagcgagtcggggaggagacaaaccgggaattttatgagcgcattttgtccgtgatggcgcagttgggaggaggaagcaattatgttctctgaactgatcagacgaaacagtaaacgaaaccggcaggaaaacacgctgtattttgttacgatgattctcacggtggcggcattttatattatccttgcgctggatcatcaggatgtgatgatctttctgaaagagatggagagagatgctgtaaacaagctgctgatgctgattccgattttatatgtggtatctctgtgcctgctttatttcctggtatattttacggataagtatcagatggaacagcgaagtcatgagtttggaacctatgtgatgcttggtatgaagaaaagaagtctgtttcagatgctttttctggaagatctgcgaaatattgtgtatgcgcttgtgatcgggatcccgggggcgctgctgatctcggaacttacaagcctgattacggcgaagcttgcaggatttggaattctgcgtcatcagtttacattttccggttcggctgcattgtggacagttattgggatttgcggaattaaaatgcttgcccggtttgtgctttgcatcaagctttggaaaaaagaggtttatgaattgttatcccgtgaacagaaagaaaaacagcgtgcattttcgcccataaaaacgtgtgtgaagctgatgatgggaatcattcttctggcagtagcctatgggatcggatgcgggatactgagttcggaacttgggataaaacgaatgtttcgtatgactgcaattttatgtttttgtggagtactcggtacattctttttctttcagggcctggcatatctatttgataggatatgcagaaaacttccagggaaaaagctctggacatttacatgccgtcagctgcaggaagcggtatttttaaaatcatcttcgttggcaatttcttcccttctgattctgtttgcgatcatatgttgttcctatggagtcgggatgagtgggcaactgggacaacaggatacggcagggattgattttacatttgacgagaaaaaagaaacgttagaagaagtgctgtcatctcagaaagtagaccaatatttttccaatctgtttgaagtacgaaatggattactttggacagatctggattttacggaaggtatggaggagcgaaaagtatatgcatatgactgtgaggaattatatgagcgtctgaaaaacagattgaatccatattcttgggaagaatccccatttttgatcgcagaatcagggtacaatgagattttgcgttcaaaaggaatggaacctttgaacttaaaggaacatcagatggcaatttacgggcaccccacatatttgtcggatgagactgcaaagagcgtagagaaacttctgaaagagaaagtctttgtgcagatagaagagaccgattatgaaatcattccaagagtatgcaatgacaatctggtggcagaccagatgttgacgattatgtatggttttattgtaccggatgaggtttttgatgtctttgtagcagacggaagctattcttactggaacgggattcttgatccggttctggtaaaggaggaaggattgctcaaagcagtgatgtctgtcaatgaccgtctaaaaacaaccgatctgcattatgaaagttatctgggaacagccggacggcatatgttttatcaggtggcattgggatatacgatgatctatctggctgtgatttttttgattatcgcaaatacactcattggagttcagtttttaattcagcaggagaagaccggggcacgctacagcgttctgcttacactgggaagtaactacaaagagctctgtcattgtgcgaaagttcagatctggtggcactatggactggtattgagcgttgcatttttcagtagtgtgtttggggtctggacattgttccggctgattggacaggtgcaggaagtaaaagttttctggcagatggcaggaagtgtgtttcttttcttgtgtctgatagaaacagcttatataataggagttataaagacaagcaatcgcaggattttgaaatttattcagagaaaacggcaggagtagaagacaggcatgcaaaaaatcatgatcgtagaagacgatgaattccttcgggaagaactggaaaatatttatcataaggcaggctatgaggtatgctgtgtaacggattttccagaaaccggtgctgtctgtgaggcagagcatccggatttgttagtgctggatctgggacttccgggaatcagtggatttgcactttgtaaagaaatacgaaagaaaggcagccttcctattcttgtgctgacctccagggataaaatgcaggatgagttgaaagcactggagctgggagctgacgaatatctgacgaagccgtgtcataaagaccgtctgctggcaaggacagaaaatctgctgaaacgggcaatggggaatgcacatttactggatggagacgattttctttttgataccagaacctatacggtctgtcaggggaaagatgcctgtcatattccggaaaatcaggggaagatcttaaaaattcttttggaatatgcaggaacagaggtgaaaaaagaatgcatttcaaaggtattgtggggaacaaccgaatacattgatgaaaatgcgcttcaagtcaatgtgacaaggctgaaaaagacattaaaagcgcttggtctggagaatcggatagaaacaatccgtggcagaggatatcggtggaagagagagcagtaatatggaatatatcagacgaatctggagcgagatcaaagaagaaaaaatatggtttgtgatccttatgtgtacagaactggtatcgctattctttctgtggctgtcggggatagagcagttcaaagttctggcaggactggaaaccagttgttttgtaattattttcttgtatgcagtaatctggaacgtaaggaaagagcagaaaaagaaagagcggtttcttacatttctggcggatccgagtgaagaaaatgagagacttgcgatcgggggagcaggaaatgaagaacaggaaatcctgcgggagatcggggtatatcttcgaaaagcatacaggcaggctgatgcagggaggatacaggaagaagaatatgaacggtatgtagaattatggacacatgaagtgaaaattccattatctctttttacacttttgcttgagaacagaagtgaggagatgtcaccgacagtatacaaaaaaatggagcatgtcagactgcagatgcagtcctatgtagagcagatgttatattatgccagggttaaagcagtgaataaagagtatttgtttgaagagataagtctggaagaatgctgccgggaggtgctggatgaataccgtctgtatctggaagaaaagcagatcctggtgcagttggatctgaaagagaaaaccgtactgtcagaccggaaaagtctgtgttttatgctcagtcagctgatcgcgaattccatcaaatacacaggatatgaagccgaaaagtgtccgaagctgaaaatcagttccggaaatgagaacaacagagtcagcctttctgtctgcgacaatgggtgtggcgtaaaaccatatgaactccgctatctttttgaaaaaggatttacaggagagaacagccagaaaaaatcgacagggatgggattgtatctggtacggcagatcggacaggaattaaagatagaagtagaagcagtgtcggtctacggaaaaggaatggaaatcagactctggtttccggtggtgtagggcagttccatgtggaactgctctgttactgtggcttgcagagttattgtttacagtaactttttacaggatatttatggaaatttaattgtatcctgatcaaaattcaagtataataaaaccaatcttgaaaggagtccctttcaattttcaaatatggcaaagaattgccattcaaaagttattcccagataaagagtaaagagatggataaaagaatagagggagtttgtctgtatttgcgattgtgaaacatcgcgtcaaaagatataataaaatcaacgatatagatacatactcgccgaaatattctggtttccatcagaacaaaggaggagtgtgtatgaagaaagaaaaaacaacacaatttttaatgaagccaaaggtagatttctgttttaaagaactgatgcaagatgaagaggtgcgcaatgcatttctggcagcagtacttgggatcaatctggaagaaatcgttgagagcaggattttgccgtcccacctgcgtcagaaagacaaagatgataaactggggattctggatgtacgggtattgctaaataataaggagcagatcgatattgaaatccaggtgacatccagtgaatactgggtagaacgtaccttgttctatctgggaaagatgtttgtggatcagctaaaaccgggagaagactatcaaaaattagaaaaatgtattcatgtcgggattttaaattttacattgtttgatgatgaagaatactattcccgctttcatttctggtcggatcagggaagaaagatgtatagtgataagtatgaaatccatacgctggaacttcccaagctggcaaaacatgagtatccggagacagagctgctgaaatggcttcagtttatcaatgcagagaccaaggaggaatttgaaatggcagcggaaaaaagcgaatatattaagaaggcgtatgaggatttgaaccggatcagcgcagatgaagaaaagcgtctggaatatgaagcaagagagcgtgcgattcgagatcaccagtatttttctactgtttacaaagagactgggcttagagagggacgaaaagaaggcctaaaaataggccgacaagagggtctgcaagaggggagacaagagggtctgcaagaggggcgacaggagggccggcaagaaggcatacaggccgtagtagagttgcttcaggaaatgggaatggagaaagaaattgtatgtgtaaaaattcaggaaagatttcagttttctctgtcagatgcagcgaaggaggtagaaaagtactggaaatcatagtagaagtcgtggaaagatattggaagggataatgccataagacatgaaaagcccacccttactttagcgagtcagggtgggcttattatatccttgagccaatggttcattattgcatacttacaggaatttcagcaactacaggaatcatgccaggagaagatggttcggcatatatttgatcaatggccacgtctaccgtcattgcatccgaaaatgtaccgtcttccagagcatttcgactgatctgatacaaaccgatataaaggctttttttacaatcgattgttacacattagataaaaacagaaagtaaaaagttgcaaaaataaaaaaatcgctgtaaaacaacttttactcagtcattttacagcgattcaatttcatattagtcacggaacatcttcatgcccatccattgctgcatatgatccagcatcttttcatccggatcgatcaggatacagctcatcgtctgttcagccgggattacaatggcataagtaccttcgcctgtacctgcggaaaaatcttttgtcttgtctgcgtgtacagaatcaagacggtgagaattttttggcgcaatgatctcagcctgctggatatccagagtcatgagttttttgcgttttgatttactgtaaatagcgtcaatttccagatcgtggttcaaaagtgtatactcatattctacatcgagtttcggaaatacaaagtagtaaatcagaactccgagaagaatcgtaacgagaactgccagagaaccgataaaaagcatacctccgcaaagcacgactacgagagcggcaatgcacaaaatacggatcacgaggtccataggtcgggatttacgagtaactaattgttcataaagtgcgtcattcatgtggtatattcctttcagtatataaataattcattaccatagaggcgatcttaaatgtcatggcatcttcaaactggcgaagatccagaccggtccgcttttcaatctgctccagacgatagattaaagtattgcggtgcatatgcagctgccgggaggtctctgcgatatttaagttattctgtagaaacttattaacggttgcagtggtttcttcatccagtgcctgtggaatctcctctccgaaaatttcatgaagaaaattctcacacaacgaagttggaagacggtagatcagacgtccgattccaagtcggttatatggaaataccgtctgttcggaatagaacagcttaccgactttcagtgcaagacttgtctcacgaaaagcagtggagagatccagcagattatgcagagtcttgctgtacgaaacacggacacgtgccagagcttccgcgtttacggtatccacgatcatgcgggcagtaagatgtacagtttcctgtgaagaatctgccagagatctgacaggacagagaatggcacaggaagcttctgtcagcggaattcgaaatgctcctgactgggatggaaagagattctttaaaatctcggaaatatcttcgtccaggctgtgagaagtctccagaagataaaggatacgcggctcttccggagcaatgtgaagacgggcagcccggtcatatacattatatgtagggatgctgtctgtcatcaggctctgaagaaaatgaatcttgttatacttttctttgtatgcggaggaaaggagctttaactgctccagcgcttttgtcacttcttcttctgtttctgcgtgaatctccatagaaattccggtaatatgtctgaggtctgtcaatgctttctctaattctgctgtatgattcatagtgtttctcccggtagacagagaaggagctgcacaatcgtacagccccctgtcatttttagttataactattttaaaacattagtttgtaatcgtcaactctgtttctttgtcgaagatgtggatcttttccatatccagagcaaatactgcgtgatctccgtttcttaatgttgtacgaggatttacgcgggctgtcatctgtgtaccttctaagtcaaagtacagatatacttctgctccaagcagctcataaactttgattgtagattcgatcacgctgtcaggtgaattgctgatgaatgcctgtgaatcatgtacatcttccggacgaataccaagaacaacagttcttccgttgtatccaccgtcgatcagtgcctgttttttagatgcaggaactttcagtgtatgttttccgacagttaatgttacatcatttcctttgatgtcaacaacagcatccatgaagttcatctgaggagatccgatgaatcctgctacgaacaggttgcaaggtgtgttgtacaggttctgaggtgtatctacctgctgaacaactccgtctttcataacaacgattcttgtaccaagagtcatagcctctgtctggtcatgtgttacgtagatgattgtagcgcccagattttcatgcagtttggaaatctcgatacgcatctgaactctcagttttgcatccagattggaaagaggttcgtccataaggaatacttttggattacgaacgatcgcacgtcccatagcaacacgctgtctctgtccaccggaaagagcttttggtttacggtcaagcagtttttccaggtcaaggattcttgctgcttcttttacttttctatcaatctcatctttcggaactttacgaagcttcagtccgaatgccatgttatcgtatactgtcatatgtggatacagagcgtagttctggaataccatcgcgatatctctgtcttttggttccacatcgttcataacttttccgtcaatctccagtgtaccgccggaaatatcttccagacctgcgatcatacgaagtgttgtagatttaccacatccggaaggtcctacaaagatgatgaactctttgtcttcaatgtccagattgaaatcttttactgcgtgaaatccgttcggataaattttctgaattccttttaatgataaacttgccattttaaatagcctccttaaaatcagtgtttcgttgttttctgtaattaagtatacctttggaggccaaaacagacaatgttacgagtaactaaaaaaaacagataatggtgtacaaagtgactatagaagctttttgatcgcaggaatggaaagtccgtcctgccgaagagaacgaatctgttcgattcttgcgaccgccgcctctctggggaagcggcgtgtcagattttcttctgcctgttcaaatggcagcattccttcttctgtataaaattttaaagtactgtagcggcagccggtgatgcgcaccagctcgccgatcgaaacatattccgaggccagaattttctccatagaacgttgtctggacataagaacactccttttacataatatatcttctaagctgaacaccgaaaacaggaacccggtaatatttgtgctgtgtcgggatacattcataataaagattgtcaatctgaagaagaggtaccgtgcctgcgcggatcacatggacttcatttccgttttcttccaatctggcaatgacgctttccagacgcttttcggcattacaatataattcttcagactcaatgaaaacggcactggaacgttccataaacggaacctgaaatagaaccccggtaccgagctgggtggaaaaaatcgctttctttttcgaaaagagcccaagtgccgcactgtcaagcgcattgtggatggaaacggaaagcagtgtttttgccagaagggagttcaggtataactcgttaattctggaagtgaggtatttttgttcctccctggaaaacagatcataaaagcagctgctttcacgtaaaagccagagcatacatacggtttcatcgaatacgttgccttcttccatcagttctgcacgaagactctctgtctgccgtgaatattcatcggaatccgtgcggtattccagaatcttgtttccggcagaagaaaactccagatcacagctgaccagggaggatgcttctgtcatcagtcccagattatttaaacgggtatatactgtgtgttccagctcttttgcagcagaagaagataaatgagctgcttccttcaaagaaacagataaagcatccaatctggagcggtattcgtcagagtcttcggtgagctcttctgtttcctgtagaaatcgatccagtacaccggcagcagagatacagcgaattgctgctttttttgcagtagaattacgtgtgctgtttaaagcgtttaatgaaatgagtgaaaaacggtcctgtaatgataagttcgtcataggaaaaccctcctcgtggataagaaaatttatatttacttattacttactacttacgatttaaaaatactgcgataacaggaaaaaatcaagagattttcagcaagttttcagaaaattccagaaaaacacaatgcgttgacgaaatcgtgcaaatccgctacaataacttcatatacggcttcttcaaagccgcagtttgatagaaaagaggagaaaacatatggcaaatccagttgttacatttgaaatggaaaacggcgatatcatgaaagcggagttatatccggagatcgcaccgaacacagtgaaaaattttgtatcgcttgtaaagaaaggattttatgacggactgacattccaccgtgtgatcagcggatttatgatccagggaggatgtccggacggaacaggtatgggtggcccgggatatacaatcaaaggagagttccttcagaatggcgtgacgaacaatctggcacatgatgaaggtgttctgtctatggcacgtgcaatgcatccggattctgcgggaagccagttctttatcatgcataagaaatccccgcatctggatggagcatacgctgcattcggaaagattacagagggaatggatgttgtgaataaaattgcagacacagctacagactacagtgacaagccactggagcctcaggtaatgaaaaaagtgacagtcgagactttcggagaagagtacggcgagccggagatggcgtagttgataaatggtaaaaagcgatattcaaaagggcagtttttgtactttgaaatgcactttggatgtatatacgagttgtcatattgatgaaaatcaatgcgacaactctacttttttcttctataaaaatgtgttatactaagaaactggtaaaaatgaaaggatatcacattgtatatggaaaagaaattacaaaatccaggtgttgtgtttgctctggctctgctttgctgtgcattgtggggaagtgcctttccatgtgtgaagataggatatgaatggctggcgatcgaaggcgcgggcagccagatcctgtttgcgggataccggttcttcctggcgggaatctttacatttctgatcggaagttttcttgagaagcgctggcttatgatccgaagaagttctgtactgccggttttcggacagggaatgttgcagacatttatacagtacatctgtttttatatcggtcttgcacatacaaccggggcaaaaggttcggtgattaatgcttcgaacgcattttttgcgttgatatttgcacattttatgataaaatcagagaaaatgacgtggaagaagagcatcgggtgcctgatcgggtttgccggtgtgatcgtgattaacctgacaccgggtggaatggccggtggatttcagtggatgggagaagggctgatcctggtctgttccatggcatatggagcaagttctgtgacattgaagctgctctcggggaaagaaacgcccactgcgatcacagcttttcagcttttattcggtggaggaatgctgattttggcaggtgttttgcttggcggccacgtgcgtggatttacgatgcggtccgtgttgcttttattgtatatggcactgctgtccacggctgcattcagcatatgggcgttgcttttgaagtataacccggttgggaaagtagcggtgtttgggtttacgatccctgttttcggggtagcactctcagcagtatttcttggagaggacatctggaaaatacagaatctggcggcgctgattctggtcagtgcagggattatttttgtaaacagagaaaaggagtctaaaaatgatacagaccaaagagctgatttatgaatatgaaaaaagagatgaagagggaaatatcatcggcatgaagcgtgcgattgacggcgtggatattgatatcccggaggggtcttttgtggcaatcctgggacacaacggttccggaaaatcgacgctggcaaagcatatgaatgcgatcctggtgccgtccggcggaaccatgtgggtaaacggaagagatacgaaagatccggagaatctgtgggatgtcagacaatccgcaggaatggtatttcagaatccggacaatcagatcatcggaacggtggtagaagaagacgtcggattcggaccggagaatcttggcgtgccggcggacgagatctggaagcgggtggaagaaagcctgaaagatgtcggaatgctggagtatcgcaagtcttccccaaacaagctttccggaggacagaaacagcgagttgccattgcgggcgtgatcgctatggaaccaaagtgtattgttttagatgagccgactgctatgctggatccgaatggaagaaaagaagtgatcaaaactgtccgccgtctgcagaagacgaaaaaagtaacggtgatcctgatcacccactatatggaagaagtgatcgaggccgatcaggtatttgttatggataagggtcatgttgtgatgcacggaactccaaaagaggtattctctcaggaggaaaaattgaaaaagtatcgtctggatgtaccacaggtaacgatgctggcagatgaactgagaaaaagaggtttggatatcccgaaaggaatcctgaagaaagaggaactggtggaggtattatgtcgattaaattaaaacacattcagtatgtttacggtcagggaactgcatatgaaaaacaggcgttaaaagatgtcagcctcgagattccgcagggacagtttctcgggatcatcggtcatacaggttccggaaaatcaacactgatccagcattttaatggtctgatcaaagctgcatccggagagttgtattatgaaggaaagaacatctatgaagacggatacgatatgaagtatttaagaagccaggtaggacttgtgtttcagtatccggagcatcagctgtttgaagtggatgttctgacagatgtatgctttggtccgaaaaatcaggggctttcaaaagaagagtgcgagaaacgggcgaaagaagctctggaactggttggttttccggaagaattatatttacagtctccgtttgagctttccggaggacagaagagaagggcggcgatcgcgggagttcttgccatgcgcccgaaagtactggtactggatgaaccgactgccggactggatccgagaggacgggatgagattctggatcagattgcagagcttcacaagaaaacgggaatcactgttattttggtatctcacagtatggaagatatcgcgaaatatgtggatcgaattattgtgatgaaccgcggggaaaagtttttagatggaacgccccgggaagtgtttgcacattatcaggaactggaagaggttggccttgctgcgccgcaggtaacttacattatgcacgatctgcggcagaatggactgcaggtcggcaatgatgtgacgacagtagaagaggcggcagatgagatcatgcgctattttagagggaagcatccggaggaaacaaaattatgattcgagatattacaattggacaatactatccggcaaacagcgtaatacaccgtctggatcccagggtgaagatcgtggcgacactgttatttctgatctcgttgtttgtacagaaaagcgtactcggctatctggttgcaaccttgttcctggcaggggtgatccatttaagtaaagtgcctttgaagtttattatgaagggcttaaaaccgattatgatcctgctcttgatcacagtagcatttaatctgtttttgaataacggaggagaggtgctggttcatttctggatttttcaaattacagaagatggactggaaatctcggtatatatggcgatccgtctcatttatctgatcgcgggatcgtcgatcatgacatttacaaccactccgaatgcactgacagatgggatagagaagctgctccgaccgctgaacaaagtgaaagttccggtacatgaggtggcaatgatgatgtcgatcgcgctgcgcttcattccgatccttctggaggagacagacaagatcatgaaagcacagattgcacgtggggcagatctggagagtggaaatatcattcagagagcaaaggccatgattccgattctggttccgttgttcgtatcggcatttcgccgtgccaatgatcttgccatggcaatggaggcgcgctgttaccgtggcggagaagggcgtaccaagatgaaaccgctcgtgtatcacagccgtgacagagttgcgtatcttgtgacagcagtgtatctggctgtgatcattgtgctgggaagatttgtgccgtttcatatctggatattctaggacgaaggaattgagaaaattatgaaaagattgaaactgaccgttgcttatgacggaacgaattattgtggatggcagatccagccgaatggaattacggtggaagaagttctgaaccgtgcgctcagaaaactgacaggggaagagattacggtcatcggggcaagcagaacagattccggggtacatgcccttgggaatgtggcagtgtttgattctgaaacctccattccgccggagcggatttcatatgccctgaaccagaggcttccggatgatattgttgtgatcagatcagaagaagtgtcagcagactggcatccgcgatactgcaattcaaaaaaaacgtatgaatatcatattctgaatgcgaaaataccggatcccacaagaaggctgacccggtattttgtgtcatttgatctggatattgagaagatgaaaaaggctgcacagtatctggtagggactcacgattttgtgagtttttgtaatgtgcgtacggatgtggaggataccgtgcgtacgatttacagtctggatattttgccggtgggagatgagattaccatccggatacagggaaatggattcttgtataatatggtgcgtatcattgtggggacactggtgcgcgtggggcggggattttataccccggagcaggtacaggagattctggaagcgaagaaccgcaaagccgcaggggtgacagctccgccgcaggggctgtttcttgtaggaatcgagtatgaagaataatatctaaaaaggaaagcaatttttagattgtacaaaagcaggaaacaagtatataataaatatgatttatccgtttcggatgaatgatgatcggccgcattttggagttcgcgggctggtatggatagaggaggaaatggaacatgaggattattgaaacaaaagactacaatgatatgagcaaaaaagcagcgaatattttgtctgcacaggtgatcatgaaaccggattgtgtactgggactggcaacaggttccacaccgatcggtacatatgagaagctggtagaatggtatgaaaaaggggatctggacttttctcaggtgacttctgtcaatctggatgaatacaaaggactggaccgtaaaaatgaccagagctattactacttcatgcatgagcatctgtttaatcatgtaaacatcaaggaagagaatacaaatgtgccggatggtacacagccggatggagaaaaggagtgtgcgcgctatgaagaactgatccgttctcttggcggtgtggatcttcagcttctcggactgggacacaatggtcatatcggatttaatgaacctgcagatgcatttgataagacgacacactgtgtagatctgacagagagcacgatcgaagcaaacaagcgtttcttcgcatccgcagatgaggttccgagacaggcatatacgatgggaatcggaacgatcatgcaggcaaagaagattctgatcattgtcagcggagaagataaggcagatattgtaagagatgcattttttggaccggttacaccacgggttccggcttcaatcctgcagatgcacagcgatgtgacactggtggcagatgaggcagcgctgtctaaaatcccaagataaaaaagcgttggtacatttatacgaaaatataaaaaaaatataaacaatattaccaaaatctaaattcggggctgccggaaggttgacttgaggtgtcacctctggtatagtttatataacgaattgaatcaaattggattgttactgtcaggcaggcaaaaccagttttacgagagagtaataccataggtttattctcttgtaaaggctggtttttattattttacggggaactccagacacaactgacagaacaggaaaaagattcgtataaaagaggattcggtatagaatgttaattgaaaaaattataaataataatatcgtgtcggctgtagacagcaaaggaagagaagttgttgtcatgggacgcgggcttgggtttggtatgaagcccggcaggcagattcaggagaacaagattgagaaagtgttccggatcaaaagtcagacacttgcagaacagtttaaagatcttcttgcagacatgccgcttgagcatgtaaaggtatccagtgatatcatcacctatgcgaaagaaaatctgaagttaaagctcaatcagagtatatatgtgacactgacagatcatattaatttcgcgatcacaagatatcagcaggggattaagccgcaaaatgcattgttatgggagattaagaggttttactcgagggaatatgaattgggaatgtatgcggtcaagacgattgaagaaaagctgaggatccggcttccggaggatgaggcgggatttatcgcacttcatttcctgaacgcagaatatggaacagatattcgggatgcagtgaagtttccgaatctggtaaaaaagatactggaaattgtagaagagaagcttcagattgaattggatgaaacatctctccattatgagagatttgtaacacatatcaagtttttgcttcagcgggtctaccgaaaagagcttcttccggatgaggagtctgaactggcggagctgatgcagaaaaaatatcagaaagaatatgactgcagcaagatggttgctgcatatattgaagaagagacaaaatgcagcctgtcaggagaggagatcatgtatctggcgatccacatccggagagtgacgactgcggaagaataaaaggaggaagaaagatgtttggactttttaagaagaaaaaagataaagcacatgtattaggagcaccggcaaaagggaaggcagtttctctcaaagaagtcagcgatccgacattcagtgaggggattctgggagacggagttgcggtgattccatcagaaggcaaaatttatgcgccggcagacggtacgatcggaatggtatttgatacccttcatgcgatcagtctgaccacagattttggggcagaggttctgattcatgtgggactggatacggtacagttaaaaggagagggattcgaagatcatgtaaaagccggagataccgtgaaaaagggagatctgcttttgacagtagatcttgagaaggtgaaagctgcaggatatgatatcatcacaccggtgctgatctgcaacacagcagattatgcggctgtgacagctcaggcagacaaagaggtcaacgccggagatgatgttctgaccgtagaagaaaaatagttttatagatatggttttaaaccggtggtacttgccggattaaaataaataaagggattccaataaggaaaaggattttgagaaggaggaaaagaaatgaaatttttacaaaaattaggtaaatccttaatgctcccggtagcatgtctgcctatctgtggtatcctgatgggacttggatactggatgtgtccggctacaatgcagggtggagaaattaacggtatcattcagcagattggtttttatctggtaaaagcagggggagctttgatcgataatatggcaatcctgttcgcgatcggtattggtgttggtatggcagatgataatgatggtacagctgctctttctgcgctggcttcctggctgatgatcacaaacctgctttctacagcaaacgtttctgttatcagaactctgtcagaaacttctacattagcattcgataaaatcgcgaatccatttattggtatcatcgcaggtctgattggatctatgtgctacaacagatttaaaaatacacagcttcctgactggctgtcattcttcagcggtaaacgttgtgtggcaatcgtatcaggtgttgtatctatcattgcatctgttgtattgctgtttgtatggccggttatcttcggagcactggttgcacttggagaagcaatcgtaagcctggatgctgttggagctggtatttatgcattcttcaacagactgctcatcccattcggtctgcaccatgcactgaacaacgtattctggttcgatacgatcggccttggagatctgacacacttctgggcaggcgagacatcagcagatgttacatggagccttggtatgtacatgtcaggattcttcccatgtatgatgttcggtattcctggtgctgcgcttgctatggtacatacagcaaaacctgctaagaagaaagttgctatcggtcttgttgcttctgcagcgatcgcagcattcgtatgtggtgttacagagccattcgagttcggattcatgttccttgctccagttctgtatgtaatctacgctttactgtatggtattttcgtaacaattacaacattggttggattccgcgcaggattcagcttctcagcaggtgcgacagacttgttattctcagcatcccttccggctgctcagaaaacatggatgatcattcctcttggaatcgcagcattcatcgtattctacgtggtgttccgcttcgcaatcgtgaagttcaacttaaagactccgggacgcgaggatgatgatgtagatgagacaacagtaaaacttgcaaacaataacttcacagaagttgctaaaattattctggagggtgtcggcggaaaagaaaacgtagcatccatcgacaactgcatcacaagacttcgtcttgaaatcaaagattacacaaaagtagatgagaagaagatcaaatctgcaggtgttgcaggagtaatccgtcctggaaaaacatccgtacaggttatcatcggaacaaaagttcagttcgtagctgacgagttcaaaaaattgtgtaaataaaatcaaaatttaaatccctttactcatgaggccgctgtaagcggcctttttgagtggagtggagggaataagaagtttgttgaaatcaaatggaaagtatgatagactctcaaacaggaaagacctgtgacagggggcgcacaggacagcatacgaagttattatattgcgttgcttacctttcttgataagagaaataagtgaaaataaaaatgaaaaattgtagagaggcagaccaaaatgaattacattttagagacatgtgcggacagtgtgcagtccgcgatcgaagcgaaaaaaggcggagcgaacagaatcgagctctgttccaatctggtgatcggagggacttccccgggagaatccttattccgtcaggtgaaggagcagacaggtttaaatgtgcgtgtacttcttcgtccgagatttggggatttctgttatgataactacgagtttcgtatgattctggatgaagtcagaatgttccgtaaactgggggcggacggcattgtgattggaattttgaatccggacggaacgttgaatatggagcagatgaaggctcttgtggaagaagcgggggacatgggaattacgctgcaccgtgcctttgatgtttgccgggatccttatgaggcaatggagcagtgtatttcactggggattgatacgatccttacaagcggacagaaaagctctgcctgggagggacgtgatctgatcaaggatctggtgaagaaaagtgcaggcaggatcgagattctggcgggggcaggtatcaatccggagagtatcgcaaaactggctccttacacaaatgcgaaggcataccatatgtccggaaaagtcgtgattgacagccggatggagtttcggagagaaggtgtaccgatggggattccgggattcagtgaatttgagatctggcagacttcggcagagaacatccgtaaagcagtgcaggtgctgcaggaactttagaaaatctcaaatcagccttgacaaacaagggggaatgggataagatttcgatagtatatgaaacaggcaaagaagagaacaagtagtacaggaatggacgaagacagaaagcagccgggtgatgagaggcgcatgaggacatcttgtatgaatacatctcagagcttcacaccgaactcctgcaggaaagtaggctgtgacggattggtgcacgttatcgtactgagtgattgagcgttgaatggatgcgagattgactcacagaggcagagggcgcgagccgtctgtgaaaaaaggtggtaccacgagcttatgagccctcgtcctttcggatgaaggctctttttatattttaggaaagtgaggatgtatcaaatatgcagatttatgatgaattgaaagcaagaggtctgatcgcacaggtgacagacgaggagagaatttccaaactggttaatgaaggaaaggcaacattttatattggatttgatccgacagcggacagtcttcatgtagggcactttatggcactttgtttgatgaaacgtctgcaaatggcaggcaacaaaccgatcgctctgatcggaggaggaacaggatatatcggagacccgtctggaagaacagatatgcgttctatgatgacaccggagcagattcagcacaactgtgactgtttcaaagaacagatgagtaaatttattgatttctctgaaggaaaagccctgatggtaaacaatgcagactggctgctggatctgaattatgtagaattgcttcgtgaagtgggtgcacatttcagtgtaaaccgtatgctgacagcagagtgttacaagcagagaatggagaaaggattaagtttcctggaatttaactacatgatcatgcaggcgtacgatttctatgcactgtaccagaaatacggatgtaacctgcagtttggcggggatgaccagtggagcaacatgctggcaggaacagaactgatccgccggaaactgggagaggatgcaagtgcgatgacgatcacattgcttctgaactctgaaggaaagaaaatgggaaaaacacagtccggtgcggtatggcttgatccaaacaagacttctccgtttgacttctatcagtactggagaaatgtggcagatgcagatgttctgaaatgtatccgtatgctgacattccttccgttggaagagattgacaagatggattcatgggaaggtgcacagcttaacactgccaaagaaatccttgcatttgaactgacaaagctggtacatggagaagaggaagcaaataaggcacaggagagtgcaagagcattgttcagccagggaaatgcagcacagatgccgacagcagagctgacagaagaagattttgaaggaaatgagattgatattctgacactgctcttaaagagcggcctggttccatctaaatctgaggcgagacgtgcggtacagcagggtggagttgcagcagacggagagaaagttgcagacattcatgcggtatttacaaaagatgcactgtcaggagagggtatcgttctgaaaaaaggtaagaaaaacttcaggaaggtagttgtaaaataaaaaaatctcatatagagagtattcggaacaaacattcccggatgtaattgaagtattttatttataatagaacgtaaacatgatctgttttcagatagaggattgtctgagagcagatcatgtttttgtataatcaggcaggttcctctgtcagcatcatcccgtcatccaacacaaactgacggaatttctgtactacaggcggtataaatacgcagtcattatgcaccataaagaatgcccgctcataatttggagagcggatctgaagaatgttgacgttcagtttctgtaaaatatccatataaggtacaacagcgataccgaatccctgtgcgaccagacctgcaatgacctgatcttcttcggtctcataggctattttaggagaggcgcctgtcctggcaaacatctggtcaatgacatttcggataccggcgctcttttcaaagaagatctgcggataaggaatggtctcaacaagatccacgctgtccttagcagacagtggatgagactgcggtgtgatcaggatcagattctgcttctgtatcggaaccgctgtaaatttgtgttcttcagatggctgagagcagaatacaagatcatattttcgtgcagccagaccatccagaagatattgcgtgacacctgtatgaaaagtaaactggatgtcctgtcccgggttcgctttcaggaaaccggcagccagacggggaatgtattcgattccaagaggcctgagcatcccgatgcggatcagaccttcgccccgtgcatttctgtggagtgttgtgattccttcatccagagtagacagcgtgtgttccgcacaggagagaaattcttctccgaatcgtgtcagggttgtatttcttccgtttttttcaaacagcgggatccccagctctttttccagctgtgcgatcgcgtggctcagacttggctgtgaaatgcaaagctgttcttctgcttttgttcttttttaaaatcctgagtttggagaaggttcacagttattgtgaacagtaatgatttacaaaatattcatagaaaactggataaaaaatattgaatgattgtatattctaacatataatattacgcaagagacactgaaaatgtaataaaatatacaaaaatgtatcaaaaggagggttatatgttagatcaaagctactatgacaaagcagatgagatcgttgcatcacatggagcttatcaggaatctctgattccgatcattcaggatatccagagcgaatatcgctacctgccgccagagcttttaagctatgttgcggaaaaaatcggcatcagtgaggccaaagcgtacagtgtggcaacattttatgagaatttctcatttgaaccaaaaggaaaatatgtcattaaggtctgtaatggtacagcatgtcatgtgagaaaatcaattccgattctggaaaggctctacagtgagctggggatttccggagagaagaatacaacagatgatatgctgtttactgttgagacggtttcctgcttaggagcctgtggacttgcgcctgttttgacggtgaatgatacggtttatccgaagatgacgccggatgcggcagcggaactgattcacgagttgagaggagcgtaaggcatatgaagagaattgaaaacagagagattctgcagcaggtccgaaaagaaacttcagaaaagattgaaaaaagccgatgccggattttaatctgtgcgggaaccggctgtctggcaggtggttccggggagatttatgagaaaatgtgtgagctcaccgcagagaatccggatgtggatgtgttctttggaccggagatcgctcacacagaggcagaacaaaagacgggacctgtggaagtgaaaaagagcggatgtcatgggttttgtgaaatgggaccgctgatgcggattgaaccgatggggattttgtataccaaagtccagttgagtgattgtgaagagatttttcaccggacaattgaacggggagatgtgattcggcatctcttatttaaacaggatggaattgaatataagaaacaggaagagatcccgttttataaaaagcagacaagaaatgttctcaaaaactgcggacatatcgattcggagcatattcaggaatacatagctgcaggcggataccgtgccctggagaaggtgctttttgagatgactcctgcacaggtgatcgaggagatttcggaatccaacttacgaggccggggaggcggcggattcccgaccggatataagtggtcacaggtagcacgccagccggagaaggtgcgttacattgtctgtaacggagacgagggggatccgggagcttttatggaccgcagtattatggaaggcgatccgcacaagatgatcgagggtatgatgatcggggcttatgcggtaggtgcaagagatggctatatttatgtgcgggcagagtatccgctggcgatcagtcggttgaagctggcgatcagccaggcagaagagtgcggacttttaggtgatctcattctgggtacagatttttcattccatctccatatcaatcgcggggcgggagcatttgtctgcggcgagggaagtgcattgacagcgtccattgaaggcagcagaggaatgccgcgtgtgaaacctcctcgtactgtagagaagggattgtttgcgaaacctacggtgcttaataatgtagagacatttgccaatgtcccgatgatcatcaatgagggagccggatggtttaagagtattggacctgagaacagtccgggtacaaaggcatttgcgctgaccggaagtgtgaagcataccggtctgatcgaggtgccgatggggacttccttaagagaggtgatttacgatatcggcggcggaatcaaagaggacggtaaatttaaggcagtacagatcggcggaccgtccggcggatgtctggttacaaggcatctggatgtcaatctggattttgattctcttaagaagatgggagcaatgatcggttccggcggtctggttgtcatggatgaccacacttgtatggtggaggttgcccggttctttatgaattttacgcagaatgagagctgtggaaaatgtgtgccgtgcagggaaggtaccaagcggatgctggagattctggagcggatcgtggcaggcaacggaaaactggaagatctggatcttctggaggaactggcaaatatgattacagagacagctctttgcggtctcgggaagagtgcggctctgcctgttgtgagtacattgaaattgttccgggatgagtatgtggagcatgtggtggataagaagtgcgtttctcatacttgtacagcacttagaagatacattatcagtccggagcgctgcaagggatgttccaagtgcgcaagaaactgtccggtgggagcgatcagcggaagaatcaaagaaccgtttgtaattgacaatgacaagtgcatcaagtgcggagcgtgtgagagttcctgtgcgttcggtgccattcatatagaagagtaggaggcagaagatatgggatatatgacaattaataacagacgggtagcatttacagatgagaaaaatgtcctttctgtaatccgaaaatcaggaattgatctttctacgttctgctatcactcggaactgtcaacatacggcgcctgtcgtatgtgcgtggtggaagacgacagggggaagatttttgcatcctgctccgaagtaccaagagacggaatggtgatctatacgcatacaccacggctgcagcatcacagaaagatgatcctcgaattgctgctttcttctcactgcagagactgtacgacctgtaccgagaacggagtctgtacgttgcagaaactgtcccgccagctggggattgacgaggtgagatttgagaatcacaaaccaattctgccgttggatgagtcttcagaatgtattgtgagagatcccaacaaatgcattctgtgtggagattgtgtaagaacctgtgaggagatccagggactggggattcttgattttgccttccgtggttccaagatgcaggtaatgccggcatttgaccgggcgatgtctcagacagactgtgtgggatgcggacagtgccgggtcgtatgtccgaccggagctatcagtattaagcaggatattgctcctgtctggacagccctggcagataaagatacccgtgtgatcgcacagattgcgcccgcagtccgcgtggcaattggtgacaaatttggaattccgaaaggtgagaatacgctggggcggttggtggcagctctgagaatgattggatttgacgaaatctatgataccaattttggagcagatcttaccgtgatggaagagtcaaaagaactggtagagcgtctggaatccggggagaatcttccgctgtttacttcctgctgtccggcatgggtaaaattctgtgagaaccgttatccccagtttcgcaagaatctctccacctgccgttccccgcaggcgatgtttggggcgcttctgaaagaagaagccagaacagaagagaaaaaggcagcgcaggaaggaacgaagaaccgcaaaacagttgtgatttcgatcatgccgtgtactgcaaagaaagcagagatcaaacgttcggagcattttaccgaaggaaagcaggatgtagattatgtacttacaacaacagaagtaacacggatgattcaggaagctggtattgatctttcccggattgaaccggaagcgctggatatgccgtttggactttcatccggtgccggagcaatctttggtgtgaccggtggcgtgacagaagctgttctgcgccggctgaaaaacaacagcagttcggaagtgctggatgcaatcagttttaccggaatccgcggtgtggacggaatcaaggaggcatcggtagatctgaacgggcgagaagtaaaaattgcagtcgtaaatggactgcattgcgccaaagaactgctggatcggatgaaagacggagaagtgcattatgactttgtagaagtgatggcatgcaagagaggatgcattgcagggggcggacagccggttccgattggaccgaggacgaagaaagcccgtctggaaggcatttacaagatcgacagcatggcacagatcaagctgtccaatgagaatccgatcgtggcaacggtatataatggaattttaaaaggcaaggagcataaattgctgcataatccaactgttgctgttgggcaaggtcaggatcaggagtaagaatatagagtaatagaaggcggaagcatgagatgagaaaagtcattttgtgcttctgtttctttctatgtctctttcaagtttaaatcttatcttttttagcagagtttttgaaacaaaatggaaaaacccctccgattatggtatccttatgcgtatgagaaacgaacaatcaacaggagaggaatcatatgaaaaaattagcagcagtgctgatcctggcagcagcgatcacgatgaccggatgtcagggcagcaaacaagaggagaagccggcagcatcaaaaacagaagaagtgaatcaggcatctgatgaactgaaagaaaagcttggtgacggctatattctgccgagtgaggcagtgacaaaggttctggcaaagaaatgggatgtagtcggaacagaatcggtttatgatctgaaggaggatggaaccgggacactggacggaaaagcacttacgtttgagtgtggatttgacgaagatgacaatattacaatggggatcaagatggacggggaagagaaagaacagctgtatgcgattgaggatgatacgacagggtatggtctgaagctcaagtcactggacggaggcaaggatatggaattgtttcagtcggacatcaagcgtattgatatatcagatgcacaggcatccgggcttctgggaacctggaaagatgacaatgagaatgaatacacattcaaaaaagacggaactgttgtgatcaaaggatcctcaggaaaaacaaagggaacatttggcgttgtcaaagatgcagaaggtattttgaaactgaatctggtcatggagggcggcagtctggaatatgagtatacattaagtgaagatcatacggttctggaattgtgcagtccgggaacggacacgatacaccggtggacaaaagcataggatatatgatataatagcctttattgaatgtccgttttgcggcagagacagatttgaaaagaaggagtgagcggtatggaattagtgacagttcgggaattatttaaaaatagagaacagtatctggataaaaaagtaactgtagggggatggatccgcagtattcgcgattccaagacatttggatttatcgtggtaaatgacggttcttattttgagcctctgcaggtggtatatcatgacaaaatggagaattttgatgagatctccagacagaatgtcggagcagcgatcattgtgaccggtacactggtagcgacaccacaggcaaaacagccgtttgagattcaggcagacgaagtgacagtagagggagcgtccgcaccggattatccgctgcagaagaagcgtcacagctttgaatatttgagaacgatctctcatttacgtccgagaacgaatacattccaggccgtatttcgagtacgttccatgatcgcatatgcgatccaccagttttttcaggagagaggatttgtgtatgtacacacaccactgatcacaggaagtgactgtgaaggtgcaggtgagatgttccaggtgacgacactggatctgaaagatgtaccaaagagtgcagacggaagcattgattacagcaaagatttctttggaaaagagacgaatctgacagtgagcggacagctcaacggagagacatttgcacaggcattcaggagcatttatacatttggaccgacattccgtgccgagaactccaacacgacaagacatgcggcagagttctggatgatcgagcctgagattgcatttgcagatctggaagacaatatggatttggcagagtccatgttaaaatatgtaatctcctatgttctggagaatgctccggaagagatgaacttcttcaactcatttgtggacaagggactgcttgaccgtttgaacaatgtggtaaattcagactttgcaagagtgacttacacagaagcggttgatattctgatgaagaacaacgacaagtttgaatataaagtttcctgggggacagatctgcagacagagcatgagcgttatctcacagaagagatctacaaacgtccggtattcgtgacagactatccgaaggagatcaaagcattctatatgaaacagaatgatgacggcaagacagtggcagcagtagactgtctggtaccgggaatcggagagatcatcggaggaagccagagagaggacgacttcgaaaaacttcgcacaagaatggcagagatggatctgaacgaggaggattacaagttctatctggatctgagaaaatatggttctacgagacatgcaggatttggtcttggatttgaaagatgtgtgatgtatctgacaggtatgtccaatatccgtgacgtgattccgttcccgagaactgtaaataactgtgatttataagatttccagggagaagtctataagagaattgaaagagggtggccaaaggcagtgtgcttttgagcaccctctttgctgataaaagagacaggagggagataccatggtaaaatggattcacattgcggatgttcatctgggtgcgtctccggatgcgggagacgcttattcaaaggtgcggccgcaggaattgtgggatacctttgcggaagtgatcgacatctgtgagcgagaacagacggatctgcttctcattgcgggggatctgttccacagacagccgctgaagaaagaattaaaagaagtggattattatttttcccgactttcccggacaaaggttgttctgattgccgggaaccatgattttttaaagcaggattcttactaccggagctttcagtggagcagcaatgtatatccgctgtttgacaaagagccggagtgtgtgatctttgaggatcttgatgtggcagtgacgggattcagctatgagtcacgggagatactgacaccttttgatggagggatccgtgcggaaggagacgcaaagtatgagattcttctggttcacggcggagatgaaaaacatcttccgatacagaaaagtctgttggaaaaaagcggattcgactatattgccatggggcatatccacaagccgcagcaggtgatcccgggacttgcagcatatgcgggtgcattggaaccgaccgataagaatgatacaggaaagcatggatttatcaggggagagatttcagaaagaggcactagatttgaatttgtaccactggcaaaacgggaatatctgcatttggtgctcgagacagagagccggatgggaaatgcagaagtgcgggaactgatccggggacagattcaggagcatggaagagagaatctctacaaattcattctgacgggaaagagggatccggatattgaatttgatacgggttccaaggatagatatgggaatattctggaaattgtggatgagacgattccggattatgattttgaagaactgtggaaggcaaatcaggagaatctgatcggaaaatacattgaagcgtttgggggatgtgagacaggaagcgtagagtatgaggcgctttgtgaaggaattcaggcattgatggcaaaccggcagtaggagaaggcatgaagataaaagagattgagatcaaaaactttggaaaattttcaaatcagagatttgtgtttcgggacgggattcaggtgttctatggagaaaatgaattcggaaagtccacgatttacggatttttaaaagcgatgctcttcgggatggaaagaggacggggaaaagcggcgcacaacgatgcgttcagccggtttgaaccgtgggagaatccgaatgaatacgccggagcgatgcggttttcctgtggtgagaagaccttttgtctgaaacggcgttttgaccggtacacaaaaggcgcagtgctgatctgcgaggacgacggtgaggaactttctgtggagcatggtgatctggatatgctgttaaatggattgacagcggaacagtttgaaaatacggcagcgattggacagcttggagcaagacccgggcaaagtctggcggcagagcttcagaattatgcagcaaattattacgaaacaggaaacagcggagtagatctggcaggggcagaggagcgcttaaagcagcgcaaaaaggaaatcacccggaaatggaagcagctggaatcggaaaaagcagagaaacggcaggcacttcaacgaaaatatcagtatattcagcaggaaaagatgcgtttggagtcagagatgcaggaaaagaagcggcagcttgcagatttaagagaacctgagcatgtgacagaagaggagaagaaaaaaatcagctggcagataatcgcagccatatgtctgttggcagttggcatgcttctgcacagtgtatatacattgattccagtcatggtaagtattttgtttcttatttggggaatgaaagacgcgcagacacaaaaaagtgtccggatcaaagaacgagaaacgatgggatccggttacagggagaaaaagcagaagctgcactggacgctgcagcgcatcggggaggaacagaaggaaaagcacatcagtttaaataatgtaaaagaacagttggaggagctggatttttccggagaagaggagcagaggctgaaaaagacggcacgggcactggagattgcatccgagacaatggagaaggcagcggcatccatgtcaaaagatttcggtacagtactgaatgaaaaagcatcaaaaatccttgcgaaagtgacagatggaaagtatacaaggcttctgattgaggattctctgaaactgatccttttatcagaagggcggcggatcccggcagaacgagtcagcaggggaaccgtggagcaggtttattttgcgcttcgaatggcagctcttgagattctgtatggcgaggaagttccggtgatcctggatgatgcgtttggatgttatgacgaaaaaagattaaaatatacgctaaaatggttgagcgaacagtcaagacaggttataatacttagttgccaaaaacgtgaacttgaaattttaaatgagatagaaatggaaagacagggtagaccatagaataaaggggaagagtttcaatgaaaatagaattgccaagaaaagtagttttgattattaaaaacttacagagacatggttatgatgcatatgcggtgggcggctgtgtccgggattccattctgaacagaaaaccggaggactgggatatcacgacttctgcaaagccggagcaggtgaagcggatcttccgacgtaccgtggacaccgggatcgagcatgggacggtaacagttctgattggaaaagacggatttgaggtgaccacttaccgggtggacggactgtatgaggatggccgtcatccgaaagaggtgacatttacaagccggctggaggaagatttaaagagacgggatttcacgatcaacgccatggcatacaatgatgatgagcgcctggtggatgcgtttggcggaatgagggacttgaattatcacctgatccgttgtgtgggtgatccgaaggagcgtttttcagaggatgcacttcggattctgcgcgcagtacgtttttctgcgcagctggcatttccaatcgagccggagaccgcagaagcgatcaaaagtctggctccgaatctggaaaagatcagtgcagagcggattcaggcagagctggtaaaactgctggtatccgatcatccggagcggattcaggatgcctgtgagctgggaatcacaaaagtggtgcttccggaatgggatgacatggtcggtgtgaagcagaatacgccacatcataaatatgatgtagctgcacacacagttcatgcgctgcagaatgtaaagaatgataaagtcctcagactaaccatgttgttccatgatatgggaaaaccagtaatgaaggccacagatgaaaatggaagagaccatttcaaagggcatgcgatcgccagcgagcaaattgcaaaaacagtgatgaaacgtttgaaatttgataatgatacgattcgaaaagtaacaaagcttgttgcgtatcatgattaccggatggaaccgaccggagcgaacgtgcgccgcgccatgcatgagatcggggtggaactctttccatattatctggcagtccggcttgcagatacaaaagcgcagagttcttatgaacgcagaggaaagctggaaaatatcattcagatcagagaactgtatcgaaatgcgctgcgaaacaaagaatgtgtgacattaaaagatctggcagtgacaggaacggatctgatcaatctcggaatagcgccgggaaaagaactgggaacgctcttaaatgagctgctggatatggtgatcgaagatccggcatggaatcaaaaaggaaaattgtgtgattacgtgaaagaaagatttggcttttagcatacttgctcaccgggattcatagattagaaagagtcatgaatccgccctgctttcggcggggcaaagtgcagggggcaagtatgagagaatatgagttagaagttctggaacagtatgacatagaagtaataagcacccgcaagacaaggggtgcttatttttgcaatacaaaggagggactgatgctgctcggaccggcaggaatttcggttgggcgcgcacctctgatgtatgttttgctctgttatctggaatccagacacggaatgaaggtggacacacccatctttacgaaggcgggaaaactctttagcgtatcccaggatggaacaaagtacatgctgaaaaaatgggtttcgggaagagagtgtgaggtacgaagggagcgggatgtgctggaagcggcacaggctctcggacttttgcatcagagaatggattggggagaaattcttggcgacggtgcgtggacaaaagaaaagatgcaggagatgattcctcaggcttcggatcatgaacctgttttagagatagaactgaaaccttttgcaggaagagatatgctgtcagaattaaggcggcataaccgggaattgaaaaaagtgcgggcatttatccgttccagggtcacaaaaaatgaatttgagcgtcgttttctggcacattttgagagaatgtatgagatggcgcaaagtgtgacagaacggatggaatgctccggatatccggaattgtacaaagacaatctaaaagccggaaagctgatacacggagattataattatcacaacatctggatcagttccggcaggattgcagtcaccaattttgagcatttcagaatggatgtacaggtacaggatctgtattatttcctgcgaaaggtgatggaaaaatatcagtggaaagaaagtctgggaagaaagattctggagatgtatgagagcgtccgtcctctggaggacagggaaaaggaatttctcgcactttgcctggcttatccggagaagttctggaagacagcaaatctgtattcgaactccaataaggcgcggattccggagaaaagtgtagaaaaactgcagactgcaatcggacagcaggcagaaaaagagcgatttttagaaaatatattcacttttcatttataggcggctgttgtataatagaaccatactatattgcaggaggtgcctaagatgggttacaaagaaatatacaatgagtggttgacaaatgcttattttgatgcagatacaaaagcagaactggagcgtatcgcatcagatgagaacgagatcaaagagcgtttttatacagatttagagtttggtacagcaggacttcggggaattatcggagccggaacgaaccgtatgaatatttatacagtgagaaaggcaacacagggactggcaaactatattttaaagagtggaaacgcagaaaaaggagttgccatcgcatttgactcacgccggatgtcaccggaatttgcacaggaagcggcatgctgcctggctgcgaacggaatcaaagcctatgtattcgattctcttcgtccgacaccggagctttcttatgcagtcagaaaactcggatgtattgccggaatcaacattacagccagccataatccaccggagtacaatggttataaggtatactgggaagatggcgcgcagatcacaccgcctcatgacaaaggaatcatggatgaagtcaaggcagtgacagattatacgactatgaagacgatgccggcagaggatgccaaagcagtcggactctacgaagtgatcggagcagaggtggatgatgcctacatagcagagctgaaaaagcaggtgatccatcaggatgccattgatgcagttggaaaagatctgaagatcgtatacagtccgcttcatggaacgggaaatattccagcccgcagaattttaaaagagctcggttttgagaacgtatacgtagtcaaagagcaggaactgccggacggcgaattcccgactgtttcttatccgaatccggaggcggcagaggcatttgaactgggacttaagctggcaagagaagtggatgcagacattgtgcttgctacagatccggatgcagaccgtctgggtgtccgggtaaaagataaaaacggtgaatatcacgatctgacaggaaatatgtccggctgtctccttgcagactatgagatcggacagagaaacgcattgagaggacttcctgaggatggatatctcatcaaaacgatcgttacaacaaatatggcagatgcgattgcagattactataacacagggctgattgaagttctgaccggattcaaatatatcggacagcagattctgggatttgagacaagcaaaaaaggcgagtacttattcggatttgaagaaagctatggatgcctgatcggaacacacgcaagagataaagatgcgatcgttgcgacaatggcactctgcgaggcagctgcttactacaagacaaaagacatgactctctgggatgccatgatcgagatgtatgagagatacggatattacaaagatgatatccagtctatcacactcaaaggaatcgaaggacttgcaaagatccaggagatccttgagatactccgtaagaatccgccggcagagatcgcaggctacaaagtgctgaaagcgagagactacaaagcagacacgatccaggatatgcagactggtgaagtatcttcgacaggtcttccgacatcgaacgtattgtactatgatctttctgatgatgcatggttatgtgtgagaccgtcaggaacagagccgaaagtcaaattctactacggtatcaaaggaacctccctttctgatgcagatgaaaaatccgcagctatgggcagagaagtgctggcaatgattgataagattatgtaaaaatgttgctgttattgtaaacagtactgctttgcatggtaaatctgtgaaactgcttgacaaaagcagtttcaccagttataacagtacataagggtatcgacatgtaaagggtagagacatgcggcctttaccaatttagaataatcattctagcataataaagaggaggaattatccatgaacaaaacagaattgatcgcagcaatcgctgagcaggcagaaatttcaaagaaagatgcagagaaagcattaaaagcttttgttgatgtagtaacagagcagttaaaagaaggagaaaaagtacagttagtaggattcggtacttttgaagtaagcgaaagagcagcaagagaaggaagaaatcctcagacaggaaagacaatgaagatcgcagcttgcaaagctccgaaattcaaagctggaaaagctctgaaagatgctgtaaacgcataattgacgaacagataaagatgcataagaggatacagtcggacaagccggttgtattctcttttcagttacaggagaaggaaggagaaaagattgatgagattggacaaatttttaaaagtttccaggctgatcaaacgcaggaccgtagccaacgaagcatgtgatgcagggagagttctggtgaatggaaagcctgcaaaggcatccgtaaaagtgaaagtgggagatgtgatcgagattcagttcggtacaaaaacggtgaaagtagaagtgctggatattcaggatacgaccaagaaagaagaggcgaaagacctgttccgctatttataaaacagaaaaattcgtttttccggtataaaataatacaacccctcatatatatagaaaagcagaaggaaaggggaaagtgtatggaagaacgacaaatgccggcgaaggcacataaactgatcgtgaataacagaaagacaagtatggttaccggagttctggatgttctctcgtttgatctgaatgagattcttctggagacagagcaggggatgcttatggtgaaaggcacagacctccatgtgaaccggctcagtgttgagaagggagaagtagacctttccggaaatattgacagtattgcttattctggagtgaatcagggcgggcaaaatgagagctttctgtcaaaattatttaagtaggcgttattatgatgctcggaattgaaacagaagttgtgatttttttctatgcggcgcttacggggatggtacttttttgcggttatcagattctgctgctgatacgaagactcgtgcggcatcatccgctggcagtcggtgtggaggatatcggcttctggctgttggtgagcgcgtatgtgtttcgtcagatgtattgtacgacttatggaagtatccgctggttctttgttctgggaatcgcagtcgggctgctgactgctgtgggggtgcagcatttgttgaaacgaattttcaggaaactgaaaaaaacatgaaaaaacaaggaaatcttgattaaaacggctgaataacttgaaaaaagagaaaaaagcagatagaatacttgtgtcaggcaaatttatttgcaggcaggatggaaatagaagttagatttgatagggtgagtatcatggcgattcagaaaaagaaagtcgctggcagatcaaaaagccggaagacgaattctgcatggcggtatcataaaaaaagtatgatgctgatcagtatgattcttgtattgctggtaggcgtacttgcagtgaatgcagtatctctgcgcagcagaaacgcacagtacaagaagcaggaagcagaactggaagcacagattaaagaagagaaaaagcgtgcaaaggaagtggaagcatacgaagcgtatgtgaagacagacgattacgtgaaagagattgcagaagaaaaattagggctggtggatccgaatgagatcattttcaagccggcaaaatagtgacgatacgaaagagaagctccgggaaattcctggggctttttgcatgttctaatattatatacataagaactaggaggacatcgccatgaaaaatggacaggcactgcacaccagcccctatgtgacgcagattgaaaaatacgcagattctatcaaacagctttcccggacatttcttcatctggaggaaaagaaatccgcattttccaatgaggagattgaggatatgtttgaccggacaaaagaaagagcctgcaaaagctgtgaaaaatgttcctggtgctgggaagaggattttgtacatacctatcagatgggatatgaagttttatctgccatcgatcattacgggagtgaactgaatacagaaacaaaaaggaagcttcagcagaggtgtctgcggtgggaagcgtttttacaggagatgctgggtgcatttcacgatgcaagacagaatatgatgtggaataaccggatcgtacttggcagggaagggtgcgcggttcagatggatacgtttgcggatatgctccgcagtacggcgaaagagctggaaaaaagtttattttcggacgagcgtctggaaaaaaagctggcatctcatttaaaaaagagagggattcgtgtactgtacagcagttttttcctgaacagagaaggaaaatatgaagtacatcttaccgcaagagcggtgaaaaatacctgcgttacgatcaaagcgcttgtaaaggctgtctcggaagtgatggggaggcagtttattgcagagagtgatcaggcgtttatgctggggaaagaatatcagacgattgtgtgcatggaaggtccggtgttttatacactttacggtgtggcaaggattgggaaggactgcaacaagatctcaggtgataatttcatgatgcgtgagcttggcggaggaaaactggcagtggcgctttccgatggaatgggatccggagagaaggcatgccgggagagtacgcttgtcatggaattgctggaagagctgttggaagccggatttccggcaaaggcggcgattcagatgatcaatacgacattggtgatggggcgtgaggaaatccatttttccacggtggatctgagcatgtttgatctgtatacaggagaatgtcgtctgatcaaagcaggagcttcttccacatttatcaaaaaaggaaacaaagtggagcgtatcagttcgtccagtctgccgatcggggtcatgcactccattgaaatcgaatctgtgcagagaacgctggaagacggagattttgttgttatgataacggacggtgtgctggatgctctcccggttggggaacaggaccttctgatggaaacgatcattggtggaacgacaggcggaaatcccaaagagcttgcgcatcacattctggagcaggtattaaactggaccggagaagaaccgatggatgatatgacagtactggtagtagggatttggaattgtcaggatacttgcattttggggacggattcggtatagtttacagtatggaaaagaaagttttaaattttattcaaaaatatcatatgctgcaaaaagaagataaagtaatcgcagggatatcgggcggcgcggattcgatatgcctgctttttgtacttttgaggctgcaggaaaaaatcggatttgatgtgatcgcagtgcatgtgaatcacgggcttcgtggagaaaatgcaaaaagagatgaacggtttacggaaacattttgcagggagcggaatgttccatgtattgtgtatcatgagaatgtaaaagaaatcgctgcacagaaaaagctgtctgtggaggaggcagggcgtctggtgcgcagaaaggcgtttgaggaggtgcggatccgttatggggggaccaagatcgcgcttgcgcatcatcagaacgataatgcagagacgatgcttttgaatctggcaagaggaaccggaatccgggggctttccgggatccggccggtcaatggatatatgatccgtccgcttcttggaataaacaggaaggaaattgagtattatctgaaagaacatcagctttcctactgtgaagatgagaccaatgccggggatgaatataccagaaacaggatccggcatcagatccttcctatgctggaggagcaggtcaacaggcaggccgtccgtcacatgaatgaaacgatggagcagttaaatcagatcagagattatctggagcgggaaatcgaagcgcattgcagatgtgtggtaaggcaggaggaagaggggcttttgcttctgtgggatgaatggatgcagtgtgatccggtcatccaaaacgggattattcagaagtgtctggaaaatctggcgggaacaggaaaggatcttgtgtctgtacacgttgcggcagtggcggagttgtttgaaaagcagagcggaagaaagcgaaatcttccctacaatatctgtgcagagaggaattatgaaggaatacttttgataaaacagacagcggaaagacagacagagtgccgggaagaacttataattcccggaattacccgattaaaagacaggaatctgcgaatatgctgtacaatttgggaaaaagataagaatttttcgatagaacagataccgcaaaccccctacacgaaatggtttgactatgatataataaaaaatagtctcaccgtaagaacgagacagccggaggatgttttgggtgtcaacagacagggcggtacgcagaagctcaaatcttattttatcaatgagaagattcctgcaaaaagcagagaacggattttgctgatcgccgaggggcatcagatactgtgggttgtcggatatcggatgagcagcagatatcagatatctgaacatacaaaaaggataatagagatcaaaataatggaggataaaaaacatggcagagacaattaaagtgttagtttcagaagaagaagtaaatgaaagaatcaaaacattgggaaaacagatcagcgaaaattatgcaggaaagcagatccatatgatctgtgtactcaaaggcggagtatttttcatgtgtgaactggctaaaagaatcagtgtgccggtttctctggactttatgtgtgtaagcagctacggggatgcgacaacatccagcggtgttgtcagaattgcaaaggatctggatgaatccatcgagggaaaagatgttctgatcgtggaagacatcattgattccggacgtacactgtattatctgatcgatgttctgaagaaaagaaatccaaagagcattcagctttgtactcttttggacaaaccggagagaagagaaagagatgtaaaagtagattatgtcggatttgagataccggacgaatttgtagtcggatatggactggactacgcacagaaatatagaaatcttccatatatcggagtcgtagaaggtgtggaataggaaggagcagtatcattgaatgacaagaagtataaaggcataagcggcgcaaccgtggttgtgtttattgctgtgatcttttttgtgctatggatgacgagccgtgtacagatgcgcgggcaggagataacttttactcagtttgaacaggagataaaggatgacaacgtgacagaggtggtgatcaaccagaataaggcagtgcctaccggagtggtcacactgacattgcgcgacagcagggaaacgggacgtgtcaacgtatcggatgtcaatgagacgcagaagctgctggataaaaatgatgtggaataccgcataagcgcgatccctcaggattcggtgctgagtacgacggttctcccggttgtgctgatgcttgtcggattcatgtttattacgatgatgatgaacagacagagtggcggtgccaatgcaaaagcaatgaattttggaaaaagtcgtgcccgtatgagttctgagaatgataagaaagtgacatttgcagatgttgcggggctgcaggaagaaaaagaagagcttgcagagattgtcgatttcctgaaatctccgaaaaaatatgttcaggtgggagcaagaatcccaaaaggagtgcttctggaggggcctccgggaaccggtaagacccttcttgcaaaagcagttgccggagaggccggggttccgttttttacgatttcgggatctgacttcgtagagatgtttgtcggtgtgggagcgtcccgtgtcagggatctgttccaggatgcgaagaagaatgccccatgtatcattttcatcgatgagatcgatgcagttgccagacgcagaggaagcggacttggcggcggtcatgacgagagagaacagacattgaaccagatgctggtagagatggatggttttggtgttaatgaaggtattattgtgatggcagcgaccaaccggaaagatattttggatcctgccatcttacgtccgggacgttttgacagaaatgtggtagttggacgtccggatgtcaaaggaagagaagagattctgaaagtacatgcgagaaacaagccgctgggagacgatgtagatctgaaacagattgcgcagacaaccagtggatttacaggagcagatctggaaaaccttctgaatgaggcggcgattctggctgcaaaggaaaacagagtgtatattcagcagtccgatatccggcatgcgtttgtcaaagtcgggatcggaccggagaaaaagagccgtgtggtttctgaaaaagaacgccggattacagcatatcacgaggcgggacatgcgatcctcttccatgtactgccggatgtgggacctgtctacagtgtgtccattgttccgacaggaggagcaggcggttatacgatgccgcttccggaaggcgatgatatgttcaatacaaaaggacatatgcttcaggagattacagtgtctctcggcggacgtgtagcggaagaacagatctttgatgatattacaaccggtgcatctcaggatatccgtcaggcaactgcgatcgcaaaatccatgatcaccaaattcggtatgtcagaacgtcttggtctgatcaactatgacaatgacagtgatgaagtctttatcggacgtgattttggtcacacatccagaggatacggtgaaaaagtggcgggaacaatcgatgaggaagtcaaacgtatcattgatgagtgctatctgaaagcaaaagcaattctggaggagcatcagtctgtactggaagcctgtgcccagttattgctggaaaaagaaaagattacaagaagtgagtttgaagcactttttgagaagtaggtgtagaatggggcaagctgtttttaatgccgggcaggcattttaaggggcttgccccaaaggaggtttatatgaataaaaatgcgctgttctgtgatgggacatcggattatgtcatacctgcggaaccgggtatccatgaaaaagtcaggctgagattcagaacggcaagagatgacgctcaggaggtctgtctgatttcaggaggagaagcactgcagatgcagaagatatcctccggggaagtgtttgattattatgaaacaaaagtgcagcttacagatacgatgtttgtttattattttcggataaaaagcgagagtgaagagctctgctatcatcgatgtggcgtatcggaacatccggtggaatattacaatttccggatcatgcctggattttccacaccggcatgggcaaaaggcgcagtgatgtatcaaatttttgtagaccgcttctgtaatggagacccatccaatgatgtggaggatggagaatacgtttatatcggagagccggtctgtaaagtgaaagactggaatgaatttccggaggcaatggatatccgcagatttcatggaggagatctgcagggagttttggataaactggactatctggaagagcttggagttgaagtcatctatttcaatccactgtttgtttccccgtcgaatcacaagtatgatattcaggattatgactacatcgatccgcattacggcgtgattatagaagacggaggagaggttcttccagagggagaaaaggacaataccagagcgacaaaatatcagaagcggacaggggacattcggaatctggaggcaagcaaccgcctgtttgcaaaactggtggaggagatgcacacaaggggcatgcgggtgatccttgacggagtgttcaatcactgtggctctttcaataagtggatggaccgggaacggatttatgaaccgcagccggaatacgaaaaaggtgcttatgtcagtgcgcagagcccgtacagagatttctttcatttttttgatgaaagagaagaagcgtggccttataataaaaactatgacggatggtggggacatgatacgctgccgaagctgaactatgaagattctcccacgctggaggaatatattttaaacatcggaaagaaatgggtatcgccgccgtataatgccgatggatggcgtctggatgtggcggcagatctgggatacagcaatgaatacaatcacatcttctgggagaatttcagaaaagctgtaaaaagtgccaatccgcaggcgctgatattggcggagcactatggagatccgggagaatggcttcagggcgatgaatgggacagcgtgatgaattatgatgcctttatggagccgctgacctggttcttgacaggaatggaaaagcacagtgatgagcgcaggacagacttgtgggggaatgcagacaactttgtcaatacgatgaatcattttatggcaagcatgctgaccccgtcattacaggtggcgatgaatgaactgtctaaccacgatcattcccggttcctgaccagaacgaatcacattgtaggaagagtggcacagcttggaagcaaagcggcagaagaagggatcaatctggcagtgatgcgggaggcagtggcagttcagatgacctgggtaggagcacctacggtttattacggagatgaagcaggtgtctgtggatttaccgatccggacagccgcaggacctatccatggggacaggaaaacagagaacttgtagagttccataaagaaatgatccggatccacaagcgtgagaagcctctgcgtacaggttctctgaagatgctttcctggtcatccaatgttcttgcttatgcaagatttcaggaaggtgagcagatcattgttgtgttaaataacagtaaggaactaaaggaagtgacaatcccggtgtggcaggcggaggtgcctatgaaaggaaagatggagcgtctgatgtactcctgggaaaagagctatacgacagaaagagacatttatctggtggaggatggagagactgttgtcaatatgggaaaacattctgttctgatcatgaagccagtcagagaaatgcaggtggatgagtatgggaaagaaagtagcagtaattaacgatctctcaggatttgggagatgttctctcacggcagcaatttcagtgctttcagcgatgggcgtgcaggcgtgtccgctcccgacagctgtgctgagtgcacagacaggatatgaagactatcattgcgtgagccttacggaagaaatggagcagtttcggcgatcctgggaaaagatggaggcacggtttgacggtatctatacaggatttgcagcagatgaagagcagatcggtcatatgatccatattgcggagacatttcataagaagaaagcctttctgctggtagatccgatcatgggggatcatggatacaaatttgatatcttctccatagagttttgcagaaagatgcgggagcttgcgaagatggcggatattgtgaccccaaatctgacggagctttgtattctgacggatacagattatcggatgatcgaaaatatgacggacgaaaaacatcttcttacggtgatcaggcagctggcggaaaacctgaggaaagatggaccaagaactgttgtagtgacagggattcagttttgtgacaatgaagacgggatccagaagatgggaaatctggcagtgacgggaaaagagacacatcttgcagcattctcgtatgtaggtggaagctactccggaacaggtgatctgtttgcttccgtgctggcaggcggactggcaagaggagaaaatctgaagtccatgatggaacttgcaggaagctttatcgagaaagcgattacagatgcagtgaaagaagagattccgcgcaatgacggagtcgagtatgaaaaatatctgcatatgctgatgaagtaaataaaaaagctgtgtgcagcaggagaggtcctgtgtacgcagctttttgactattttgtaagaatttcaattccgtcttcttttacgagaaccatatattcgatctgtgcagacagtccgtcatcaatggtgtagatcgtccagtcattgtcctcatctacgaagaagtccgggctgccttcgttgatcatcggctcaatggtaaacatcattccgggtacgagcagcatctcgctgccctttggtgtgacatagctgacaaacggatcttcgtggaattccagtccgattccgtgaccgccgatatcaacaacaacagagtagccgtttgcctgtgcgtgggtattgatcgcatctgcaatatctcccagatgtccccatggttttgccgctgcaagaccaagctctacacattcttctgtaacacgcaccagacgtttggctcggtcggatacttcgccaatcatgaacatacgggatgcatcagagaaatagccgtccagaatggtagatacatcgacgttgatgatatcaccctcctgcaggatgatgttttcatccgggattccgtggcacacttcattattgatagaggtgcatacacttttcgggaagccctgataattcagaggagccgggattccaccgtgtgcagttgtaaaatcatatacgatcttgtcaatctcagcagtactcatgcctgcgcgaatgtgtgcggcaacttcatccagaacagccgtgttgagagccgcactttttttgatcttttcgatctgcgccggagtcttcaaaagctttctggaaggtacaatttcccctctgtccctgtgcagttttattttttcttcgatcggcatatggcattttttatattttttgccgctgccgcaccagcaaggatcatttctttccatgtttagttatctccttcaaatctgttttgttttacgatgtgtctattttaacacaatggaaagaaaattaccaatcggaaagtttgagaaaaattgagggagaatataaaactgttcattttcgcctgtttgtgataagataaaacaggaaataaagtcttttagcaccgatttctggtgcggaattgataaaatcaaagagtaggaggatacggatatgttacgaatcggaatgcttacaagtggcggagactgtcaggctttgaatgctgcaatgcgcggtgttgtaaaaggtgtttgcacaaaacgggatgatgtggaaatctatggatttgaagacggatacaaaggtctgatctatggcaactttcatatgctcacatcaaaggatttttccggaatcctgacaagaggcggcacgatcctcggtacatcgagacagccgtttaagttgatgcgtgtaccggacaaggacggtttggataaagtggcggcaatgaagcatacttatcataagttaagtcttgactgtctggtgatcctgggaggaaacggaacacacaagacagcgaatctgttaagagaagaaggcttaaatgttgtgacactgccaaaaacaatcgacaatgatctgtggggcacggatatgacatttggcttccagagtgcagtggatattgcgacagacacgatcgaccggatccatacgacggcaacctctcacagccgtgtgtttatcattgaagtaatgggacataaggtgggacacgtcacgctgcatgcgggaattgccggcggtgcagatgtgattctgcttccggagattccgtatgatatcgatgtggtgacggatgtgatccagaagcgtgcggcagcagataaaaagtttacgatcattgcggttgcagaaggtgcaatctcaaaagaagatgccaggctgaagaaaaaagaatataaagaaaagcttgcaaaacggaaatatccgtccatcgcctacgaactggcagagaagatccagcagaagacagacaaggaagtaaggattacggtgccggggcatacgcaaagaggcggttctccatgtgcgtatgaccgtgtatttgccacaagagtgggagcggctgcggcagagctgatcctgaatcaggaatacggctacatgatcgccatgaagaatcagaagattacaaaagtaccgcttcaggatgtggcaggaaagctgaaaatggtagatccgcaggatggaatcatcaaagaggcaagaaccatcggcatcagctttggagatcaataaaagatttggaaaacagaggtgtaatacatgtcgtatacggcactttaccgaaagttccgtcccgttgaatttgaagatgtcaagggtcaggaacatattattactacattaaaaaatcagattgaagcaaacaggatcggacatgcctatctgttctgcggaacaagagggaccggtaagacaacggttgcgaagatttttgcaaaggcagtcaactgtgagcatccggtgaatggaagtccctgcggggagtgcgcgatgtgccgctctattgcagcgggtacatcgatgaatgtgatcgagatcgatgcagcttcgaacaatggtgtggacaacatccgtgagatccgggaagaagtggcataccgcccgacagaaggaaagtacaaagtctatatcattgatgaggtgcatatgctgtcgataggggcgttcaatgcgctgttaaagacactggaggaaccgccggagtatgtgatctttattctggcgacaaccgaggttcacaagattcccatcacgattttatcccggtgtcagcattatgatttcaagcggatcagtattgagacgatcacagaccggatgcgtgatctgatgcaggaagagcaggtggaagtagaagaaaaagcgctgcgctatgtcgcaaaggcggcagatggttcgatgcgtgacgcattgagtcttctggatcagtgtattgccttttatctggggcagaagctgacgtatgacaatgtgctggaagtactgggagcagtcgatacggatgtgttcagcagacttctgcgcagtgtgatcagacgagatgtcccaaaagtgcttgatatcgtcgatgatctggtgatgcaggggcgggagcttacgcagcttgccacggattttacatggtatctgcgaaacttgcttcttgtgaagacatctgataatatagaggatgttctggatgtatctacagaaaatatgcagcagcttcaggaagaggccgggatggtggaagcggatatgctgctccgttacattcggattttttcggaattgtcaggtcagctgaaatatgcagcgcaaaaaagagtgcttctggaagtggctctgatcaagctttgtacgcctgccatggagacgagctcagattctattctggatcggatccgtgtattggaagaaaagctggaacagggcgttatatcaggtggtcaggaacgagttgtttatgtaaaggaagatggtcaggcaccggcggagccaacgccgagaccggaacttccaaacgcagtaccggaagatgtgcagcaggtagtaaagaatttcagaccgatcgcagatgaggcatcgggaatgcttcggacatacctgaaaaaagcgcgtctaagccttgcaggtgacaaccgtctgatgatcgtgatgccggatgcactgggggcagattttgttggcagagaagatagacggaaggaactggaaagtctgattgaaaacaggatcggcaagaaggtggaagtagaagtacgccacgtagaagaaggacgccggtttgaggatacatttgtagatattgagaagaagatcaatatggagattatagtggaggactgatttatggcaaaaagaggtggatttcctggcggaggaatgccgggaaacatggcaaatctgatgaaacaggcacagaaaatgcagcgtcagatggaagaacaggcaaaagagctggaagcaaaggaatttactgcgactgcaggaggagaagcggtggaagtgaccgtttccggtaaaagagaagttctaaaggtgaagctggcagaagaggttgtggatccggatgatattgaaatgctggaggatctgatcgtggcagcaacaaatgaagcgcttcgcaaagtggatgaagaatccagctctgcaatgtccaaactgacaggaggactcggcggaggaataccgggtatgttctaatccggacagaggtgaaaaagaatggattattacagtaatcagatcagcaggctgatcgaagaattttcacgccttccgggaatcggagcgaagtctgcccagagactggcatttcatattatcaatatgccgaaagatcaggtggagaatctggcaaagtcgatcgtggatgccagaaataatgtgagatactgtgcacagtgctgtactctgacggaccgggaactttgcccgatctgcagcaatccggaacgggatcagcggaccatcatggtagtggagactccaagagatctggcagcatatgaaaagaccggaaaatataacggagtgtatcatgtgcttcatggagcgatctctccgatgctggggatcggaccgggggatatccgcttaaaagaactgatggaacgactgcagcaggatgtagatgaagtgatcgtggcgaccaactcaagcctggagggggagactaccgcaatgtacatcagcaagctgatcaagccgaccgggatcaaagtgagcaggattgccagcggtgttcctgtaggcggagatctggaatatattgatgaagtgacgcttctgcgtgcactggaaggcagaacggagctttaacaggacagggaagagaaatcatgaacaaaaagaaagtgacatcttcggatgtggcgaaatatgccggcgtttcccagacgacggtttctatgattttaaataagaagtacaatgtttctttttccaaagaagtggtaaaaaaagtggaggatgcagcccgggagctggggtatgtgcttcccaagcgcagaacacagaaagaaagccgcagggaaaagcttctggtggttttctgcccgaatctgaccaatccgtattatgtcatgcttttgcagggaatcgaagcaagagcaacggagcaggggttcgggctgtttgtgtgtaatacccagagagatctggagttggaggagcgttatttaaagatgcttccctctctgaatccgcagggggtcatctacacctgtaatccgagcagctgctttatggagacagtggagcagttgtccaacaagattccctttgctgtcatcaacaatcagaatgaacggctgaatgtggatgcggtagagctggataattcaaagcttggcagaattatggcaaagcatctgctggaactcggacatacccatgtggcatatattgcgccgccgctgactgtaaggcagaagcagcgttccaagcgggtagaaggatttttgaaggagtttcagaaagcaggacttggagatcatgtggtgatcaaagccgcggatgagcagattgataaagatgtgccgggaatcgattcggaatatcggatcggatatgacctgacaaaggaattgctgaaagagcatacggatctgactgcgatcgtggggctcaatgacatgatcgcctttggtattttagatgctctgtacgaggagaaatacaaagttccgggagagatgtccgtgatgggatgcgacaacacattgtttgcgagaatgcatcatattgcgctgacaacagtcgaacatttcgtgatctataaaggcagagacgcctgcgatatcatcatgaaaaagatcaaagcccgcagtgagccgtatgccgggatcgagccggtgagcatctatcatgtggagtatgagccacagatcgtgatgcggggaacaaccggatatccaaatctgaaaaaaagaaaaattagtacaaaaaagtaaattattagtaataaaaattaacagtaaaaggcaaaaccaaagttagcagtagttttttcattaataatgtgatattattagtacggcaaaattactaataatttttgggcctattgacctgtttccagggagtctatataatcgaattataacaaatcgacgaagattttaaggagggacaggcaatgaaattttttattgacacagcaaatgtagaggacattaaaaaagcaaatgacatgggtgtgatctgtggagttacaacaaatccatccctgatcgccaaagaaggacgtgtatttgaagaagtaatcgcagagattgcatccatcgtagacggaccaatcagcggagaagtcaaagcgacaacagtagacgcagaaggcatgatcaaagaaggacgtgagattgcaaagattcatccgaacatggtagtgaagattccaatgacagtggaaggcctgaaagcttgtaaagtcctttcatctgagggaatcaagacaaatgtgactttgatcttttctgcaaatcaggcacttctggcagcaagagcgggtgcaacgtatgtatcaccgtttttgggaagactggatgatatctcggtaagaggaacagatctggttgcagagatcgctcagatctttgaagttgcaggaattgatacagagatcattgccgcaagcgtaagaaatccgatccacattacagactgtgcacttgcaggggctgatattgcaacagtgccttacaaggtaatcgaacagatgacacatcatccgttgacagacgccggaattgagaaattccaggctgattataaagctgttttcggagagtaaaagcaggaggcaatcatgaacaaattagaattgatgaaaactgcaaatgaagtccgcaaagggattgtcacagcggtacacagcgcaaaagcgggacatccgggcggatctttatcagcagctgacatttttacgtatctctattttgaagagatgaatattgatccaaaagagccgaaaaaagcagaccgtgacagatttgtcctgtctaaaggacacacagctccgggactgtattctgtactggcgcagagaggatatttcccggttgaagatttaaagacactgcgtcatacaggatcttatctgcagggacatccggatatgaagcacattccaggtgtggatatgtcttccggatctctgggacagggaatttctgcggcagttggtatggcgattgcaggaaaactggacaacgcagattacagagtttatacacttcttggagacggagagattcaggaaggacaggtatgggaagcagcgatgctggcagcgcacaaaaaactggataatctggttgtgatcgtagataacaacaatctgcagattgacggtgcgattgatgaagtcaactccccatatccgattgataagaaatttgaagcattcaatttccatgtgatcaacatcgacggaaatgattttgatcagatcgatgcagcattcaaagaggcaaagacagtgaaagggtgcccgacagcgatcattgccaagacgatcaaaggaaaagatgtttcattcatggaaaatcaggcaggatggcacggaaaagcgccgaatgatgaagaatacgcagtagcaatggcagatttggagaaagtaggtgaagcattatgtcagatgtaaagaaaatagcaacaagagacagttacggaaatgctttagccgaactcggaactgcacatgagaatgtagttgtactggatgcagaccttgcggcagctacaaagacaggtgtgtttaaaaaagcacatccggagagatttatcgactgtggtatcgcagagagtaatatgatgggtgtggcagcaggtcttgcagcagccggaaaggtaccatttgcaagctctttcgcaatgtttgcggcaggccgcgcatttgagcaaatcagaaactccattggatacccgaaactgaacgtgaagatcggtgcgacacatgcaggaatctctgtaggagaagacggtgcgacacaccagtgtaacgaagatatcgctctgatgcgaacaattccgggaatggttgtgatcaacccttctgatgatgtagaagcaagagcagcagtaaaagcggcttacgagcatgtaggacctgtttatatgcgttttggacgtctggcggttccggtaatcaatgacagagaagattacaagttcgaactcggaaaaggtgttgtgctgcgcgaaggaaaagatctgactatcgtggcaacaggacttccggtttccaactgtctggaagctgcagagaagcttgcagcagacggaatcgatgcgaaagtgatcaacatccatacgatcaaacctctggatgaagaactgatcgtggaagctgcaaaggcaacaggaaaagttgttacagtggaagagcactccgtaatcggaggacttggaagtgcagtatgtgatgtcctttcagaaaaagcaccgacacaggtgatgaagatcggaatcaatgatacgtacggtgagtccggaccggctttggagctgattgcaaaatacggactggatacagaaagtatctatcagaagatcaaagcgtttgtataaaatttagaaaagagaaatcccctgccggcagaaacaaattgttctccgtcaggggatttttactttggcactagattgtagccaaagtggaatgtccatatcgttacggttcctaccaaccaccccatat

SEQ ID NO: 6994 - DNA, 30111 bp, Unknown
  gut microbiota DNA sequence
ggatttgcggtgttgccgcacaggaatattcaagaagagctgaagacacttaattatgagaattttattaagagtagacatagtattagacattttggttcagaagcagtagatgttgaacttcttagggaggcaattcagatagcgcagtatactccttcggcatgtaatagacaagggtgggtaattagaatagttgaaagcaaggatgcaatagatacaattttagaaaatcaaaatggtaatagaggatttggtcatgaaattgataaactagtcatgattacatgtgatgttcgagcttttcaaaagaatagggaactttttcaaccatatatagatggaggaatgtatgcacagagtgtattaaacgctttgtattataagggaattggagcaattccgttgagtgcatccttagccggctcacaagaaaaaaaataagaaaaaaagtaggaattaataaatcagaagtttttattttgtttataggtgtgggcacataccctgattcgtgtaaaacaactcgatcagagcgtatgcctgtcgatattagattagtataattatatgaatatggagatccgataatgaacaagaaaaagattatgttggtctttggtacgagaccggaagcaataaaaatgtgcccattagtaaacgagttaaagtcgagagagtctttagaaactatcgtgtgtgtaactggtcaacacagacagatgctagatcaagttttgaatacgtttaatgttgttccggattatgatctttccatcatgaaacaggggcagacactctttgatattacaataggcattttggagaaacttaaagaggttcttgaagaagtgaaaccggatgttgtacttgtgcacggagatacctccacaacatttgtaactgctttagcttgtttttatcttcagattccggttggtcatgtagaagctggtcttcgtacctataacatctattctccgtatccggaagaattcaatcgccaggttgtaggcattatttctcagtataactttgcaccgactcaaatggcagcagataacttgatgaaggaaggaaaagatccttcaaagatttttatcacaggtaatactgtaattgacgcaatgcagcacacagtaaaggaagattattctcatccagaacttgattgggttggagatggaaaacttatctttataacagcgcatagaagagaaaaccttggtgagccaatgcacaatatgtttcgtgcaatacgccgtgttcttgatgagcatccagaatgcaaggcagtttatccaatacatatgaaccctgttgtaagaaaggcagctgatgaggaacttagtggatgtgatcagattcatattattgaaccaattgaagtgtttgattgccataattttgaggcaagatgccatctatgtttaactgattcaggtggaattcaggaagaagttccttcttatggtcgtccagttcttgtaatgagagatacaacggaaagaccagagggggtgaaagctggaacgcttaggcttgtaggaacagatgaagaggtaatttatagaaatttcaaagaacttcttgaaaatcaaaaagcgtatgatgctatggctaaagcatgtaatccttatggtgatggagatgcatgtaaaagaattgctgatattcttgagggaaaagaatatcggccttggattgctgaaaattagtaagtatctggactttacataaatgttaatattaaaatggaaagtattattccatgaaaagattcacagtgacttcaactaagtttgtaaaaagcaaggttgaacatttaccaatatttaaagagtcagggaatcttgataaaaattccctgactttttctgcttaatcacgtctgaataaatcacgtgtatagactttatcttttacatcatccagacaagaatcatatcgatttgcaatgattgcctgagagatgttcttaaattcttttaaatcattcacaacacggcttccaaaaaaggtagattcctcaggaagtgttggctcatagattactactgtagcccctttggccttaattcgtttcataacaccctgtatagaagactgacggaagttatcactgtttgatttcatagtaagacggtacacaccgataacacattgtttttcctggtcaggagcaaattcaccacgattgtaataatcatagtatccagtcatatgaagtacctgatccgcaataaaatcttttcttgtcctgttagattcaacaatcgcagacatcatattctgaggcacatcctggaagttggcaaggagttgctttgtatcttttggcaggcagtatccgccatatccaaaagaaggattgttataatgagttccgatacgaggatccaggcagacaccgttgatgatctcctgtgtatttaatcctttggactctgcgtaagtatccagttcgttgaaataagaaacacgaagtgccagatacgtgttggcaaagagttttacagcttctgcttccgtaaatcccataaataaggtatcaatattttctttgattgcaccttgctgcaggagtgctgcgaagagatgtgctttttcggcagattcttcatcacaggacacaatgatgcgggacggatacaggttatcatacaaagcctttgactcacgcaaaaattcaggactgaagatgatattcttcgtattgtattttgctctgacagacgcagtatatccaacagggatcgtagatttgatgatcatcatggcatccggatttaccttcaggacaagttcgatcactgcttccacagcagagcagtcaaagaaattcttcttgctgtcataattagtcggtgctgcaatgataataaagtcagcatctttatatgcagcttctccgtcaagcgttgcagtcagatccagttccttttcagccagatatttctcgatatattcgtcctggatcggagacttcttgttgttgatcagctctactttttccggaataatgtcaactgcagttacgtgattgtgctgtgcaagcagcgtggcaatagaaagtcccacatatccggttccggctaccgcaatacgatacttcttatctagtaccatatctttaggagtttcctcttcttcgacaaacagatccgtcacttcaaatccaagattttccccaagacgctgcagctgatcaatagaaggaatataatcagaattttccagtcttccgatcattgcccggttgattcctgttgcttcagcaagctgaacctgagtaagtccttttgcttttctttcgttgataactgtgttcaccagtttatccatagataattttttcataaatacctcaaaaaccagttttaaatatcattttatgtaattatatgcaagtaaagtttgttttttacaagtagtatgatatcaaaaactggattaaatgtcaatgagagagaaaactgaagataaacatacagtgtaatgaagtcaatccataacgtatagtagttcagcggactgattaatttccagtaataattgatactcaatcagtatgaaaattgtgaaaatttaatggaaaatcaaatgttttatgttaaaatttaaatataagtggtgttcataattgtacagggtgaatgattctaacaggaggattggaaacatggagtgcgtaatcaaaagcagagaagtggatgcatttagctggaaatatcaggagtcttcagttatgacaacatcccattttatcacgttgccatttgagacaaaaacggaaaatattattttgggatttgacatgtttcattttgaatatccggataaggatcaccatgtaaaagatatggggttaaatatccggtataatgtattgaaagaaagggcggatacgattatttttcatgcagacatgtatatgcgggattcatcaggtcattttatgaagtatccaaagggagatctgaaaataaggttcaacgtgcttgcatatccacatacaacagaacttccaaaagatggagtgaagattggtgcgatagatacatttgaaatagcatatgcagatggcagagatcatcatgtgtctggttatcaggtaaattcagaaaaaggaacaagttatatttacgataattcgggcaacaatggaaagaaaacatccacccagaagacgatcgtgattccacataaggattttgaggaattaaagaaacagccggttcattttattacaggatttaatcttgctatggaaagtggggaccatcatgtgagaagtacaggatttgatgctcagaatcaggaaaacatgtttgatttgtcagatgattctggtcagcatgcttctgcaatgttgtcttatcttacatatgatatttaaaaagggagtctatacaataagtggttttatggtaaaataatcaggaggcaaaaggatattcatttagaaatgccaattaaaattatattttctatttttcatgcgtatgaagctttttgaaaagcagcagaaagaaaaaatatattttaaaataaaggagtgatgtaaattggatatctatcagattattatcacatattacccgatatggtcaccgtttgaatggattatttttttatcggttcttgctttggcggtgtgtattgccgtagttctgtataaaaaacagaagattaccatgcggcaatccatagccgggatactgttattgctttatttgcttttagtatttggttctactgtgtttacaagaatgccgggcgagcgccaataccagttggaggtgttctggtcatggaagaagatcctgcattatattgagcagcatggaatggttacaggcacagggcttttgcgggagaatctgttaaatatcgtgatgttgtttccggcaggaatgttacttccatttgtgtttggcaacagaggcaaaatcagatggtggtatggtttgctgtttggtatttttatttccggatgtatcgaagggttacagttgattctgtgccggggattatttgagtttgacgatatgatccacaatagcctgggatgtatggcggggtgtgcaatcggggcgggatgcctgaagaaattcaataaaaagtgaggcgtaaatgtgcggttcgccatgtaagttttaccacttttgtttagtcttatcaaagctaagaaaagtgtattgacttcataaccgggtttgctataatcatcttatagaattcctctgcaaatggaggaataaaatgggaagaacaaaacgattaaaggaactcacgatcaaagataattttatgttcggcgcagtgatgatggacgaagataattgcaaaggtcttttagaaagagtgttggagatacagatcgatcgagtggatgtcagcaaagaaaaaagcatagtatatcatccggagtataaaggtgttcgcctggatgtgtatgcaaaagatgagaagcagacgcgttataacgtggaaatgcaggtggagagaaagccggcacttggaaagagaagccgttattatcagagtcagatggacatggagatgttgctgaccggagaagattatacggaacttccgaatacctatgttatttttatctgtgattttgatccatttggaaaagacaagtatcgatatacctttcggacaacgtgtcaggaatctgaaaatgtggatttggaagatgggcgaaccactgtgtttttaaatacccgtggaaagaacgaaagtgaagttccgggagaattggtcacatttctgcagtacatgaaagaggatcttgagggaagcgaaaaggagtttcacgacccatatgtggagcagttgcagaagtttatccgcaacgttaagggaagtcgggagatggaggaacgctttatgatttttgaagagatgctgaaagaagaacgggctgccggatttgcaaaagggcgtgctgaaggagttgcagaggggcgaatttctgagagtaaggatacgttactcttatttttgcagaatcttggaacggttcctaaagtactttcggatcaaattgaagaacaaggtgatttggatgtactgaaagagtggatcaggatggcattccaatcgaaatctgtggaagaatttgcaaagaagataaaataagaatctacatcggagaatatccgatctaatatcatcagccgtggctgttctggccggggctgatgataaaaaggaacaagtcaatgccgtttcgggcagatattcaaagaagagcagaggaattctatattttgtagtttgatgattagcataaatatatggtatctgttataatgagagttagaaagtgtggaaatactgaaaggaaggaatcggttttagaggacgaaaggggatgatatgccatgggcatttatttaaatccgggagcagcagggtttaaaatgtctttaaattccgaaatatttgttgataaaagtgaactgttagatgtgacaaatcgctatgtgaatacacaacagaggtttatgtgtgtcagtcgtccgaggcgttttggaaagtcaatggcagcagatatgctggcagcctattatgattgcggggatgatacagaggaattgtttgaaggactttccatcagtcagtgtaagtcttaccgaaaacatttgaatcagtatgatgtgctgaagattaatatgcaggaatttttaagcagatcagatgatgtggaagggatgcttacattaatgcaaagaagaattctgtctgatttaaagcagaaatatccggaatatgtacgggaggaggatcttgtctttgcaatgcaggatgtgtattctcatacaaaacgttcttttgtaatcttgattgatgaatgggattgtttgtttcgtgagtatcagcaggatcagaaagcccagaaaaagtatctggattttttgcgtgcgtggctgaaagatcaggataatgtagcatttgcttatatgacggggattttgccaattaagaaatatggttcccattcggcattgaatatgtttacggaatattctatgacagaaccgggggagctggctgcgtattttggttttacagaaaatgaagtaaaaaatctttgcatggaatatggaatggattttgaagaagcaaaggcgtggtatgacgggtatggtttgattacgcacaaacaggacagagatatttgctattctatgtacagtccaaaatctgttgtggaagcaatgcttcgccacaaattcggaacttattggaatcagacagaaacttatgaggcgttaaaagtttatattcagatgaatatggatggtttgaaagatgcgatagtcgggatgctggcaggagagagtattcggattaatacgggaacattcagtaatgatatgactacttttgctaccagagatgatattctgactttattggtgcatttaggatatttgacttatgatggaatcttagaatcagtgagtattccaaacaaagaggtttccaaggaatatgtgaatgctattagtaccatggattggaaggaagttattacctctgtagaggaatcccgcagacttctggagtcactttggaatatggatggtgaagcagtggcggaaggtattgatcgggcgcatcgtgaaatctctattttgcagtataatgatgagaattccctaagttgtacgattaatctggctttttattttgcaagagaatattacacgattatcagggaatgtccgtcaggaaaagggtttgcagacatttgttttatccccagaaagttgcatgcagataaaccggcagtagttatagaattgaagtggaataaaagtgcgaaaggtgcgatcgatcagattaaagagaaacaatatatagatgccttgaaggattatgaaggaaatctgttgctggcaggaattaattatgacagggagacgaaaaaacatacttgtatgattgaaaagatgaatatatcataaaagaaaagagcgaggagagggacatatgaaaagtttattgattctcggagcaggcggcttcgggcagatggtgaaggaaacagcgatccagctggggtatgaggagatcgtatttcttgacgatgcggcgtttggaaaggacgtagtcggaaagtgctgcgactatacggccaggtatggagaatacaagatggcagtagcggcatttgggaataatcatacgaggttattctggacagacaaattgctggaggcaggatatgaggtgccatcgatcgtgcatccgtctgcaattgtgagtccaagtgcggttttgggacctggatgttttatcatgcagcgcgcggtagtgaatacgcatacccatgtggatcgggcggcgcttgtcaacagcggtgcagttgtggatcatgattcgttggtatgcgccggagcgcatgtggggcttggaagtgtagtaaaagcaaactgtacgatcgagcaggagaagaaggtagaggcaggagaagtaatcttctctaccaggagaaagatcgaaggtgtggacagcagagcgcttgaggatgcactgtatgcatttggattcggtccccagtgcagttatgtaaaaccgtttggggaagggcacatcaatgagacttacgcagtatatatgccgatggaagacggcacagagaagccattatacgtactgcagagaatcaatatcaatgtgttcaaagagcctggtaaggtaatggagaatattttcggagtgacagagtttttacgggatgtgatccgtcgggaaggcggagatccggatcgtgagacactggcttatatcaagacgaagagcggagagacgtattttgaagatgatgaaggacagccatggcgctgtgcgaattttatcaccaattctgtgtgctatcaaatggtggagcgtccggagcagttttaccagtcagccagaagttttggtcattttttgaagcaactgggtgagtatccggcagagagtctttatgagacgattccgaatttccacgacacggtaaaacgatttgaagcgtttgcacaggccgtagagcgagatgtgaagaaccgcgcccgtctgtgccgttcggagatagaatttgcactggcgagagaaaaagactgcggagctctgatgagcaggatggaagcaggtgttctgccgctgcgtgtgacacacaatgatacaaaactgaataatattttatttgacgcagagtccggaaagggattgtgtattattgatctggatacgatcatgccgggactggcagccaatgattttggagattcgatccgttttggcgcatctacggcggaagaagatgaacgtgatctggacaaggtccattttgatattaatctgtatgaactgtatgtgaaagggtatctggagatggcaagagatgttctgacaccggaggagttagagagtcttccgtggggcgcaaggctgatgacattcgaatgcggaatccggttcctgatggattttctgcagggagatacgtatttcaagaccgcatatccggagcacaatctggtccgtgcccgtacacagtttagactggtgcaggagatggaagatcagtttgatgaaatgtgtcggattgtgagagagggctaggaggatggatcgtcttcttcccgtttggatacaattactaatcggcagtatagtataatttctgttatgattatggaaataaaggcaatgccgcctatgatcaatcgttccattttggccccctcctttgctcactggcaattatgatttttgaggaatatatagtatagtatattcctcgatttgtttttctatacttgctaaaggtgatttttgctgtggtttacggaaaatcggatctttaaaaattgacaaaaaaaatcataagtgataatcttaaatggaaactgtaaatttttatagcagagagggaatttggatgagtggatatattgatatgcactgtcatattctgccggaagtggatgatggagcacagagtatagaagagactgttcagatgcttcggattgcataccgggaaggcattcgctgcattattgcgacacctcatcaccacccgaaacggggaatggagcatcctgaaagacttagaaaaaaactgaccatagtaagaagagaagcaaaaaagatagatgagaaatttcgtgtatatttaggaagcgaaattttttttgggcaggatgttgcagaaaaattgaaatcaggtcgtgcgctgtcgatgaataagaggcaatgtgtgcttctggagttttctcctactgacagtttttcttatattcagcaggggatacaaagtgtacagatggccggatatgaggtaatactggcgcatgcagagcgttatccatgtttgttcaaggatttggaccagatcaggtatttgtgggagatgggaacgcggattcaggtgaatgcaggaagtatcaccggtgacagcggaagatcggcaaagaagttcgtaaagcagcttttgggagagcatatggtacattgtgtgggaacagatgcccatggtgtggaccacaggcagcctaagatgaaaaaagcagcggaacatgtagaacgaaaatatggagaagaatacatgaggaggatatttttcagcaatgccaaagagttgttgagaaaaagaagagaaaatgaatcagaataacacgaacatgggaatggaaaatgatgaaataacaattgatctgatggacttatttcaggttgtgttcaaaaaactgcatctggtgcttcttgccggaattatcgcagctttagtggcggttttagtgacaaaattgtttatgacaccggtttatacatctacgacaaagatgtatgtattatcaaaacaggatgccaattcagcggttacatccagcgatctgcaggctggttctcagttgacgaaagactatatggagctgatcaaaagtcgttctgttatggagcaggtgatcagtcagctgcagttggatatgagcgtagacaagctgagcggggagattacggtatccaatacagcagatacccgtatcctgagtatttccgtggaaaatgagagcccaaaactggcaaaggaaatagcagatgcagtgcgtgagtctgcaagcgttcagattacgcagattacggatgcagatgcggtcaatatggttgaggaaggtaacctgccaaagaatccgacttctccaaatacgatgaaaaatgccatgttaggcggaattcttggaatatttcttgcactgggagcgattgtactgatctatatcttagatgatacgatcaagacaccggatgatgtagaacgatatctgggactgacagttctgacatcaattccgattgcgtcaggaacacctgccgcaaagaaggtcaggggattgtcagcacggaaatatacaaaaaggaatggaaagaagtaagcgggaaggaaaaagaagatgcgggaaatagtattaaatggtctggaaaaagattttcgaagtaatgaagcgtataaaaatctcagaacaaacattgaattttcaggcgaggagaacaaggtattagtatttaccagttgtacaccgaatgagggaaagagtacggtttctctttcagttgcgtcatcgctggctgaaagcggaaaaaaagttctctttattgatgcggatttgcgtaaatctgttttggcagggcgtcacagagtacagggcgagttaaaaggattgagccactttttgtccggaagggcaaaggtggaggatgtagtatgtaagacccaaatagaaggtctgatggttatttttgcaggaattataccgccgaacccggcagagctgttagggcaggagcgatttggaaatttaatctccagcggaagaaaggtgtatgactatattatcatcgatgccccaccgcttggaagtgtcattgattcagcgatcatagcgagagtgtgtgatgcttccgttctggttatctcagccaatgcgatcagtcataaatttgccagagtagtaaaggaacagctggagcgttctgagtgtccgattttgggtgtggtactgaataaagtggatatgagccagaacaaatattatggcaagtattatggaaaatattacggtaaatatggagaaaaatagaaaaggaaagcggtcatgaaacgaggatttgtgggggctatattggcgggcgtatgtgtggtgttgggagttgccgtggcatacgtaagttcaaagcaggatagaacggatcctgttattacggtaagtgaggatgcacttacgtacacagaaggagaagggacagaaggattgctgacaggagtgacagcaacggacaaagaagatggggatcttacaaaggatatctttgtggaaaaagtggttccgatcagtgagaacaaagcaattgtatattatggggtattggataaaagtcagaatgtaggaacagctacaaaagaggtagagtattttccggcaggacaacagcctgcggaacagcctccgcaggaaacggcaccggcagcggaagcagctgcacagccgctggctccaaacggggagcgccctgtgatacagctgaccacaggtactgcggatattccggcaggaggaccgtttgatccgctttcatatgtacagggagttgttgatgatgtggatacagcagatgtgttatctgcatctattgcggtggaaggtgcatatgatatttccaagccgggaagctaccagctgacgtattttgtgacggacagtgcaggaaaccagtcagatccgcaggttttgactttgacagtacactagaaggagtgttacaggatggaaaacaaacgaacagaagcaaaaagtagttaccatgtaggcggaatgagtattgtattcgttcaattggtattgtctgtcttatttttggtactggcaagagagaacggaatgattccgggaaaatatctggtgccgattggggcaggccttttggtgttttttggaattgcgtttggtttacagtttttgaggggaaagaaatatatagttggacttgtgatcagtatcctggtggatctgattctggtcggtggtattttttcgatttataaagcagacaagctgttggttcaagtagggggagctacgtataagacagacagtatggttgttgttgtccgggcagatgactcggccaagacattggaagatgcaaaagattatcgctatggaatccagacaagtgttgatgttgagaatacagacaagatgctggaagatgtagagaaaaatgtgggaagaaccgtgaaagtggaagaatattctacaattcaggaagaggcagaggcacttctctggggacggatcgacgcagcgatttataatgaggcactggcaagtgtgattgaagagagtattgaagattattcctctcaggtgaaagtgttataccagtatggtattaagacagagattgttcaggaagaagaaaaaaatatggaagagccgtttaatgtgtatatcagcggaattgacgtttcaggtgcaatttcaacgacaagccgcagtgatgtgaatattattatgacagtgaatccgaatacacataagatcctgcttacatccactccgcgagattattatgttacgataccgggagtttccggagagcagagagataagctgactcatgcaggaatttacggagtagataaatcgatggagacgctggagaatctgtatggaattgacctttcttattatgcaagagtaaactttacatcgctgatgacgatcgtagacgcactcggaggtgtggatgtgaattcagagtatgagtttacggccggaggatatcaatttaacaagggtgtcaaccatctggatgggaaagcagcgctggcattttcaagagagcgatacagttttcaggatggggataaccagcgaggaagaaatcaggaggctgttctgacagctattttgaataaagccatgagtccggcgattctgttaaatgcctcatccattatatcaagtgtgtctgacagtgttgagaccaatatgacaagtgatgagatggcaaaattcatcaatatgcagctttcagaaggtgcaagctggcagattgaatcgacagcagctgtgggaacaggagatacgcaggcatgcttttcttccggatctcagccgttatatgtgatgtggccggatgaagcgactgttgcgacgatttcacagaagatgcagcaggttttaggcggtcagtaacaatatccgacatctttcgtacaatatgccgaagaaattttgtgttagccgaatttcttcggcattctgtcgtttttcactttctttttaaaagtagataaagtataatgaagctatacgaaaaaacagcagctgtgaggtgggattatgggaagacagaaaaccgtacaaaagaaattacagccatatgaaatcggagaattagatcagtatcttttcggacagggcacgcactatgagatcttccgcaagatgggagcacacaaggctgtgcagaagaagcaggaaggtgtctattttgcagtatgggcgccgcatgcagcgagagtgtccgttgtaggtgaatttaacgcatgggattttggggcgaatgagatgcatcgtcaggagccgcttgggatctacacttgttttgtgccgggagcgcaggaaggggatttgtataaattctgtatcgagacacagacaggagaacggatttttaaggcggatccgtttgcaaattatgcggagcggcgtccgggtacggcttcccgagtgaccgatatttcgaatttgaagtggtcggacgagcagtggctgcagaagcggaaaaagtgggatcaaaaggagaatccgctggcgatctatgaggtacatatgggctcctggatgcgtcatccgggcacagaggatgagggattttatacctatcgtgaatttgctcattcgattacagattatgtgaagaagatggggtatacccatgtggagctgatggggattgcggagcacccgtttgacggatcctgggggtatcaggtgacaggatattatgcgccgacttcccgttacgggacaccgcaggattttgcctatatgatcaattatctgcacaggaatggaatcggcgtgatcctggactgggtaccggcgcattttccaaaggatgcgcatgggctggcggactttgacggaacgccgacatttgaatatgcagatccgagaaagggcgagcacccggactgggggacgaagattttcgactacagcaagccggaggtgcagaatttcctgatcgccaatgcattattctggatcgagcattatcatgtggacgggcttcgtgtggatgcggtggcatcaatgctgtatctggactatggaaagcaggacgggcagtgggtgccgaaccagtacggcggcaatcagaatctggaagcgatcgcgtttttcaagcatttgaacagtgtggttctgggaagaaatcaaggtgctatgatgatcgcagaggaatctaccgcgtggccgaaggtgacaggtgcgccggaggatgacggtcttggattcagtctgaagtggaacatgggctggatgcatgattttaccgaatatatgaaattagatccgctgttccggaaaggggcgcattatcagatgaccttttccatggagtatgcgtacagtgagaattatatcctggtgctgtcccacgatgaagtggttcatctgaagtgctcgatgctcaataagatgccgggacttggctttgacaagtttgccaatctgaaagcggcgtatgcatttatgacgggacatccgggcaaaaagctgctgtttatgggacaggagtttgcgcagcttcgggagtggagcgaagagcgggagcttgactggtatctgcttgcagaggaaccgcatcagcagatccagaactggtaccgtgatctgcttcatctgtacagacacaataaggcgctgtatgaactggatacggatccggcagggtttgaatggatcaataaggacgataccttccgcagtattttcagttttgtgagacactccagagataataagaagaatctgttgtttgtctgcaactttacgccgatggaacgtccggattaccgggtgggtgtgccgcgcagaaagcagctgaagctgattttggacagtgatgatccaaaatacggtggaaacggtgtggagcgtccgaaggtatataagccggtgaagcaggaatgcgatggtcagaagtattcgatcgcatatccgctgcagccatatggagtggcagtgtttgagttttgaaaatagcgttgagcacaaagagataaaatacgacaggagagcgaaaaaagaagctcttctgtcgtattttgtttgaggaagtaaaataaaatcttaaaatacgaattttatattaaaaataaaaaatattttttatgaaattgaatataaaaattgaaacatggaaaaaatagtgttatactggctgtaaaaaggaggcgataaaaatgctatgtcagttttcgtttcagaattttaagtcatatagagatgaaactgtttttgatttgcaggcaactgcaattccggaattcaaagataatttgattgtgaaagataagtgtagtgatcttttgcctgtgagtgttatttatggaccaaatggcggcggaaagacgaatttgatccgagcgttatcttgtcttattacaacagtggtgagaccgattcatgatttaggaagtactagaaagagggtcattatgcagcaaaaggttgtcgcagagccttttttatttgatagtgaatcgaaagatgagcctactgagtttgaaattttctttcgtacagaaaaatatgagtaccgttactatttagctgttttaaaagatgaaatatcagcagaaacattggatcggaaaacaataggaggcaaaaagcctgcacatattttttatcgtgacggcgaagagcttactttaggaactattttaagtaaagagaatgtaaataccaaagtgaatgagaaaatgccatttttatcttttttggcaattaattataatatacctgtgataacagaggttcaagagtggtttgagtcatgtatcattcgtaattatgcgaaccctgttgcagaattgcagattatggtatctgataatgaacagacaaagaatcagattattatgttgctgaacgaaatgggcattgatgtagaggattatagatatgatgaaaaggaagagcagttatatactgtacgaacaatttcgggtaagaaatatgaattgccgtttaatcatgaatctgatggaacaagaaagttgattgcagcgcttccggttatacttgtagcattacaggaaggacgtctggtaattattgatgagttagatgcaaagctgcatcctaagcttttgcgatacgtaatatctatgtttaagaataaaaaaatcaataaatatggagctcagcttttatttacgtctcatgatattgctacaatgaaaaacacagtattcagaagagatgaaatatggtttgcagctttggatgaaaaccatagcagccaagtttattccttgtatgaaattagacgggaagacaatgaaagagtgaataatacagctgcatatgataagcagtatttggaaggtaggtatggtgcagatccttatttgcagaacatgttgagtgggggtgagtggatttgagcctaaaacctccgaaaaaaagtgatttagataaaaaatggatgaaaaagagattggatagagctatcaagatccagccagagtatcaccttattgtaacagaaggaacagatacagaacctgaatattttggttcaataaaggatgttataaataagaaatatccagagaagataaagttagatgtatatggtgaaggtgataatacgattagtttatttcagaaagcgaaaactcgtgcggaagaaagttcaaatgtatacaaacatgtttggattgtttatgatacggatgattttccggcagatcatatagattctgttttgcaatcttgtgatacagatagtaatgatgaaacaacgtttcatgccatttggtctaatcagtgtatagaattatggtttttattacatttttcatatatgcagtcagatattcatcgagaagaatattggccaaagctaacggagtgtttaaaacaaattggcgctggtgagtatgagaaaaatcgtaaagatatgtatgaaatcttacatccgtatatggaatatgcaataggaaatgcaaaaagattgaatgcgtcaaatgagggaaaattaccatctaaagcagcacctggaacaaaagtttatgaattgattgaaatattaaaaccgtatttggcagaagagtagtaagggaaaatatccatggggaaatcttagtttgatttgctcatggatatttttatgtgtgtctggcggtcgcaaaatttttattttacgctggcaagataaaaagcatacttcaatacagagccactatagaatatctatttgatttgaattattaaaaatacacaaaaataagggcttaaatccatgaaaaacaactttaaaattgttgaaaaattacaaaaaacaaggaaatatactaaaaaatcaatagttaagaagcttgaaaaagtgataaatctataaaaaatagacaaaaacagggctgcaaaatacgatgaaaaacagaccgttcacgtaagaaatcgttactgttcgcgaaaaaatggtatgattcagccatggaaaaggaaaggacgtaagaagaaatgagaaagattgcatttaatgacggctggacatgcagacacgccggagattcgggaaagggaaaaccggttacgatccctcatgatgcaatgctggatgaaaagcagacgcaggagagcctgggaggcattaacatcggctggtttgaaggatttgactatgtgtatgagaaagaattttctgtaccgcaggaatatgaggatttcagacttgtctttgaatttgagggagtctaccgcaatgcagaagtgtatctcaacgggaaaagagcaggatttcgtccgtatggatatacaaatttttacgtagaggcaaatgagtttcttcattttggaatgaaaaatcagatacaggtcattgcccgcaatgcagatcagccaaacagcagatggtattcgggagcaggaatataccggcctgtatcgttatatatgctgccaaagaagcatatcggcatcaatggggtaaagatttccacagtcagtatccatccggcagtgatcgatgtaaaggttgagacatctgcatcgggagaactggaactggaaattttcgaaggggagtctttggtatccggtcaggagccggtcgcaagcgtgaagaagtctgcggatggaaattttcagatgcagctggaaattccggatgcgaaattgtggagtactgagtttccgtttttatacacatgcagggtgcggtttgaagaagatgaagcagaggaaatattcggaatccgtacgattgagtggagcgcagagaacggatttttgatgaacggtgaacgggtgatcctgaggggtgcgtgtatccaccatgacaacggtgtgctgggagcctgctgttatccggaggcagaggaacggaagattcgaattttaaaggaaaatggatacaatgccatccgctctgcccacaatccttgttccaaagcacttctggatgcctgtgacaggcgggggatgctggtcatggatgaattcgtggatgtgtggtatatacacaagacggagtatgattatgtaaatcactttgcaaaatggtggaagcaggatttaaaagatatggtcgaaaaggattacaatcatccttcggtgatcttatattctacaggaaatgaggtttctgagacggcgcaggagagaggaatccgtctcacgggacagatgacagaatatctgcacagtctggatgcaacaagaccggtaacctgcgggatcaatatcttttttaacttcttaagttccattggcttcggcgtttacagtgacaagaaggcgaagaaagaagcaagccgatcgggcgggaagaaaaaggcagtaggaagtgaatttttcaataatctggcagggattttcggaagtaagacgatgaaaatcggggcaacgcttcacggctgtgatgtaaaaacaagagatgcctttgccaatatggatattgcaggatacaactatggtatctaccgctatggaaaagatctgaaaaaatatccaaagcgtttgatcctgggaagcgaaacattctgttctgacgcgtatgctttctgggagatggcgaaaatacatccgaggatcatcggagattttgtgtgggcaggaatggactatatgggagaagtcggtgtcggtgcgtgggaatacagtgattatgcgccggatttctcacatggagcaggatggatcactgcaggaagtggaaggatcgatctgaccggaaaaccactggccgaggctgcctatacgaagacggcatttgaactgatggaaaagccggtgatcgcggtttgcccggttaatcacacgggggagaagcattcgccgtcggcatggaagatgagcaatgccattgagtcgtggtcctgggatggatgttccgggaaaaaggcacaggtggaagtgtatgcaagagcagacagggtggagctgtttatcaacggaaagtcggttggaagcaagaagatgaaaaatgactgcagaacttcttttgatgtgatctatgaggagggcaccattgaagcgatttcgtatgatgcacagaaccgggagattgcgagaaatgtgctctatacagcggggaaagaaacgattttaaccggaattccggaagaaaaagagacggaagcaaaaaagctgtgttttgtgaggctgcagtatacagataaaaccgggacagtcaaaccattgaagcggggaacattggaagtaaccgtagaaaacggagaacttttaggtcttggaaacggatgtccgtacaatgagcggggatatcggactgcgaaaacggatacgtattacggagaggcgctggcagtgatccgggcaggagagtccgggacggttaatgtacaggtatcggacgggaaatatgcgtgtgcggtacagattccggtaagaaataaagaagaggtggaagaatgctgaaaataagcagactgacagtagaaaatatggaaacaggatgtgtgaccgataatccgcagccgagagtttcctattgtctggaaagtgacagacaaaatgtaacattgaaaaaagcggtgatttcgataggagactggaagaaagaaaccgattgccagattgcagtcccgtatgagggcagcagattacagccgtttacaaaatatacggtgcgggtggaagcagaggatgacgcgggagagcgtgcctgggccagcacggaatttgagacgggacgtatggatacaatctggtccggacggtggattacggacggagagtatcggtttaaggaggcgaagatttctccgaagacgatgacatttcgaaccaggttttcctgtgaaaaagaaattgccagtgcgagactgtacgtaacggcgctgggaatttatgagctgttgttaaatggagagaaagtcggacaggattattttgcaccgggatttacgtcctactggaatcagctgcagtatcagacttatgatgtgacagatatgctgaatgatcgaaacgagctgcttgctgtggtcggcggtggctgggcagttggctctttcacctataaaagacggaacagagtgtatgcaaagcgacaggcgctgcttggagagctgcggattttgtataccgatggaacgggagagacaatcgggacaaatgaagagtgggaagtaacggaagaaggaaattataaagagacagagttttacaacggggaagtgtatgatgccaccgtggatctggagaaaatttcctggaaaaaagcaagcttcgaacaggtaaagattcatccaaagatcatggcacagtatggagcgccggtacgtgcacacgaagagtttcgtccggtacagattacaagagcaaagagcggtatgctgatttatgatttcggacagaattttgcaggggtgatacacgcggcaattcgtggcagacagggacaaaaagtggagtttcgtcacgcggagattctgatggacggagagttgtatacagaaccattaagaactgcaaagcaagaagcggtttatatttgtaaagatggagagcagacctattctccgaaaatgacatatatgggcttccgctatgtgggtgtgcgtggaattgaagaggatcaactggaactgaccgcgttggcactctattcggatgtggaagacaacggaaacttttcctgctccaatgaactgatcaaccagctgcagaacagtattcgctggggagcaaagtccaattttgtggatatcccgacagactgtccgcagagagatgagagaatgggatggacgggagatattgcactgtttgcgcctacggcagcttacaattttaatatcagccgttttctggagaaatggctgttggacgtgaaggcagagcagaataaaggcggcgggattccggttacggtgccgcttgtccgggtaccgctgcagtgggagatcatgatcccgatggcggtggatcactggggcgatgtctgtatcctggcgccgtgggcggaatatctggttcgcggagacagagggcttttagagcggatgtatccggtgatgaaaaaatatctgaaggcatgcaaattctgggcagagctgttttctgcgggaaaacaccgcaggatctggaagcttctgcatcattatggagactggtgtgcaccgggtgtcggcatgtgggagtggatgggaagaggaaaatggaccgccaccgcatgtatggcaaattccagccggattctggcaaagatcgcggatattctggggcaggaagaggatgcaaagtattaccggaaactcagtcaggagaccggggaggcataccgggaaattttgatgaaagcagactgcacggtaaagaaagagtttcagacagcatatgtgctgcctctgtattatcagatgctctccggagaggataaaaagaagactgcggcaaatctggcgcgtctggtgaaaaaggacgggtatcacattacgaccggatttccgggaacgccgtacgttctgtttgcgctggcagacaatgggtatgaggaagaggcatttaaaatgctccttacggatacctgtccatcctggctctatgagatgaaagtcggaggaacgaccatctgggaacgatgggatgcacttcgggaggacggcacctgcaacacgggaaaagatgacgggaccggaggtatggtttccttcaatcactatgcaagtggtgcagtgggagactttttgtaccgcaggattgccggaatcgaggccacagagggcggataccgctctttccggatccagccgctgacgggaggaaatctgaaatgggcaaagggaagtgtcaacacagcctatggaacagtttccagtgagtggaagattgaagatggaatgtttacgatccaggtgcaggttccggtcggaacaacatgtacactggtgatgccgggaaatacacagaaggtattgggaagtggtacttatacgttaaaagaagcaatcagggaaaggaatgaccgaaatggaaaagaatcagttttttgacaacccgctgatgcggacaaaaatcacttcggcaaatgtaaagccgaaagaaatgatactggggtattttctcggtccgttttgcgcatttatttcaaatgcaatcttcggggcgtatttaaaccgctactattcggatgtgcttggatggacggatacggcaaaatttgggattttttcagcggttcttccgatggtttctgtcatttttgtgattcttggaaatcttctggtagggcgtctgattgataataccagaacatctcaggggaaggcgagaccgtatatgctgctgtcggcgccccttgtgacaattgcgatcgcgctgttgtttttaacacctcaaaatgggagtccatcgactcagatgatctggatcgcgctgtcctataacttttactatgcagtagcgtatccgtttttctacacagcgcacagctctatggtggccctgtctacgagaaactccgatcaccggggaatgttggcaacattttccaatgcatccggtgtggctgctgtaggaatcggggcaagtattttagtgccgatgctgctgcagagttttctctttgtggaaaaagacggcgctattgataccgcacagagttatcagaactggcggctcgtgatgatcgtattatgtgttgtgacatttctggcgatcttgctggaatattatttcacacgggagcgagtgacagaagaaaatatgaagctggcgatcaaagaagaaaagcttccgatgatgaaacagctcaaagcctgtgtgtcaaacggttactggtggatcattatcttatattttctgctgttccagtttggaggtctggtaaagaacggttccatgagttattactcccgctggatgtttgacggaatcacaagtgaagcggctgcgggaacggcaatgggaacattggggctgatcggaggacttccgacagcaatcggaatggttctggcgtggccgatcgcaaataaactgggaaaacaaaaagcagtgactattggtctggcaatttcggttgtgggaggtctggtcagctttctggatattcacaattttaccattgtatgtattggtgtgatcttaaaaggaatcggttcgattcctgcaatgtatgtgacactggctcttttgtctgatgtactggaccatctggaggcaaaaaatggatttcgaagtgatggatttacgatgtctgtgtacggagcgatcatggtgggaatgacaggactggggaatggtctgatcaatgcattgcttacagccaccggatatgatgcctctgcgtcagttcagaacggaggcgtacagtccatgctggcgttgtgttatctgggggcagagatcatctgttatgcggtgatcgtaatcctgatgtgcttcttaaaagtagaaaagcatattgaggaagatcagaagacgattctgcagcatcagaaaaaagcggtgttagaagccggaggagtgtggatcgaaccagcagaaagacttcgcatggaacaggaagaggcggagcgcatggcagaagaggcgagaatcgaagaactcaaagcatattgtaagaaaaaaggcctggattttgaaatgcaggaagcaagctatcagaagaaactggcagagaagagagcaaaagcagaagcgaaggctcgaaaaaaacaaaaaagccagttctcataaagagtcaaagaggaggaacgttatgagcgagaaacgggaaaaacaaacaaaatcaaaacgccgcatctggcgcggtgtaactacggcaacagcatctttactgacgctgtctatgtcagcgactctggtgatagacgggtttcgtacggacattgacaagtttctgggcactcagagtacaaaaatggtgactgaagatgtaagtgcagaggattacacatttcagtcggattacagctcaacaacagagcttctggattccattgaagatctgggagaacgcatgaatgaagagggctctgttttgttgaaaaatgagaatgcagcgttgccgctttccaaggaggaaacgcagaaaatctctttacttggattcagcagttattatccggtacaagggggcgattttggaagtactctcagtgaaaataagggaacggatgcagatacggtagatatgctggaagcgtttgaatccaagggatttgagatgaatccgacattaaaaaagatgtatcaggggttaaaggaagaatttaaatcagaggcagttcttccatggggtgtgacaacctattatcgtgcaacagcaccggctacaactggagtatttaccagtttggaacctgagacagcaacgctggatgaggcagaaccaaattggaaaaagagtatgacggattacaatgtcatgattgtgacacttgcccgtgcagcaggagaaaatgccaactatacaccgggagaagatggggtgaatccagaacaggatctgaatcaggcggatccgctgggactctctgacacagagcgtgcaatcatcgatgaagcagtcaatgcaaaaaaggaaaacaatggaaaattgatcgtgatgctgaataatgcgagtgccatggaaattgaagagatcaaaaacaatacaggcgtagatgcgattttggaagtcggacttccgggaggttatggcttctatggtgtagcagatgtactcagtggagaggtgaatccgtccggacatcttgcggatacttatgcagtggataactcaagctctcctgcagcgcagaattatgggaactatgagtggacaaatgcggattctgcatattccatcaattccgagattgtagaagcagaagggatctatacaggatataaatattacgagacaagatatgcggatacagtattgggacagggaaatgcttctgacaagaccggaagttccaatggaaaagcatggaactatgaagatgaagtttcgtatccatttggatacggactgtcttatacaacattttctcagactctggacagtctggatgtgaatctggaagataagacagtgacagccaaagtaactgtaaaaaatactggagatgtggcaggaaaagatgtggtacagttgtatacgtctcttccgtatacggaatatgataaagaacatgcggtagaaaaagcagcggtacagcttctggattatgaaaaaacaggtgtgctgcagccgggagaatctgttactgtcgagattacagcagatgcgcaggatatggcaagctgggacagcacatgtgacaatgcggcaggaacaaaaggaaactggatcctggatgcaggagactattattttacagtcggaaatggttctcatgaggcggtcaacaatgtgctggcagcacagggtatgacaaaggcgaacggaatgacggatgcaggaaatgcagcaaatgtgaagaaatggacactggatacattcgactctgagacatttgcgtattcgaaaaacggaacagcggtagaaaatcagcttcaggacatggatttgaactactatatgccagatacagtaacatacttatcaagaagtgactggaaggcaacatggccaaaaacatacaaggatctgacagcgacagatgaaatgatcgaagtgatgaaaaatgatctggtagatatcaaggaacagggaaatccggatgaagttacatttggcgaggacaatgggctgacacttgcaagcctgaaaggtgagacggacttgacaaatgaaaaatggacagatttgattgatcagatcacactggaagaagcgatgatccgtactggatttggtggaaccagtacaaaatcaattgtatcgatcgtgtctccggaggcagtacagaatgacggaccgaacggatttaattcttatacattgggacagtacgcaaatacagatacagattccgcagatccgtatgtcatcgatccggatgacaagaatctgaattacaaattcggaacaatgagtaatgaaacagtgattgcgcagacatttagtaaagagatggctgcagagtacggagctgtgaccggaaattattccatctggtcaaatcttccaatcctctggggtgcaggaacgaaccttcaccgtacaccttacaatgcaagaaaccatgagtattattctgaagatgcgattttgacagcatatcaggcagcagcttacattgcagcaggaaaagaatacggatgtatcatagcgccgaaacattttgcattcaatgatacagagatcaaccgttccggtattgcaacatttatgacagagcagaaagcacgtgagaatgaactgcgtggaacacaggcaagtgtggaagatgcacagacacttggtatgatgacaacatttaacagaatcggatgtactgcagggaatgcacattatggtctgctgatgaatattctccgcaaagaatggggattccaggggctgatgtcagaagactttatccaggatgcaaactacagtgtgttaaaagaagcggtacactgtggtgtaacgatgacttgcaatactggtgacagtaatatggaagctgtaacagcaaaatggaattactggaccacagaggcggtcagcaaagatgcgtctatgatgcaggatctgaaaaatgttatgatgtggcagaattatgcgcttgcaaattccaacgcaatggatggattgaatgagacttcacagattaaggatgtgcgtacatggtatgataatgcattgacagcaacatcggcagtgttggctctgcttacactggcagcagctgcgatgtatataagagatgccaagagacgtaaaaacagttaagggagggtatgttatgaattttatcaaaaaacaggctgcaggcttttatctgatgctgcttgcactaattctcggaacagcaggaatcgtattttatgtgatcaactgcaacacggcatatttttccaatcttggaatcagctggggagttgtaggatgtcttgtggcaggagtggttctggaaattctttttgtggccggacaggaaaagtcgccggaaatgccggtactggatattcttccgattctggcgggagtgcttttgatggcaggatttgtattttttgtccgcctgagagtgaacagcattgcgactattttatcatttgaaagaaatgcgcagactatggcggatttgtccagtgcgatcatcggaatgggatgtactctggcagcagttatcatgacgattatctcttcatttttcagaacagtaagagaggaaaaatagagaagagtgaagggtgtcttattacaggcacccttattttgacgtttgaaaacaggcttggtatactaagaaaaaacaaccgataaaaacagttgagaggagacgaaacaatgattcgaattgcactggtagaagatgatccggcgtatgcagagcagctgctttcttacttgaaagaatacgagaaggagagtaaagagaggatcagcgtacagacattttcggatggggaagatattgtaacagagtatcgggcagactacgatattatccttatggatgtggaaatgaaatttatggacggcatgtcggctgcagaaaaaatccggaagatggataccgaagttgtgattatttttattacaaatatgccgcagtatgcgatacagggataccgggtggatgccctggactatgtattaaaaccagtttcttattttgcgtttacgcagcggatcgaccgtgcactgacgagactgaaaaagcgggagaagaaatatctgacgattgcagtgaagggcggtatgatgaagttggatctttcggagatttgctatgtggaagtgcaggatcatgatctgatctatcacacagtcgggcaggattacagaacaaaaggcacgatgcgggatgcagaggaaagtctggcggatggtatgaaagaggagcggtttttccggtgtaaccggtgttatctggtgaatctggattttgtggaaaattttcaggggagtgacatcaccgtgaatggagactgtattcaggtaagccgcgcaagaaagaaggcatttttaaatgcgctcaatgattttatgaacgaggtaggaaaatagatgagtgtacaggaaatgatcaatactccgggatattattattcgctggcatactggctggcagcatttattgtgacatgcacgaatgagaaacggatccggggtgtaaaacggtatgtgacacatctggtatttctggcggcgatcgtgggatttatggaagtt

SEQ ID NO: 6995 - DNA, 19423 bp, Unknown
  gut microbiota DNA sequence
gctcagatttgaacattgcccgtaatccaaatgatgcaggcacttattttcagtctcaaccaactgatcggggatttcatcagattcatctgaatgctcttttcgacctgtgcgagaagcgatatattgatcttgtgatacaacctgcaaggctagaaaacgaatcattggcaatgacacaaatgattgaccgttataaaggagagaaaaaaacaatttttatcgcagacagaggatatgaaacatataatatttttgcgcatgtccaagaaaaaggaatgtattatctgattcgtgtaaaggatggcggtgggggaagcatgacaggaagttttgaccttcctgatgaaaatgagtttgaccacgacatgcaacttatattaacccgaaaacagacaaaagatgtgaaagctaaacccaaaaaatttaaatttattgcaaaatccagtccatttgactatctggatttatatgacaaaaaattttatacgttgaattttagagtagtaaggtttgccatttcagaagattcgtatgaaagtataattaccaatcttccaaaggaagattttccagtagaagaaataaagaaggtttatgcaatgcgatggggcatcgaaacatcgttcagggaattgaaatatgctatcggattatgttgctttcattcaaaaaagatggagtatatcatgcaagaaatatacgcacgtttaatcctttacaattattgtgagctcattacaatgcatgtaataatccaacaaaaaggtacaaaacatgtttatcaaatgaattacacaatagcaattcatatatgtcgttatttcctgcgaaatgacatttccccacctgacgttgagacgctgatacagaagaatcttttacctgtaagacccgggcgttccgaccctcgcaaagtcaagcctaagtcagcagtaagttttctgtatcgagttgcataacatcgataaaagtatatcgttaatttaggcagatagcaatctgtctttttgtgctgcataaatataagagcaagtttttataaaagaaaaatcaggcaaagatagtgaattttctacctctgcctgataggaatacatctgcttaatgtcttaactaaatgatattgggctcacagctgctctcttgtgttatgtgtgaaatattatttgatctgctgtatacatttctccaaaacatagcggatcggtttgaacaatacgagacatacaatgaaattgctgatacagtgtatgatatcgaatagaagtcctgacgtccaatatgcaaatgcaccggaaatcccgccgattgcaaagtaggggatggtacagagtgctccgaatgtaataccatagatcccggagaggatactccagaaccatacggaatcatttttccggaaaaggagagtgatgagtgcctgtatgctccagacatacaggtagtttatccaccagagtccaaatccatagatcagaccttccagaaaaacaaagatgtaaatgatgaagaatactttctttccaaacacaagtgtatacacaaggatcaaaagggtgacgatctcaatattgggcaggaaaccaagggaaacctgagcagccagaaggactgcgctcaggataccgtatattacaatttcccgtgttttcatcaatatccttctttcaatgtaagctcaaatgcatctccgtcagaaactggtgtctgatctgcggaagtgttgacctgttctccgccttttgtgatacaccaccattgttgtttggaatcatccgctgtttcttcatccacagttgtaataaacagaccatattctccagactcaccgtccacgagattctcgctttctaaaacttctccaagatattttgcatctgtgtcaaattcgaagacattctctgtctggtctccgtggatgacggtcaccgtaatatgtttttctccttcactggctgcaggcttcatgttctgatataaaaccccggctccaatgcacagcaggattaagatgacaattcctgcaatcagtccgctttttttcttcatgtttttatcctttctgcattcttatttttcatttgaaatcataaaggtacatcctgattttgtcaaggaatatacatcttacagaaacaaaccggttttaatccatagagaaaaatatgagaattttacgggaaaaatttccggttgacagtttttctgttttatattagaatacaaaacgtaacatttttgtaatatttgtaatatttacgaaatttagttcatataatttacaagaactacgtaataatattgcaataatcaggaggttatttatttatgaaacagagaaaacgatggatggcagtacttactgtatggacaatagcgttgttatttgcagcaggtttcacgagtcaggcatccgtttccagttccaagatgattcaggaaaaaaatagcaaatatacaacaggggcaggggcgattgctgctgcgatggagagtattccggcagaggcagtagaacttaccaaagccgaggcgcagaaagcgcaggaagccagagagcaggcagaagcagaagcaaaacgaaaagcggaggaagaagctgcgagaaaagcggcagaagaagctgcacgggcacagatcgctgcagaagatcagaaacttctggcatcgatcatcttctgtgaggcaggaaatcagccttatgaaggacaggttgcggtcggagcagtgatcatgaaccgtgtcagaagtggtgtgtatccgaacagtatttccgaagtaatctatcagtcagggcagtttggcccggcgatgacaggatggctggatactgtccgcagctcggaaggatatacgcagactgctatgcaggcagcggcagatgcgatggcgggagtcaatccgatcggagactgtctgtattttggaaatggaaattatggaattcagattggagatcatttcttccattaaaaattgaataaagatagaaaagaataagtcgctttacggaatagacgcccccacgagttgcaacctcgtgggggcgtctgcccagttggatatcaacttcatttgccaaagcagaccctataactgtatcttcgaaaatgcttccgcaaaggcagtgttgatcggctcttttgcttcttttgcctgtttccgtaaataatgattcacgtcttttttgcttgcgccttttccttcttttttctttcgttcctcaaaagaactcagtttttctttgtgtccgcagacgcagacaaatcgttgtccgtcgccttttcctacaaggtccattttcttatggcataccgggcagcgggcattggtatggcgggagatggtttctttgtgtccgcattcccgatcctgacagacgagcaattttccgtgttttccgttgacttccagcatgaatttgccacattccggacatttggtgcgtgtcatattgtcgtggcggaaggtaccgtctgcagatttgatctcctgaatgagagcctttgtgtaattgtcgatctctttcataaaggttttgtcggattcttttccttttgcgatcgcctgcaggcgcatttcccaggaggcagtcagttccggactctttaagtcagaaggaaccagggagagcagttgttttcctttggatgtgatgtgaatctcatttccctttttctccatcagaaaactgttgaataatttttcgatgatatctgctctggtggcgactgtaccgagtcctccggtctctcccagcgtttttacgacatccttatccttatgtttgagatacttgaccggattctccatggcggcgatcagagtaccttcggtgaagcaggctggcggtttggtcttgccttctgtgatcgtcagtgcggtgacaggaagtgtctcgcctttttgcacatccggcagggaaatctgggagaatgtggtctgttcttcgtcctcgtcttcgccgtcagtatagcccgactcataaacttctctccagccggcagatttgataaaattgcctttcgcgctaaagcgttcttcgccgatggtgccgctgatggaagtctcttcatactcgcaggcaggagagagaaccgccagaaaccggcgcacgaccaaatcgtaaattttgcgctcttcattgctcatgtggtcaagctgcacaaactgttcggtcgggatgattgcatggtgatcagacactttgctgtcattgacaaaggatttatttgcctgaagtttttgcatggaaagccgtccggcaatcttgctgtaaggacctactgcgcaggcttttaagcgttcctttaaagtcggcacgatatcggtagtgaggtaacgggaatcggtacgagggtaggtgagtactttgtgattctcgtaaagtctttgcatgatattgagggtctgttttgcggaaaatccgaatttctggttggcttcccgttgaagtgcagtcaggtcatacagtgcaggtgcgaatgtttttttcagctttttgcgtacatccgttacaagcagtgacggagcggaggcctgtttgatcgcctggatgcggtctttatcaaaggagcgggaagagccggatctggcatctgtccatgtaaatgtgattccgccaaccgcagctttgagtccgtaataaggaaccggcttgaaggtgcggatctcttcttctctggcagcgatcatagcgagtgtcggggtctggacacgtccgcaggagagctgtgcattgtatttgcaggtcagcgctctggtggcattgatcccgaccacccagtcggactgtgcacgggcaacagcagcgcggtacagtggctcgtaggatttgccggggcgcagattctgaaaaccttcccggatggctttgtctgtaacggaggagatccagagtcgcttcagcggcttctgatttccggctttgtcaaggatccagcgtgccacaagttccccttctctgccggcatcggttgcaatgatgatatcagagacatctttccggaaaatcagctctttgacagcgtggaactggcggccggtctgtttgatgactaccagcttccagtgctctgggagcatgggaagcgtatccatgttccaggtcttgtactgttcgtcgtattgctccggatcagccagtgtgacaaggtgacccagcgcccatgtgacgatatagtctgttccttctatataagtatttgtttttttattgcagtgtaaaacccgggcgatgtccctgcccacggaaggtttttctgcaatgacgagatgcttcatagtgtttctccttcttctgtttaaaatattcagacgttatggaagccttttccgatgatctcacttgtattggagatgagaataaatgcggaaggttcttcgtctttgataaaattacggagccggacagcctgcgggcggttcagtgccgtgaagatgacgtatttgtcttttccggaaaacgcgccctgtgcatggcagacagtagcgcttcggtttaattcctgtacaataaagtcgcagatcggctttggattgtcacatactacgttaaagtatttggaaagattgaaactttcaataaaagtatcgatcataaacgagcggattgcaagtccaaggaatgaatacagccctgttgcaatgtcgaacatgaaacaaccagcaacggtgatcagcacatctgtgatcaaaagagcatgtccgatatctacgctggaatattttttcaggatcatggcaatgatatccgtaccgccgctggaagagccgatgttaaacaggatcgcggaaccaagagacggaagcgcgatggcaaaacaaagctccagcatcggctgatttgtcagtggtgcactcatcggatagatccgctccagtgcggagagcgcaactgacaacagaatgctgcagtaggcagtctttgcggcaaattttttgccgagaataaaaaatccgatgatcagcagaatcatgttagtgataaagttgaaatctcctgcggacatcacgccggttttggcaacgagaaccgcaagaccggtgattcctccaaatgtaaaatgatttggaaatttgaaaaaataagtgcctgccgccatcaccagtgtactgaaggtcagcaggaaaaaatgtcgtagtttacttttcatgtcgaatacccccgaataagataagaaaattgtagcttgtgctttctcaaaagtcaatgaattatcgtcggattattggaaatactaactttcaacaaggagggtgaaaaaagatgtatcaggatttaccgattcaggatatttacgcaagagaaattttagactcccggggcaatccgacggtagaagtggagatacttgccggggagaaaatcgtgggaagagcagcggttccatccggcgcatcaacgggaaaatttgaagcagtagagcttcgtgaccgggagaagcggtatggaggaaaaggggtagagcaggcggtgcgtcacgtcaatgaagaaatcgccgaggctctgattggaaaaaatgtgttggcacaaacggagatcgatcatattttaaaggaactcgacggcagcattgacaagcataatctgggggcaaatgcaatcttaggtgtctcgctggctgcggcaaagaccgctgcggctgcacttaggattccgctgtatgactatcttggaaatgtaggagaaaaggtaatgcctattcctatgatgaatgtgttaaacggcggtgctcatgcggacaataatctggatattcaggagtttatgctggttccttatggaccggacagctttaaagaaagattgcgcatggggacagaaatttatcacgtactgcgaacacttttgaagcaaaaaggattgactacagctgtcggggacgagggcggatttgcaccggaattgagagattccagagaggcgattgaatttctgatcgaggcagcacatcaggcgggatatcagccgggaaaagatgtagggattgctttagatgtggcggcttcagaaatttaccgggcaaaagaacagcggtattattttgtgggggaaagcaaaaagagcgggaaaaagatcgcgagaacatcggatgagatgatggaatactatgaaagattgattctggattatccaatctattccattgaggatccgttggatgaggaggattgggatggctggagcagactgacagcaaaaattggggagaaagtacagcttgtgggagacgatctgtttgtgaccaatccggagagagtcgcattggggatagcaaaaaaagcagctaattcggtgctgatcaaggtgaatcagatcgggacactgacagaggcggcaagagcggtggaactggcgcatcaggcagggtatcggacgattatgtctcaccgatctggtgaaacggaagataccacgatcgcagatctggcggtggcatttcataccggacagatcaaaaccggtgcaccgtgccgctcggaacgtgtggcaaaatataatcagttgcttcgaattgaagaaacattgtggaaatccatgtgatgagaggaccattccggagagagtgagagatctttttccggagtggtcattttattttacaaactgtacatatttgatattgacagtaattacaatttgagatatactgtacttacaaggcaagtacagatatgacagaaggagtgatgaagtggaaattattttaagtaatgccagtccgaaaccaatctatgagcagatcacttcccagataaaagccatgatcatgaacggagagctgaaggcaggagacccgatgccgtccatgcgaaagcttgcaaaggagcttcacgtcagtgtgatcacgacacagagagcttatgatgatttgcaaaaggacggatttatcgtgacagttccggcaaaaggaacctttgtatctgcacagaaccaggactttatccgggaggagaacagaagacgggtagaactgcttttaacagatgcggtagagctggcaaaggaaaatggaattgaacttgaggaattgagaacgacattagacgtattgtatcaagaggaggatgtgtgatggaatttgcactggaagtcaaaggactgcgtaaaacatacaaagaatttggattaaaaaatatttcgatgaaattgcccaagggctgtgtgctcgggctgatcggagagaatggcgccggaaaatctactctgattaatgcgattctcgggctgattgaatgcgactatgagtctttaaggatttttggacaagagtatgcaggaaatgaaaagcagatcaaagaagagattgcggtgatctttgacaagacctgttatgatctgaattttacaccgctgtttatcggaaagatattgagtaatgtgtattccaactgggatatggaaaaatatcatatgtatctggatcagtttgaactgccgaagaaaaagaaattaaaagaattttccaagggaatgaagatgaaaatggaatttgccgcagccctaagccacgatccgaagcttctcattctggatgaggcgacaagcggtctggatccggtattccgggacgagattctggatattctcagagagtacacagaggatgaagaacatacgattctgatgtcctctcatattaccagtgatctggataagatttcggattatatcgcatttattcatgatggggagttgttgtttacaaagacctatgatgagcttcaggaaaattacggcgtcttaaactgtggacagcggatctttgacgcactgaaccgggaggatattgaggcatacagaaaggatacctatggatatcgggttctggtcaacaataagcagggaatccggaaggtattttcagatctggagattgaacaggcaacgatcgaagacgtgatgctgtactgcgtgagaggagagaaagtggcatgagagggattattttaaaagatttatatgagggattctgtattaagaagaatctgatcaactggctggcttctatgatatttacgtctgcgctgacagcgatcagtgaatttatgagaggtgcctatggatttttgctgattgtagtactcctatttcctgtgatgggaagtacactgcttcagatgacggtggaacaggatgaaaaggcagaatttgaccggattcagctcacctatccgctgagcaaaagcgagattgttctgtccaaatatctgggcggtctgatcgtacagggaggtatgacactttattcatttgtgtttgtattgatctatgtgtatggatatcggacgatcaccctggaagacgcacttccgacatggggaatcggtgtagtcggaggtgtgatttactttgcagtgagctatgtagcatatttctggcttggtaatttgaaaggtgtgatttttacatttcttgcgatggtaggacttgtaattgcgtttttgctcagcgtgtttaatatcgggctggaggaaatcatgcaggtggaaaaaagtatttggatcattggttgtctggtgatggcagcagtgttgatggtgatcagctactttctatctctgaaaatatacacaaaaaaacattcttgaaatagttattttgcacaaaatatttatgcagaagaaatgttgacatgtaaacaatataaataatagaataaataagaacaaaacctatttgcagcagagacaggactggtttttcgtgcagataggtttttattatgtattaagaaggggaaaagatgcggatagacaggatattgaacaacaatgtcgtgatcataaaagatgagaatggagaagagcaggttgtctgcggaaaaggaatcgcctacaagaaaaaggcgggagaccttttatcagaaaagctgatcaacaaagtgtttgttttgaaggacactgctcagaaacagcattttcaggagattatctctgagattcctgtggaatatattcagatcacgacagagattgtggagatgctcacacaaacactggaaagaaaactaaatgaagcaatctatatttcattaagcgaccatatttatatggcaatcaccagatatctggacggtgttgtggtgaagaattccatgctgtgggatatcaagcgtttttatgagaaagaatatcaggcggcgaagaaggtctggaagatgatcaatcagacgttcaaggtagaattaccggaagatgagattggttttattaccctgcacattgtcaatgcagagatggacaatgagaacttaaagcagacgatggaagtcacaaagctgatgcaggagatttccaatattgtccgttattatttttccgtagagtttaatacagaatcggtttattattatcgttttattacccatttgaagttctttgcacagcgtcttctgacagataaagagtatgaagacgatcaggacaacgaacttttcaatacaattcggcaaaagtaccgcacttcttataagtgtgtggaaaaaatcgcagagtttatatcgcgtaaatatgaaaaggaactttcagatgaagaaaaattatatctgaccattcatattgaacgcgttatatataagagcagagattagcgaatcatcggaagcgcgcacagatgaggagtgtttctgctttgtcaggatggtaacattaagttggctacacctttatacaatgaaaactgtatataaggaggatgacatgggtaaatactcaagtttagccgcagacattattaaaaatgtcggtggaaaagaaaatgttgaaagtttaagacactgcgttacaagattaagattccgtctgattgatgaatccatcgcaaatgatgaggtcatcaaaaatatggacggtgtggtgaccgtgatgaaagccatgggagaatacatggtagtcatcggggagcacgtggcggatgtatacgatgaagtatgcagccagcttggcttagacgccatgcaggcagagaacaaagaacagaaaaatgcgaaaaagaagagtcccctcgagaaagttctgggaacaatcatgggtggtatgggactgactcttcatctgctctgtgcctgcggtattatcaaagggctgttagtccttctgacatttgtcggaatcaaaccgacagatggaatttatatgctgatgaatgcagcaggagactgtttcttctatttcctgccgctgattcttggatttaactttgcaaaaaaattccagatcgatccattcttcggactgatcctggcagctgcaatgtgttatccggcaattcagaatgtagacatcaatttatggggatatgtcgtaaatacgacctatacttctacattcctgccgattttatttggtcttctggcagcagttccgctgtataagtggtttgacaaagtgcttccgaagatgatcaaaggttttatgacaccgatgcttacattgatcattattttcccgctgacctttattgtgatcggacctctggcaaatatgatcggtgcgggacttaatgttgttctcacaagtatctgtgaattctcaccgctgcttgcaggactgattctgggcggatgctggcagatttttgtattgttcggtatccatggtgttcttacaatttttgcgtttatggatctgctcgcaggaaatccaagccagctgctggcattttcctacggtgcatcctttgctacatgcggagttctgctctcaatcatcttaaagacaaaagatgcaaaactcaaagaagtggcactgccgtcctttatttctgcaatcttcggagtgacagagccgggaacttacggtgtgacacttcctcgtaagaagatgtttgccatctgctgtatcggtggtgctgcaagtggtgttgtagttgcactcagcaacctggcgatgtacagctatgcgggaatgggaatcatcggtcttcttggatttatcaatccggacggaccgaactttatcggaatcgcattatctgcgatcgttccgtttgtggtatcttttgttcttggtatgctggtttacaaagattccgattatgaatatttgaatgatgtagtagaaacagacatcaagtcagtgtcaaaagaagagaagacggaagagaaaaaagaagctgctccggcgcttttaaaagaaaaagagatgctcgcaatgccggcagacggtatgatcaagccactttccgaagcggcagatgaggcatttgcgaatgaagcgcttggaaagggttgtcttgtaatcccggaaaatggaaatgtatatgcaccgtttgacggtactgtacgtgtgctgttcccgacaaaacatgcgatcgggcttgccagtgagggtggatgtgaagcgctcatccacatcggaatcaatacggtgaatctggatggaaaatatttcgaaactcatgtacagcagggagactgcgtgaaaaaagggcagcttcttgtatcctttgagaaagaaaaaatcgaacaggaaggttacagctgtgagattcctgtgatcataacaaacacggatgagtatttggatattgtagaaaaagatcatgaccgccatgtacatggtgaggacatgctgcatgtgattcgatgaaaggagtaaaagagcaatgagttttccaaagaatttttactggggcggcgctacagccgcgaaccagtgtgaaggcggctggaacgaaggtggaagaggaccggccaaaacagatgtgacaacaggtggttccgcaaagaaatcaagagggatcacgtaccgcatgccggacggaacagaaggcatggtgggcggattttcccggataccggaaggtgcatcctatgcagtgctggacggatattattatccgaaccacaaggcgattgatttttatcatcattataaagaagacattgcattatttgcagaaatgggatttaagatgttccgtatgtcgatttcctggtctcggattttcccgaagggaattgaagaggagcccaaccgtgagggaatcgaattttaccggaatgtatttacagaactgagaaaatacgacatcgagccgcttgtgacgatgtgccattatgatacaccactgtatctggaggaagtgttaggcggatggacgaaccgtcagttggtggatgcgtttgaaaaatatgcaaaagtgatctttgaagaatataaaggactggtcagatactggcttacattcaatgagatcaacagtcagctgatgatgaagaatttcgttccgaatgctccgaaacagatgctggaaaatgcgtatgcaggacttcacaatcagtttgtggcaagcgccagagcggtaaagcttgctcatgagcagtatccggaatatgtggtaggatgcatgatcgcaggtatgacgacatatccgctgacttgtgatccgcaggatgttctgcgtgcacagcataagatgcaggaagatttctattacagcggggacgtgatgatccgcggacattatccggtatttgcgaagagaatgtggagagaagacggcgtgtcatttgaagtcccggaagaggatttggagattttaaaagaaggaagagccgatttcttcagtttttcctactacagcacaagctgtgagacgacacatacagatgcaccaaaagacggggcaggcaatctggtactcggatataaaaacccatacatccagtattctgactggggatggggtatggatgcggacggactgcgatacattctgaatgagatctatggacgttatcaggtgccgattatgattgtagaaaacggactcggtgcgattgatactgtagaagcggatggaagcatccatgatgactatcgtatcgcatatttgaaggatcatgtcagagcaatgtcagaggcaatcgatgacggagtagaactgatcgcatttacaccgtggggatgtattgaccttgtcagcgcatctaccggagagatgagaaaacgatatggctttatctatgtagatatggatgatgacggaaacggatctatggaaagaagcagaaaagattctttctactggtataagaaggtcattgcatccaacggagaagaattagaataagagacaggggactattcgaaagagtagtcccttttgtgtaaaaggttaaaaatctgccacatttttctgaaacagtaaaataatgacataaagtagtagttttgtaaatttactttccgaattgattatgttataaccattacaaatcttcagtttaaggtgaagaaggaggttaagagaggtatagtcagtaagattttattttaaattttgagaggaaaaagggtatacatgaaaacaaggagaaagaaacagacaaaacgtgttctggccagtgcactggcagcagtggttgcagcatctgcagttccggtttccaattcagtcgttcatgcagaagaatctcaggacaggagcgaattaaagctgagatatacaagcgcagcaccggatagttatgatggatgggaaaaatggtctcttccaatcggaaacagtggaatcggggcaagtgtatttggtggtgtgcagacagagcgtattcagttgaatgagaagtcactctggtccggcggaccaagcgaaagccgtccggattataacggaggaaacctggaagaaaaaggaagaaacggacagacagtaaaagagattcagcaactgtttgctaatggggacaatgatgcagcaagcagtaagtgtggagaactggtaggtttaagtgatgatgcaggagtaaacggatacggatattatctgagttacggaaatatgtatctggattttaaaggtatctcggacaaagacgttgaaaattacgagagaacactggatctgaatacggcaattgccggagttgagtatgataacggggatacacattatactcgtgagaactttgtaagttatccggacaatgtacttgtgacacgactgactgcggaaggtggcgataagctgaatctggatgtcagagtggagccggataatgaagcaggcggtggaagcaacaaaaatacaatacaggcgcagtcttaccagagagagtgggaaacaacagttaaggatgcgctgatttccatcgacggacagctgaaagacaatcagatgagattcagctctcagacaaaggttctgacagaaggcggaacaacagaagacggagacgaaaaggtcacagtcaaggatgcaaaggctgttacgattattacatcgattggaacagattacaagaatgattatccggtatatcgcacaggggaaagccaggagcaggtcgcttccagagtgcgtgcttatgtagataaagcagcagatactgtagtaaatgattcttatgatactttgaaacaggcacatgtggatgattactcttctatctttggccgtgtcaatctggatcttggacaggttccttctgagaagacaacagataaactgttgaaagcttataatgatggttcagcaagcgagcaggagagacgctacctggaagtgatgctgttccagtacggccgttatctgacaattgagtcttccagagagacaccggaagatgatccgtccagagcgacacttccgtctaaccttcagggaatctgggttggagcgaacagctcagcatggcattctgactatcatatgaatgttaatctgcagatgaactactggccgacctattctacgaatatggcagagtgtgcgcagccgttgatttcgtacgtagattctttaagagaaccaggacgtgttactgcaaaaatttatgcaggtgtggatcagggatttatggcacatacccagaacaatccgtttggatggacttgtccgggatggtcatttgactggggatggtcaccggcagcggtaccgtggattcttcagaattgctgggaatactatgaatttacaggtgatgtatcctatatgcaaaattacatctatccaatgatgaaggaagaggcaattttctacgataatattttgatagatgatggaaccggacatctggtatcttcaccaagttattcaccggagcatggaccaagaacggcaggtaatacttatgagcagacactgatctggcagttatatgaggatactatcaaagcagcagaaactcttggtgttgatgcggatctggtggcaacatggaaagatcatcagtccaggttaaaaggaccgatcgagattggcgatagcggacagatcaaagagtggtatgaagaaacgactgtaaacagtatgggacagggatacgggcacagacatatttcccatatgctgggacttttcccgggagatctgatctcatctgatacaccggagtactttgaggcagcaagagtgtccatgaacaaccgtacagatgaaagtaccggctggggaatgggacagcgaatcaatacatgggcaagactggcagatggaaaccgtgcatataagctgatcacagatctgtttaaaaacggaattatgaccaatctctgggatacgcatccgccattccagatcgacggaaactttgggatgacatcaggtgttgcagagatgcttctgcagagcaacatgggatatatcaatatgcttcctgcactgccggatgcatgggcatcaggaagtgtcagcggactggttgcacgcggaaactttgaagtatccatgaactggaagaacaaacatctgacaagcgcagagattctttcaaataacggaggaacagcaactgttcaggttccaaatgcttcctttgcaacaattacagatgcaaatggaaatgttgtagatgtaaaagtagaatctcaggacagagtttcctttgagacacaggccggacagacgtattatgtcaaagatgttcctgtgaaaggggaggcaccgacaggattatctgcaaaacgtacagatgataatacaggaaaactgacatgggatgaagtcaagacgaaaaaagacaaagacattacttacaatgtatatcgtcagattgagtccggagacgtacagaaaattgcaggcggtgtagaaaaaacagaatacattgataaaaatgcagataaggcattgggtacgatccgatatcaggtatcagcagtagtcgatggcaaagagacaaagctcagtgaaaaagtagagctgacagagccgcttggagcaggaaagattgataataaggatccgcatattgtgtatacaggtgcatggggtgactgggacacagcaaacgaaggcaactacaaggatacgatcaagtatctgaacaaaccgacaggaaaagagactgtagaactggagtttgtgggaacaggcatcgaagtgattacttgtacaaatacagaccgtggaaaatacgaagtatttattgacggagagtcttgcggaaaggtagatacatacagttctactacaaaacgtcagcaggttgtatttaaaaaggatgatctgaagcatggtacacatacattagagctgaaagtgctcaatgaaaaagtagatgcaagttctggtacaaaagtagaactggatgctctgaatattctggataatacgatcacactgccggagaaagtagaagtatctacagtttccggaattacaacgatcggaaaagaaggcactgtacagatgcaggcaaaagtaacaccgggagatacaaaagacaagagtgttacatggacttcttttgatacaagcatcgcatccgtagatgaaaacggactggtgacagttcacaagaaaaacggagaagtgacgatcacagcaacagcaaatgccgattctgaagtgagcggaagctgtaaactgactgtggcactctttggagaccttggttccggagagacgatcgtagaagatgcatctgaggatggaaagagaaatgatgcgattagctggagcggctctgaatggtctacatgggctggagagccggagaaacatcatggaaagacaaagacagaagttccttcaactggaaaccaggcaggtaaatattttgaatatacgtttacaggaactggaattgaagtttatgcacagaaacatgcaaactttgcaagttatgatgtaagcattgatggtggaaaagctgaaaatgtatcattagcgggatccggtggaggagatccacagcagaagatttttgaagcaaaaaatcttgagaacaaacagcatacaatcagatgcacaattgtagctcgtgacggaaaaacacaggcaaaccttgactacttaaaaatcttcgcaccggtacaggcagcggaggtgaataaagcggatcttcagacagccatcgaaagcggggccggactcatagagggcgcatatgatgcggacaaatgggaagcatttaaggaggcatacaaagtggcagtagaagtaatgaataatgcggatgcagatcaggatgcggttgaaaaagcagcagcagctctgaatgcggcgatggaagcacttggagatccaaatgttccggaaatcggagaagtacaaggagaagcagtacatgttgaaagttcagctgtgattctggaatggggtcaggtaaagggtgcagcatcttatcttgtaaaatggaatgatcaggaagtcaagacctcagatacgcgaatccggattgaaggattggaatcgggtgtgacttatgactttaacatttttgcgctgaatacaaaagatgtgccgtctgaaaatgcgattgaaattcacggaattacaacaacagatgtggtaaaaccgggagtcgctacagaaatcaaagcaacacctgttgatgaggattcagcaaagctgacatggacagcaccggctgacacagacgtggcaagctataatatttatcagaatggtgtgaagatcggggacagtaagaacacagaatttacaatggataaactggaagtcggaactgtttatgaggtacgtattacagcagtagataacgcaggaaatgaatcaattccagctccatttaagtttacatttacagagccggaaaaagagaacttcacattgaaggcagcagcgaatgcagaagaaatgggaatcgtgagtgtagaaccacagcaggattcctatgaagcaggaactgaggtaacagtcaaagcagaagcgaaggaaggattccgctttgtaaactggacaaagaccggaacagaggaagaagtcagcacagaagcagcatacaagtttgcaatcacagaaaatacagatctgactgcaaactttgtgaaagaagaagtgccagaagaaatcttccatgtaacgatcaaagccaatgacaatacaatgggaactgtaaccattgattcagcagacggaagctacaaaaaaggagaaaaagcagaagttatcgcagtggcaaacgaaggattccgttttgtaaactggaccgatgcagaa

SEQ ID NO: 6996 - DNA, 13721 bp, Unknown
  gut microbiota DNA sequence
ttcatgggaaccgtatgtatttccaaaactgatattgatcgccaccggcatccgatattccaacgcctttctcaatacatagtccaccccctgcatcagctctgttgttcgcggaaaccctccctgtctcggatttcccagcttcacgatcaaaagctcactttggggcgccactcccatataaataccccccacactgcctcttccgtttcctgccgcaacccctgcaacagacgtgccatgcccggatatatcccggcttggtacgatctgctcctgtctggcttttacctgctctgacaaagctgcattgatctgttcctgtgtatattccgttcccagaaaatacccctctggcggattgcccgaaatactctgatcccacaatgcacgaattcgggttgttccatccggattccgaaaatccgaatgagaataatcaatcccactgtcgatcactgccgtaagaatgcccgccccaaacagcttcaggggtgctgtttgtaccggaagaatgcaggaaactctctttccgttcgccgcttcaaaaaacagccgtttcggcttctcaatatattcaatctccggaatctgtgccaactgctctatccgggattccggcacagtcagaattgcatactcattcgataattccgtaacagaagaggcgatttcacgaaccgcctccagatttcccgaatatttgatgatcagatcccactcctgatccaaaggctgatacccaacctccagctccagtgatttttcacgctcctcactcgtagcgtccaacgcaagattcaaaagattttctgctttttggctcatctatttcccggctcctttataaggtgcatattcatatggaagaaaatatcccttctcgtgacggcacaccggacatacagatggtgcctgcttcccgtcatggatataaccgcagtttgtacagatccaccgtccttgttcttcccggctgtaataggtgccgttttccagcatttctgcgattttctgaaatcgctcctgatgggtatgctcaatttctgcaatctggaagaatgtagacgccgcctcaaaaaaaccttctgcctttgccgtacttccaaacgcaggatacacatcttcaaattcttccttttcattatgctccgctgctctaagaagctcttctaatgtatcctgctgatccaccggataggtcccgtcaatctggatcgtgctccctgtaaactctttcagcagctcataaaaccgctctgcatgtgcccgctcctgatctgctgtatacaaaaacacgtccgcaatggtatacatccccttctcacgggctttttctgctgcaatcgtatatcggtttctcgcctgactctccccggcaaacgcccgcatcagattttcctttgtctcgctttcaaaaaaattaccagtcatgatacacactcctttttcgtttcataaaagtagtatgtatcataactggcaaaatatgcttctgcttcttaaattttacgaaatcagttaaatccgatcagtcttctcgccacactgtatgccatagaagaaacttttcttcctgattttcccggaaggttcatggtctgaccgagaattccatatcggatcttcacatatgtccgataatcttttttcttcagatatacccacagctctttctttttcttcagattctcattcaccttggaacgaatacataaaatcgaagatactgtcatcataatagcaagataattgatcatatattttctgagctttttactctctaccatacgtaattcatacatagagatcatagattttgttacataaatctgctgatcgatgcggctgatcatcactttctcattcacagactgatcctctcgtccgataaaatagcgatagaagtccacatccatatagtataatgtccgaacatgaggaagcgggtaatatacatagatattatccacgtaaaacgtgtgcttcggcagcttcagctgacagagtctcaacatctcggtccggtagatcacggaatgcatgagaatatactggtccagatggaagcttccgatatcatcccagcggaacacctgattctgcggaagtacattgcggtaatgaatgacttttttatgtgtcatcccaactttctcatacacataattagaaatcaacatgtctactttagaatctgcatccacaaatcccttcactgcactcaatatcttcagcagagcctcttcatctacccagtcatcactgtccactactttaaaatagacacctgtggcatgcgccagacctgtattgaccgcatccccgtgaccgccgttttccttgtctaccgctttgacgatccccggatatttttcctcgtatttttttgcaacctcgcttgtcccgtctgaggatccgtcattaactacaataatctccacatcttctcctccgggcaggatcgactgaattgctttttccatatatgcctctgaattatagcatggaattgcaaaagatatatatttcatgtctacactccttttcttcaatatagcaattatactgtacttttattatttttccaaccattttattgtaaaataccactccttcctttatagtattagggagaacacttatttttataaaagataaattggaggaacactatgaaaaaaaatgcagttgtaggacaatctggcggaccgactgccgttatcaatgcaagcctttacgggactgtatacgaagcattaaaccgcgaagacgagattggcactgtttatgggatgataaatggaattgaaggatttttaaatgatcaggtcatggacatggcgccactggaagaatcaaaagaactggaactgatccggaccacacccggctcatatcttggctcctgccgatacaagcttccggaagatctcaacgatccggtttatccacagctttttgcacgcttcgaagcatacaacatcggatatttcttctacatcggaggcaatgattccatggatactgtcagcaagctttcccgctatgccgaaaagatcagcagcgacatccgtgtgatcggaattccaaaaacaattgataatgaccttgtcgagacagatcacacaccgggatttggaagtgccgcaaaatacgtcgcttctactgtgcgggagattgctatcgacgcatccgtttatgacaacaaaaaatccgttaccattgttgagattatgggacgccatgccggatggctcactgctgccagcgcactggccagaaagttcgaacacgacaacccggttctgatctaccttccggaaacagactttgaccaggatgcttttattgagaaagtccgtacgtctctggagactacaccaaacctggtagtatgtatttccgagggaatccacgacaacaccagtacattcatctgcgaatattccaatgatgtcggaacagatacattcggccacaaaatgctcacaggttccggaaaatatctggaaaatctggtgaaagaacgccttggcgtcaaagtacgttctgtagaactcaatgtctgccagagatgctcttcttccatgctttccaaaacagaccagaaagaagccattgcttccggagcttacggagtaaaagctgctttaaacggagccagcggaaagatggttgcttttgaacgtctggacggagatgactatcagattgattatgttttaaaagacgtcaacgtcatctgtaatcaggaaaaatgcgtccctgctacatggatcactgcagatggttctgacgtgacagaagattttatccggtatgctcgtccgctgatccagggagaagtaaccgttcccacagaagacggcgttcctaaatttgcttatagaaagtaactattgaaacaaaaagagagcggcattcgctctcttttttctactgaaatgcattgtcatcagaaagtgtaatcaagtgtaaccaaaaacagagttctgaaatacttaacaaaactcttcccagacatgcaaaaaagccctgaaaatcaaggcttcttcgtagtctgcggatgacaggacttgaacctgcacgggatgcccactggaccctaaaaccagcgcgtctgccaattccgccacatccgcatatacaattttggaaaaaataaaacaagcaaaactgcttgttctacaatgagcgtgcggggattcgaaccccggacaacttgattaaaagtcaagtgctctaccaactgagctacacgcccttattttcttataatacccgctaatccaggtaaactgggctagctggattcgaaccagcgaatgcaggagtcaaagtcctgtgccttaccgcttggcgatagcccattagtaaactcaactatgacactgcttaactagtgcttcttataaaagaaaagggtgggtaatgggactcgaacccatgatatccagaaccacaatctggcgcgctaaccaactgcaccatacccaccataccgagcctggggggattcgaaccctcgacctacggcttagaaggccgttgctctatccagctgagctacagactcgtataaactttatccccgtttataggctccttacagatcactctgtaagaaagcgggtgatgggaatcgaacccacgtatccagcttggaaggctggtgttctaccattgaactacacccgcgaagtcggggtgacaggattcgaacctgcgacctcctggtcccaaaccaggcgctctagccaagctgagccacaccccgttattcgctttcgtgtcgttttctccgtgacacaatagctattatacataagggtataccaattgtcaacaacaaatttcaaatttttcaaaaaaattttttcgcaccttctccaacctttgcgaaagcccgaaaatacgctataatatccatattctataagaaagcagaggtacttattatgtgggcttacaacgaaacattttatcaaatttacccgattggattctgcggtgccccgactcacaacgatggcatctgcgttccgcgtattctgaaattgaaagactggagcagttatctggagaatctgcagatcggttctgttctcttaaatccgattttcgaatctgacaatcacggttatgataccagagactttaaaaaggtggactgccgccttggaaccaatgaagattttcaggatgtctgtgacgatctgcataagcatcatatcaaaatcgtgctggacggagttttcaaccacgttggacgcggtttctgggcatttcaggacgttcaggaaaagaagtgggattctccttataaagactggttctacatcaattttgacggtgacagttgttatcaggacggattctggtatgagggatgggaaggacatttcgaactggtcaaactgaatctgcaaaatcctgcagtcacagactacttattagactgtgtccgcttctggatcgaaacatttgatattgacggacttcgcctggatgtggcatacagtctggaccataactttatgcggagactccgctcattttgcgaagaacaaaagcctggatttgttctgatcggtgaagtactattcggtgattataatctgattgtaaatgatgagatgctgcacagctgtaccaattacgaatgctacaagggaatctattccagcctgaacagcatgaatctgttcgagatcgcacactccctgaatcgtcagtacggaccggaacaatggtgtatctaccgtggaaagcatctgatgagttttgtggataatcacgatgtcacacggattgccagcatcctgacaacccctgcacacctgcctctggcttacggtattttattcggtatgccgggaattccctgtatttattatggaagcgaatggggcgaagaaggtatcaagactccggacaatgactatgcgcttcgtccatgctttgaggcgccaaaaccgaatgcactgactgatttcatccaccgactgatcacacttcggcaaaacagtgatgccctctgcaatggaggataccgcaatatctcaatcacaaaccatcagcttgtctttgaacgccgtacagggcaggaacggattctgatcgccatcaacgcgtctgagagcgatttcacgatccatcacggagaattgctcggaacattcaccgatctgctgaaaagcggttctgggaatatctcacagacgctgaatggctctctggatcttccggcttacagcgtacagtatctcaaagagatttcctgataaaatttttaagattaaaaaaatccgtgtaaacatccacactgtcctgcgatatttacacgaatttttcataggtataaattcctttaaattattttctgaatttatattttccttttccgtgacctgacacaggctcaataatatccgactgcaccaagttggaaatgagtttggaagctcctgagcttttcaattgaagcagttccatgacagcgcttcttccaaatacctcatcaaaaccaaacttttcaaaaagtcggtggatatgaactgtcgtttcgtggatattcttttgcaagttcgtataattcgctcggacaagtgcattcctgaaataccaagcatgatccgcaaaaatatcattcgttgcagaaaaaccaagtgttctcagatacttgatgaaaaacaccgctgttgttctcgtatttccctctccaaaaatatggatttgccacagtcttgaaataaaaactgcaagatggtggattatctcatccattgacaatcccctgtagctaaaatctttctcctgcgaaaaatcatattcaagggtagctctcagttcagaagcgctgccgtacataacggttgccccatcaagcacccattcctttttcgtaatattataatctcttatctttccggcgtggttgtaaataccccgaaagagtttgcggtgaatagagatctacttatttggcgaataagattctgtacttcttttatcgtaatttttccttcaatattacgaatagcaatatcaatcaaatatttagatggtttcagtccgtccacagcctgaagtccgattgccgtactccaagcgtaacctttgctggctttatcaggttcggactctttcaaatattcctcaaacggatctttatccatattgccacctcgcttcataatttataattcactctatttcttctaatagtttggacaatcaaacctattttcaaaacagcgcctaatcttcttttcttctatatggtacatgatggttccgacaccattcttctgctatattgatataggtccgatttctgtagtcataataaatctggctgattcccagatcatttattttatctttaaaacacctgtacggatgccttcttctaagagcatcaaacagtacttcagaaactcttttattcccactctcatacgcaaacttctccatgatacttttctcatgaagttcatactgattcggcaatctgacataatcatccgtctcatcaatttcttcccagagctcctgatcttcttcacaggccattgaataaaccgatttaaatcttcttctgcctctgctattacaactactttataatgcatattttcctctcatatctgaaatcacagcgtctgcatttcgataatttccattttttgaagattctctagattgttccagtctttgaaacatctcatcttctgtcatagatgtatatggattatgcacagttctttttatttcaaatgggaatccgttatgtgcaacagcctgcgtcaaaaacattcttattgcagatgtcgtatctgttccaagatctttaaaaagttgatcagatttattcttcaagtcatcgtctaccctaatttgaattgtacttgccatcttaaatacctccacttcttttccttttattataatgttatatcattgctatttcaatacatttacaatgaatcggatgtttttttaagtaataagtatctttccttcacacttttctttcagttcctatataaaatcattattcataaatcactgattctgtcatttcaacgagcaaaaaaagaactgcctctaaactctagaaacagttcttaaatatgaataaaattgatgtcaaattgatgtcaaaacaaacgttcagatccgcaaacccttgattttacgggctttatttgtctaaggacttcattatcgggattagttgaacgattccttccacccttgtccgccgagctccgtcaggcaccgtacacatccaaaaaccgatttttttggtcttccactgaggtccatagagccacaagttggctgtgtcattcgtgttgtacaaattgttttgatatatagattgtctcttcaagtaacaagacaattctctacttatattataatctttccctggagatttgcaacaatttcctgctttttctcctgtgtcgcttccgcataaacatccatggttgttgtaatatctgagtgacccatgatactttggatcaccttcaaattcgattcattctcacacagtcttgtgcagaatgtgtgcctcaaatgatgagctgaaaaatgaggaataatgagtggttctctatcctctttctctgctatttctatttcatctttgttatatgcaactcttgccctttcaatcgctcgattaactgcatttggtaaatataccgttccggttgctgttacaaaaacgaaatttgaatatccatcaatctcttctgaggaaaagccaatgcacttttggatctcatactcatccagaaaagcattgaacacttcatcgatcatcggaatggttctccgtcctgaaatcgtctttggtgtagaaatatgcttgaccgattttctgttttcatcaggtctgtagataaaagtatgattcacactgacaatgcgcttttcaaaatccaggtcatcccatcgaagaccgatgcattcaccaattcgcattcctgttccaagaaggaccgttataataggtacccatccttgatattcccgatgggcttttaagtaatccataaaagctttctgctgtggaatcgtaagcgcatgtctcggattatcttcccagatatggctctttttgatttctgccattaatccgtctgtcggattttgtctgagcagtccatcccttacagccatctggaatgccggatgcaactgtgtatgtatactatccagcgtatttgctttcatttcttcatccaggataatgcgataatagaattttttcacatcagaatatttgatcttaccaatcagtctttttccaaatgttggtctgacaaagtgattatacatatagagataattcacttttgttgatggtttcaaatcatatttctgttcgataaaccgatcatacagttcattcagcgtcatcctgtcagccagctgcggattcagtccatcttctttgtcgcggatgatttttctttcttttgctctgagttcaaccaatgtttttgcgtaaacagttcgtctatttttatctaaatctgtataagaataagaatagcgaccgtcttttctctgactctcaccggttcgcaacacatacccccggctgtcttttcttgattttgccatcctctcacctcactaatcgtgaggagcatcttaactgtgcttatcctgtcggtataatagttccaatcctttcttaagcacctgcccttttgtaagatcgtacttttcagcataagcttccaattgcttctgctcagcattggagaaacggatggtgaaacgataattcatgggatcatcactctttggtcttcccatctttgccatactatttcctccttccttacaacactattatactttatgtccgacaacaagtcaacgtgttttgcttctcatgtattacattttattttttataattcatctctgaaattttcaagatattcatccacaatctctgtattgaccagaacaactctcttcacatgatagactgctttcgcatctttcgctaattcctgaaatgtatgcaaccccatagaatataattgtgccccttcctcataacggacaaatttctttcttccgacctgcaccagcttttctaattctggaatttcttttctgactttaggcatgaaaaaacctccttccttcgtacataaaaaaatatctttcatatatacaaaagaaggagggtgaaaatacagcctatgatatgcaatttttttattttaacaaatcgagcagcgtatattcaccttttggaatcttagctgttctatgatactcttttattgcttccacaagaatcccagaattagaaaaataattaaacacgtaatcatatgattttacgtcagacattctaagattttccttacaaaaatcacttggttttttccctgattttttgaattctttatactgattttcagcaaagataatcaacatttctatttccggtgcagtaatcacattgataacatctattttatgttcatatgctttaccaattttaaatttttctcttcttgaatctaatattctgattactgatatcttttccgcaaatccttttctcaaatatttctgttcaaattttttgccgtccctacatcgaattactgactcctccagcatctcttctctcgaaaatacaagcaattcttcatctagaagaatatccataattgcattttctgcagcaccttcacatatacacgctttatattttgccagttccatattgcacctcctatttcagagatgcagttatacttttcttcaactgcatataagcttcataagtaggtgtcgttccttccagaaatccactctgataagcatcgcttttcttaatgtcatttctttttagaatattggaaagattctctgctgtaatcccatctctatttctagtaataaaaatactgtcattacggtcgtattcatccaaaagttccggataatgagtggaaaagattagcataccaccatttttatttatttttccgtccataaagaaacgaatcagagtacttactatttctttattgaaatgattctctatctcatcaacaatcaggtagcctccatctttcagaacttcttgtgccaaagtgaaagtaatcattccttttacggttcctgacgagagataattatttaattcgattggattgttcaatacaatctcttcttttcctttaaattttaaatgtataattggcttctcatttttttcttcaaaatttaatttttcaattgttggatccagataggaaataacctcagccggaattccttctgaaaatggtaacacattcacattggtgaaaagtaacatgctgactacttttatatgttcaccagtttttttattatatgcgatcataatactaacatcatctgacaaaaagctttcctgttcatctcgaacaatgactggttctctctcctcaaaatccagcatagctttacgagttgttacttcttcagctttttttgaccataatgattctgattcaatactgtacacaactccttctactttcgtattcttagatgttatgaccgtttccagtctgcaaatttcttttgtagtctccgaataaaaatacacattcaaaatagcattttttgtatttcctaatatatctttcgtattcatgtgattgattggttcgttgtttataattcccaacgcaagaagaagcacctttaatacagaggtctttcctgaggcattgattcctataaacgcgtttgccggatttaaatatatatttgaaaacaaggaatacaaattcactttatcttcttccgcaactctttgctgtgcataaaaagataaatccagcttctctttaaacaatggtaagccttgtgcggtaactctcaataatttcatataacgcctccaatttaaaaactgattttacgtggttatttttcttttacttcaattatatccacatttctatattttatcaacggataatccgtttttatttttttaatttaaaaatctttctctcacaccctgtattttacccctccatcttttgtatatgtaagagggtttgtagattagagcaagatccacccatgtttaacagtattgccatttggcatcctgtcatcctatgggatttatcttgatggggatctccccataccctctcaataacagacgcttcacttgtctgttggttccacctaaaggtgttcacagcactatttctaatatcggaagggacagccgatattgaaatacgtggactcccagtgggaggaataatcgtagcgaaaggaggaatatgagaacagaaaacaaagataaagaactgaatcacagacattttataggattacgtcttaccgatgtcgaactggatttattagaccaaggcgctgcttgtttatctgttagccgatcagaatatctgaggaaacttctattggaaaagcaaatccatcatcagattgaagttgttgcagacatgaacgatctcagaaaactggtcagtgaatatggaaaaatcggatcgaatctcaatcagatcgccaagcattttaacagtggtggcagtcagtctcgtgctatagaaaatgaaatccatcagtgcatcacggacttattcctgttgagaaaagaggtactgaaactggcaggtggtatgaatggcaatcgtaaaacacattaaaagcagaaatgcaaattactcggctgctattaattaccttctgtttgaacatgatgaaaaaaccggaaaaaagattgtagatgaatccggtcgaagcatcctgcgaaaagagttttatatggatggtctgaactgtgatccgatgtcttttgacaaggaatgtgaactgacaaatgctcattttcacaaaaataagaaacgtgaagatatcaaaagtcaccactacattatcagctatgatccagccgatgttgattaatacggaaaaaagaggtacagtgaaatagacttcgtttgtgttgctagaaagagtagattaggaggaattttatgatggataataataagatgatatgttattgtgatcaggttacaaaaggagagattattgaggctatggaaaagggagccaaaacactcgcagatataaaaagaatgacaggagcttgttgtagttgcaagtgtgcagaattaaatccaagcgggaagtgttgtgcacaagacattgcacttgtgatgaaagagtatttatcaaataaaaatagttaagatatttctatggagattggggtcgtgggtgatacagagaggtgtgttgcccaatgtcattaagttaatttaaaaattaaaaaaagcagaatgcaagtaggtaaaatctcacttgtattttgcttttttcattttgttatctgtttttttgcacggcaaacagacagatggattgtacatctgtctagcctcatatgtgatttctgtccgtcggaccaagagtttgcttacagcttccttcagattctaccttacgatagacacccttgctgttcagctatacacttccttgtcgcctaggcgtgttcgggactttcacccgttagagcgcgcccatggcgcgcaaactaaaatatcgccagccatagcatggctgacgatacaaaaatttattatttttttattccaatgcaacaaacatgtaaaatgtct

SEQ ID NO: 6997 - DNA, 10537 bp, Unknown
  gut microbiota DNA sequence
cattgcttccgcatggctccagtttgggatatatccctgaatgatcatgcggtcataacaggtaatgatgccatgaattttatcagcgtatttatcagtgagtaacatataaaaaccccctttttctttagaataacacaaggggtagaaaataaaaataacttttccggtttatccgggttagggactgtaaaatgtaacctattatcttgcagaattgatacagatgtgctatattgaagatataaaaagggaaaccgcaagcggcttaccccgaaaatttagaaactgtttttacaaacagccgtcattattcgcagtaatggcggctattttcgtttatccttgaaaatctcataacaaagactaacaagggcaacaatgaatattaacaactgaatcagatcagtatatgtaacacacattggcatcgccctcctttctttcgtctggagggtcgcccctccgtaaaagagggtaagccgcccggctttggtttcccatgccgagattatagcatattctcaacttgctttcaattcctctgctgccaatgcatcccattttctaacggtctgtatttactgtagtatttcaatgaaaaatcaattttacccctttaccctaacattttcctcactgaatagatttaaactataatttcctctatcctgtatggagttttaaagcgcagaattgattttatgataacttcttgagccgttctgcaatttctttccgctgttcttctgttaattctcgcttaatatctcttgaccgaattgtaacgaatctttttggaaagaaatattctttagacacaatagtacccttcacccgttccactcttcctaatctgaattgctctggattctgttgcaatagctgaatcagacggacgtgcagggccagggggatctgggaatacgggaccatggatgaaagcagtaatgcatgggtatgtccgcagattttgcagtacacacgaacaacggaaagggagaggatcctgtcagcaagctggatgctgcgtttataagagccatgacggatgagacagccggagtgaccgcagacacatgaaataaggttcagatcaagggaatctattgttttattgtaaaaatcctgagaaataaggttgtagttttctgttttaactgttatcataggtatgtatgaatgtagcgagagctatgtttaggtgaaggcagaaactaaactttggtaggggaggtttctgctttcttaatttcatggttacaaaaccatatgataacacaagaggtctcaggataaaacaatttgatggaaaatacatcagattcctttattccaagacctcttttattacgccttaaagatgaaaaataagtttgttatagtgtgcttgataataatatacttcccttcttcgttctggaacgtcatgcaaagagcttctcccttttctccggtctcccggtcttttgtcatgcaatcttccagatcgatcaaaacgcactgtctcaactcttccatgtcctctgatccatataccggatgttctacaacattctctgacttcgctttctccattccaagccggaaggctttctggattgcttcgtactgatccacgctttctgcattgatctgcatgatttcttccgctgccatttctggcaacagtccatcttcttccagtgatgcatactctccgatcagcttctgtataccgctcatagctaccactaacaaactccgcacgctccgctctgtttcttgatgctcttctcttgtcatagtgccgttgccgtatccgttgatcccggttgacatctggtactgcgcatattccagactgtttaaaatattctgtaactgtgcttctgtttctgtcatttcaaaaaataatttgctcatactttgttttcctcctacgcttctaacatttgaattcgatacattggaactgacgcaaggatgccgccctttaaaactacaattcccgatgtttcccgaaactctatcagttccccttccacctcatggaatgtttcttcattctccccaactcgttcccctgcatctgccaaaatggatacccattctttcttgaacagtagtctgctctgcttcatgtttcgctttcctttccaattcgtttgcaagtgccagtgctaattctttcgagaactctgtctggtacttcctgtaaaatctgtcggtatcttctactactttctcccagtattcctttgtgttctctacgctccagactgattgcatcattttccaatagtcctgaaacatttcaaattcttcactgccttttaataattttacgctgcccatcttttaatcaaacggtgtcggtgtccgtaccgtcttgaatccatctttgcttttgagttcctcttctgtttcctggaatcgcatttcatttccatcaaagcggtatacaatcttccctagttctccctgccggttcttatccactttcagacctttcctggtcttatcctcattgtccagattccacaacaaaatgataatgcttgcatcctgttcaatgtctccggcttctgatacttgcaatgaccgcatggcgcaaagaagacgccgagctaaagctaaacaaaataaatgaaagcactccccggatcgagtgcttttattctcattgtgggtaaattgtgggtacagcttgatttttacgcttgtctgtgctacaattccacctgctgaaagtggcgtatttaaggcatttccagcaatcaactatcgtgtgttcgagaccttccacacgtaaaataaaactaaaggagattttgatctatgaaaaaagaaaaaacaatcagcgtactgtttctggtacagtcagcaatgatcgctgcgatttatgtggtcctgaccatcgtatttgccccgatcagtttcggacagattcagtttcgtatcgcagaagcactgaccatcctgcccgccttcactccggctgcaattcccggactctttgtgggatgtctgatcggaaatattttaggaggcgcaattcttcctgacattattgtcggaagcatggcaactctgctcggtgctattttcacctatcttctgagaaaccgcagcaaatggctcgcaccactgccgccgatcattgcaaatacagttctgattccatttgttctttattatggatatcagattctgcttccaattccattccagatgcttaccgtgggaattggtgaagttctctcatgtggaatattgggtatgattgtctacaccgctctgaataaatataagacagttattttccgtcagtaacaaaaaggaagaagttctttcacagagaataaattctctcaaagacttcttcctttttctgttatttcatataaccgataaacgtgtttccacttcctgctatcatagcgctcatctgttcaatcgaaactgtattttgggatgctgtatccggatcgatgtaagtgatatccgtcatactatatcctgtcagcaggatcgcatgattggcatctgtcatcgcaatgaccggaaggcccttgttgataatatacagaacctgttccagactacatccggtcaggtctactttttgggcattatacgctgccatcacctcttcacaggtctgaagagaggtctttccttctccatttccaaacggtgctgtctctgtatcataaaccagatctctgttgcctttttcccatacatatgcctgttctgatgagattactactcccgaaatctgctctgctctctgaattgcataagccgccttatcgtaaatcgcaaccagttctcccattccatatacatagtacttttcagacttcgacttgtcattcagcgtgatcgtgatcggctttttccccaccacctgcttcggacgcaggattttaggaacagtatcggaaattcctttttcataagtcagccgcatctgcttttcttttaaatctgtactgaaagcttccagagttatactttttgtcttcttttcttcgttactgctgatataatcctgactggtaactgtataagtctctcctgattttacaaccctgttcagagtcatcatattttcttcaataaatacatcggatatataaatcttatctgctgagtatgtcttcatcacttcattttctgaatttctgatctccagctcatacatcgggaacagttcccctcccgctgccgtatgaccgacatcttcctgccgcagatatccatacacaaaatctgatccgataaatccaagcggtctgattgcttcccctgattttgcggctacagcattttcttcatctgttttcagattcaataccttgatttcctgtgcggtattgatcgttcctgacgtctggtatgcgatcaaatgcccgtctgcagacaccgtatactgcccttcttccagattttttgccaacactgtctgctcatcctttgtcagatctatcttgtaaaactttccgcctgccagaatatacaaaagattctgatcctgattgtaatacaccatttttccaagctcttcctctgcgattgcaaatgattttgtacttggaataaacgctttttcctgtactacatttttttcaatatcataatagtaaatatcaactccgacttctccctcatgtgctccgcgattcatatacccataaactgcaaacgcagtacttccattcttttccacactgatgatccggatattatgctggtcacacctgctccgagcatcatttccttcgatattgctaaaactgaatacctgtgcaagctcattctgctttacattgtatgtccataaatttccatttctcacgaaagaaacaatatttcctgacgaatttgtttcatacaatatatcggacgatgctatacccagaagaatcccgttctgatccagcactttctgatttgcatcaaaaatctgttccatcttccgattataatccaaaaggtagatttccccctgcacgtagcgaatcctgaaaaactcgcggacatcatacgtctcgatctctcccgtatctccggcacatgtcacctgatactgtgcaagcagcgacgtatagacggaattgctctctttaatgctccactccggttcctcaaccacctgcggactcagatttccccatgtcacatgatctgcatcagaatggatggtaacagtctggtaagttgtattgtccccttctgcactcgtttcaagatagtttttcaattcctcctgactgtttttttccagcgtctttgcatgaaaatcctgggcaaaatccagacattcttttaaagaaagttcatccggtcttgtaattctggtataaaagtgagcctgttcctcctccatggaaagaatcacttccagaacagcttctgaaacttcatccggaagaccttttttcagatccagcaaaatcgtctcatcagaaatatccttctgtttgccttccagataggtttcctctccattcagcgaatacactttatattcaacgcctgtgattttatttccaaactcttcaatctgtatctgaagtgttccgtttgcctccaggggtgtaatggtgtcccgcattgccgtaacatccatctcatttacatagccggccagagcattcacagtcctgccttccttttgaaatgagattctcggaagtgtaggatctcccagatcgatgatctgatcgtctacaccattgttcataaacagactgctgacaaaaattgctgccacaaatactacaaggagtattcctgcctttctcattctttttttcatgattctgtccccttatctaataacactcccagcattgggtcaatccccaaaaatttcctgcactcccaaacctggctttcactcccctgttttgcctgattcgtctttactgcacgcagaagaatatttttcggcgtatgttccatatcgataaattccagaacctgagtctcataaccagactgctccaaatatttcgctcgaagtccgtctgtcagaagcgccgcaaaccgctcttttaaaagaccataatccagaatcggcgccagcttatcatatccggctccttcccgttgcatctgcccattcaattcatgctgacagcatggaaccgacaggatgaccttcgcattccatcccaccgctttggcaagtgcaaaatctgtcgctgtatcacaggcatgaagcgtcacaaccatatccacttctctgacaccttcataatccgcgatatctcccaccagaaattccagtttgtcatatccatatttgcggcttaactcattacaatgatgaatgacatccgatttcagatctaacccgatgatacggatatcgtattccttcagaacatgcagataataatacatggcaaatgtcagatacgattttccatatccaaaatccagaatcgtgatctctctgtctttctcaagttttggaagaatatcctcaataaattccaaaaaccggttgatctgccggaatttatcaaatctggaatgtacaatttttccatcctttgtcatcacacccagatcctggagaaatggaaccggaattccttcctctaaaatatatttcttacttctattatgtgacaattctaccggtcttacactgccttttgacgcttttttctgaatggttaccttgccttttttgctcactaaaacagtgtaattcatatgcactgtagatgcctgcatctgccggaattcttccatatattccagcaatcggtctcgtgccgaaatcgggtccagattctcatgaaaggcctgtgtttttgtaaaagactccagttgaaaaaataaattgccttttttctcgatcggccgaacctttacctttaaaattccctcttttttcctcggattgctcaaaactgcctgaacaaattctatatttaaaatatctgataataattttttgatcgtttccatgcgattccccttgtcatttgttttctatataagctatgtgtgaacagtaactattgtaaaacaaaataaagtctcgtgcaataaaacaagtcttaaattaaaagaagacgggaaaaattcccgcctctcctactcttcttcagaattctctctgaaaaaacatgaatcttgttcttttttatctgcttttctaaaacgaactgtcgccttaaaaagatctccgtccagatataattccagttttccgccctgcatctgtaccagacttttcgcaatcgataatcccagtccgcttccttcggtactccttgaaatatcaccgcgaataaaacgttctgtcagttcatctgctgagaaattgagcggatactccgaaacatttttcaaagaaaatatcacttcatccttatcagtgcgcagatctgcataaattctcgtccccggcattgcatacttcgccgcattattataaagattttccaatactctccacattcttcttccatctacatgaataatcgccggctcatttggaagtgtctgaatcagctccagattcttatgttcaaatttttctgcaaactctcccgtcgtctgattcatcatctctaccagattgacatccatcaactgcagattgatattcccgctgctcaccttggatgcttctacaacatcctctgtcaatgttttcagacgctgtgcttttgcctccaaaatttccagatacccctgtatcttaggatcttcaatattggatcgtttcaggatatccacgtaattgataatggaagttagcggtgttttgatatcatgagatacatttgtgatcagatccgttttcagacgctcgcttttcacgcttttttccacagccttctgcaatccggttccgatatcattcagcatttctgctacttcacgctgttctcctctgagatgttccagagaaatctgatattccagatctcctcctacaactgctttgattccttttatgattttattctttgcaatcgcattcaataccagataatacacaatgaatgcatctgctgccagcgtgatcagcacaaatcccggcgttctgaataatgccagcatccagtggattccaatcagtatcacccctgatacaaccattctccacaccacatttctgtttctccagaatattctaaagaatctgcaaaacgcatacaatacgctgttcttccacatcgttcccgcttttatcctgcggaccaggctcagatatccgaccaggaacatgatcatggtataagccgctgtacatgcaagttggatcatatcttgcattgtcggaacatatccggatgcatattcataagaatatccgatcgttgcagtcatcaaatccgtactttctgcaaaatacccgagggccatattcccattattcatccagaacatcatcggaattatccagatcccaatcacaaacactgctgcaagctccgttttccatctgtcaaatacattcaaatgcactccgtcacttcggttgtttcttccggcgatcactgtcagccatatcaaactcacgattatcagtaatactgccgcaccgagcaggatcaccgcacgattgatataaggtgcatattcatcatataatttcttatccagataaaaagaatcctgtattgaaaacctggtatctactgccgctgcaaaaataaaatcaccgttgctgtttctgcgctgtgactttacaaactccttccagtcatttgctgtgatatccatattggtcttaaaatcagaaagctttggctgaacaatcatatacttcgcatttttctgaatatctgagatattttcttttacactgttgtaatcctgatattccttgcgatttgtataaactttttttgtttctttatcaacaaaaatataggcaaagtttgtatttccctctgtccattctgcactgttctgataagactggaaatcataataaagatttgacaggatgctgcccaattgtgcatacacttcactcagctttccattcagctgcggcgtctgatttacaacatccagaatattatttcctccatccggccgcgcctcttcttcaatggcaccactgaatccccagaaatcccggtacaccgtctcgcctttttcatccagaatatcatgtccggcaaattgactgagactcacatttccagaagccagtgcatttacaatctcatcagatgtatatccatctatatccactgtcagcgttttctttttcagcagacttaaaaattcatcccagtaatagtaatgataggttttatctgctttttgacagacaacgatgggattttcctgcgttgcatagttattttgatactcctcactccatttctgaagatccgagagtttataccgcagtctttccgtctcttcatcatagtgccttccgttatatccatactgcatgatatcgatcagcttatccggattatattttccatctgtctcgaaaatatcttcataggaaatctgacctaaaacatccatcgtagcccggcacatctgattctcaaattctttggaatctgtatactctgtcggctttttattccagatttcttttacacttacagaatatgtggaaataatcaccagactcagcagtgccgtaattgccgaaagaacagaaagaaagatcaaaatgccttttacaagcgcacttttataccatttactcatgaaaaactcccttctataatttctcgatcttatatcctactccccataccactttcaaatatcgcggttcctttggattgatctcaatcttctcccggatatgacgaatatgtactgctaccgtattatccgctccgattgcatcttcattccagatggattcgtaaatctgattaatcgaaaatactcttccctgattcttcatcaaaagcaataaaatattgtattcaatcggagtaaggcgcaccatttctccgtctaccgttacttctttcagatcatcattgacccgaaggccgccaacctcataaatcgtctcctgcgtactactcacattcccgccaagctgtgtgtaacgacgaagctgagatttcactcttgcaaccagctccagtggattgaatggttttgtcatataatcatccgctccgatattcaaccccagaatcttatccgcatcttcagattttgccgataaaatgataattggaatactgttcgtttcacggatcttcaaagtcgccctgatcccgtccagacgcggcatcataacatccagaatcaaaagatgcaccgtttccgtctccagcatctttaatgcctgcatcccatcataagccttcagaacctgatacccttcctgtgtaagatatatttcaattgcttctactatttctttatcatcatcacaaactaaaatactatacattttcatcacctcctttacagtatacatgatattctcatttttttaagagccattggggaaaatcttaggaaattcttaattcagttaccttttgttgttatttcgttttttgtacctatc

SEQ ID NO: 6998 - DNA, 41324 bp, Unknown
  gut microbiota DNA sequence
aatataaaaattttaagagaatagaaacacaggcagaaggattagaacattcttctgccttttcttatgaagagaaaggaacagagatatgaatgatgtattggaaaaattacaacgtgtcaaaatccaaaataagaccaggctgtccaaagaagaccagcaattttgtcagatacagcaaaaattatatgacagtaccagaaatcattttttaagtatgtttgtagatatggaaacactgcaccagcaggaactgaccttttatggaaaggtacagaaatatgcagacagggtgtaccaacagaacctgatttgtatggataaaaagaaacaaacagaactgatggaaaaggtacataatcattttatcagaaccattatttccttctttaaccggaaatatggtcttgccatacagaaacattcgtatgaacgctatatttccctgcagactctggcagaacccgtattacataagcggatttcttctttaacagaagaagagaagcaaatttatcgggaagaaaggaagaaatgctgtaaacagaaagaagaaaatcttcatgaagttttgtttgccagaattgagtatccgttgattttggatgatattttttcttatctgggcggttttagttttcaggagaaagtggagcaggagattaaaacagatgcaaaagcaggagtgacctatgcaaaatataaattgcaaagtaaaaaactgtccattcaaaacctgttatgcagcaaaacagatctttggggagaatacgaaatctgtctggatagtgaaaaatataaagcacttttacgggcattgactttttttgactccagtaaagaacaggtttctatttatgatggctggctggaaagatttgtaagtttttcatatagcgggaaaaaggagaaagaagggatttttgatgaacaccctgcgcttggaaagaaagttgttaaatttaagtattttaaaaatggcagatgggatattgtttttgccagtggtgtacatgcattgtcttttgccaaagagtatctcggctataaggaggcggcctaatgggaaaatacaaaagagataagggacttcaaataccaatggagcaaagacaaaacttgaatgcgaaaattttgtatctagtggaaaatcatgaaacagaactatatgggatcacaccagaggatatttttaatgtgtatatgggaaatggtgggctgcatggactggacaggaaagactttcaaaattttcatgcttatacagaagcgaaaaaagaaatagagcagggacagttttttacaccagcggaaatatgtgaatttcttgttgcctgcgtcaaaccggaaccgaaggatataatttatgatttgacttatggtaaaggagatttttttaattatcttcctacagaaagtaatatctatggaacagaaattgatatgaaagcggtgaagattgcccagtacctctacccgaaggcaaacctgcaatatggcgatatccggcagtattcccctgttttaagcggggatattgtgtttggaaatccgccctttcatctggaatggggaacaaaagaagcaccggtatcttcccagatgtattactgcaaaaaagcatatcaggtactgaaaaacgggggtcttttggttttgctggtctcggaaagtttcctttcagatgatttttcaaataaaggggatattgaagaaatcaatcacatgtttaatttgattgtacaattttctttgccggcagatgcattcaaagagtatggtgtgacatcttttcggacaaaagcaatgattttgcagaaaaagagtcagtatgtaacagaaagaccatacactacagagttggaagttctgaagcggccacaggaaatttatcaaacttatgtgttaccggttcttcaggaacgaagaaaaaatgctgcaaatatttattttgaatgtcagaatacagatttagaggcaaagcagaaacaggtatttcaggaaaaaacggtgaaacttttgtttgatatcaaaagaaatcgaaatatcgctcataaagctggactggcagaagcgattttgcggaaatacctgaagcagacgaaaccggaggaactctcctggcaggagtgggaaaaaattaaaatacagccggaagatgttttacggaaattaaaggggattttatcttctgcgaataagacatacaggaatgaaatccggattgtaaagacaacttatggatttaaagaaaaggattatcgggaaaatgggaccgatatgaatttgggttctatcaattcttttgtattatccaaaagagaagttcctggatttgagcagttcttaaagaagaaacggcgagaatttgcattgcaggaaacatcttttgagaaaatgaagcaggatgacaaaattgcagaatatctggaaaattggcatgtaacaagtcaaatgacaggggaggtcaaatatctgaatgctgtacagaaaaaagaagtgaataaactgctgcagaaacgatacgttgccctacagttttctatgggaactggaaaaagcctttgtacactggcaatggcgcagtacagaatgaaatataatcctgtccggaatatattcattgtcggcacagccctggcaatcaataatacatgggaagaaatattggaagactatcagattgatttttaccgtattcggaagagggaggacataaaaagggtacagagaggacagattgtgctcttgactatcaatctgcttacggaattaaaaagggagatgaaaaaactgttacgtatccgctgtcagaaagtcatgttgatttttgatgaaagtgatgcaattaccaacggaagttcaaaacgtacaaaagcaatgctttctgtttttcgaaaatgcagatataaagtgctggcaacaggaacactgacaagaaataacgtggtagaagcagcacctcaattagaactgctttataacaactctattcattatctggcaaagaatgaatggatctaccgattcaaaaacggacagatggaaaaaaataggaacttctttttgaatcagccatttccagcttataaaagagggtatgaactgttttcttattcctatttaccaaagaagattacagtgtttggtctggagaaggcaaatcaggatatttataatgcatcatttttagatgaattattagaaaaaacagtcataacaaaaaattttgaagaagtggtaggaaggaaaatttataagatttaccagggaacctgttcttttagcgaaagggaaaaagaagtgtatcgaatagcagtaaaagagtttgataaaatccgcaggaagtattttgcagcttacggcaatgcacgaaaggattccatgtttcggattttgcagcaactgctgctccttctgaagatatgtgcagatccttctcttgcatacgaatacgatagcaatgaagtacctacgaaggtaaaaaaagcaatccgtcttttgcagatgtggaagtatgagaaggttgcgattggagtacgcagaatagaagtggcagattcctattaccgatatttaaagcaggcatttccagaaaggcagatcttttatatcacaggggataaagttccatgcaagcagcggcagaggattgtagaaaaactaagaaagacagaaaatgggatattactttctacgcagcaaagcttgtcagaatctatgaatatagatgatgtggataaaattatcctaccagagcttcattacaatcatgcggctatggaacagtattattttcggtttatccggtatacgtccagaaattttaagcaggtggtatttttaatttatgaaaattccattgaagtgaacctgctaaagatgatactggcgaaggagaaacttaacctgtttatgaaaaatcaattgctagaaaacggagaactatatgaaagattcggcatcaatccccagatattttcccttttgatgacaaccagtgtggatcaggaaggaaaacttcagattcaatggggcgaacaaaaaattagttagagtgtttgaaaaagaaacatacgtaatgataatttatggcagaatttttactcaaagaaattcaaactacgatacttttactctgcttatagcagaacaatatatattttgagaaagtattgaaaagtttattagaaaatacagaataggcttaaaagtctgtttatatttagtgtagaacttagcacaatagtacgcaaagtctccctagcgtggcaatgacagatataaaaaatacttgtttttctggttcttgtattttgaggatttgtcagtagagatttataggaaaggaggatgtatgaaccagaaacatcaaaatgttccaatttgggaaaaagcaaaccttactttggaagaagcggcagcttttactaatataggaataaacaaattgaggcagttaacagacgaagatggatgtgaatatgttctttggataggttctaaaagattaataaaacgtaagaagctagaagaatttttagaacatgcagaaagtttataagagtcattgaaacaaggggctttgatatgataatatttgaatatcatttcaaggctctttttggattatgaaaggagaatatatgtccgaaaagagaagagataataaaggaagaattctgaaaacaggagaaagccaaaagaaaaatgggcaatacatttaccagtatacgaattcatttggggagagaaaggtaatctatagctggaaattggtaacaacagataaagttccagcgggaaagagagaggatgtttcacttagagaaaaaataaaagaaattgagcgaaaattagaacaagagctcattattacagggcagaatatgacggttctacagctagtacaaaaatatataggacagaaaacaggtgttaaagataataccagaaataactataattttgtaataaatatcataaaaaaggagccttttggacaactgaaaataaatgaggtaaaaaagtcagatgcaaaagcatggttaatcaagcttcagcaggtagatggcagaggatatagtacgatacattcagtgcgtggagttgttcgacctgcttttcaaatggcagtagacgatgatattttattaaaaaacccttttgaatttcagttggcgacggtagtagttaatgatagcgttacccgagatgccataacaagaaagcagcaaaaaaaattcttagaattcatcaagaatgataaacatttttcgcgttattatgaagggatatatattttattccatacaggaatgagaatcagcgaatttgtaggattgacgctgtcagatatcaacttgagagacagaaccattactatagatcatcagttgcaaagaaatagccagatggtatataaggttatcaatacaaagactacagcgggtgaaagaacgatacctatgactgacgatgtatatgaatgctttaaaaaaatagtagaaatgcggaaaaaagtaaaggtagaacccgttatagatggtaaacttggatttttatatttagacaaaaataataaaccgatggttgcattacactgggagaaatattttcaacatatccgagaaaaatacaatcgcatttataaggaacagatgcctattattacaccgcatgtttgccgtcatacttactgctctaatatggctaagagtggaatgaacccaaaaacgttacagtatttgatgggacattctgatatatccgtaactctgaatacatatactcacttaaaatttgaggatgcgagagcagaagtaaaaagaattacgaagctcaattgatgtattttgaacaatttacatcatttgaatttgcatcagattttttgaggattaatattaaatgtatggtataattatcaagaagcccataaatatgagaaatttgagtaaatatgtatagaaaaaagttcaaaaagcgatgatgtaaaatgcaaaaatagaaattgatttacatcacattttacatcatttggcgaaaaaaatatgtagatttacataggattataaagacttgtataaggaccaaacaaaaatataaactctgtaaagtcttgaaaacatagggctttacagggttatgaagggatttgaagagtatgataaaagtactatttgtttgccacggcaacatctgccgcagcaccatggcgcaatacgttttccagaacctgatcaacagacacggcctcatcgatcagttctacattgattccgcagctaccagccgcgaggagatcggtaatccggtccatcacggcaccaggcggaagttaaaagaagtcggtatcccatgcggagatcaccgcgcacgtcagttagaaaagcgggaatatgacgaatttgattatctgatcgggatggattctatgaatattcgaaacatgatgcggattctgggcggcgatccgaaaggaaaagtgtcgaaactgcttgattttacagagcggacagggcaggatattgcggatccgtggtataccgggaattttgacaggacatacgaagatgtgaaagaaggctgtgaagccttactgcaggactgcctgctgcgcctatagagcgcagctgagcagtttttttagattgttgtggaattgttttccgtggacatgaagtttatgacgttcggaattggagagatcctgattcagatgtttttcgtaacgattgaagagtacgcgatagtccatattctgacggtggctccaacggatcagtacccagttcattgcatcttcggtccagtactgggatgggatgccggcttcttttaggacagtgatatactgcatggcgcgcacagacagtttgttcagatgtttttgtttttctgcctcagaagcagcatctttccggcggaagaacagaaacgtacgttttttcttctgggagttgttctccaaaaattccatcgcaagatctacggtttcctgcagacgacaggcagcgttccaatatacgacaaacggagcagcctgttcatcatcctcgggaccaacggtaaaggtacggaagacacggatttgtccgccgcctaattctttgtcatattcgtgccgggattcgggattggaaagtacccggtacgcctccagtatttcctgcatacacgcagtggtgtcgatgccctgattcatattggcatccgggtgatatactttagcaagcgcattttttgcacttgtgatttcctgtaatgtagcttcccgggaaacaccgagaatatcatagtaagtacgggaattcataagaacctccttcgatttatagaatctccctttcagagaatgaaagagagtaaaaatatacataaaaaaagcagatggcaagaaaaaatcagtctgcccggacggaaatctgacgattgccgataagaatatctgcaccaaattattatattacctggatatggaaaatgcaagcaattttgctgacggaattgcccgattgtgttatatttttttatagagaaaaaagtcaggaataacagacatagaaaagaggttatcagacatgtatattgcagacttacacacccattccagatattccagagccaccagcaaagagtgtacgccggagtatctggatctgtgggcgcgcagaaaaggcatccatctgatcgggagcggggattttacgcatccggcatggagagaagagttaaaagaaaaattaaagcccgcagaagacggattttatgtgctgaaaaaagaatacaggattcaggatgggaatacgccggatcacatgattccccgattcgtgatcaccggagagatcagttctatctataagaaatacgataaggtgcggaaggttcacagtcttttgatccttcccgggctaaaagaggcagagaatctttcggagaaactggaagtgatcggaaatctgcattcggacgggcggccgattcttgggttggattgccgggatttactggaaatcatgctggagacaacaccagatggcatgtacgttccggcacacatctggacaccgcatttttccatgttcggagcattttccggatttgatacggtggatgagtgcttcggggatttgagttctcacattcatgcagtagagacgggattatcctcggatccgccgatgaactggcgggtgtccatgctggaccggtttcagctgatttccaattccgatgcgcattctccggcaaaactgggaagagaggccactcttctggatatcgactggtcctatgaaggtctgagaggtgccattcaaaacggcaacggtctgtcaggcactattgaatttttcccggaggaaggaaaataccatatggatgggcatcggaagtgcaatctttgtctgacaccgatggagacagaaacatatcaggggaaatgtccggtgtgtggaagaaaaatcactattggtgtctctcatcggattgaacagctggcggacagggcggaaggttttgtaaaagaaggcgccaatggatttgaaagtctggttccacttccggaagtcatctcggcatgcgtgggtgtttcttcccgaagtaagaaggtacaaaaagaatatgagcagatgctgcggatgatcggaccggaatttgagattctgagaactgtgccgttggaggaaatccggcaaaagtccggatttctgatcgcagagggaattgagcgtctgcgaaacggcgaggtagagcggattccgggatttgacggagaatacggaacgatcaaactgtttcagccgtatgaactggaagaggtcgatagacagcggtgattgccggaccgaaagaggggtgttgattttctcacgttgacttgctagaatagaagaaacaataagattcgttgcacccggatggaaggatgcctccagtttggaacatccttccctttttgtggggagccggatttcaggaaaagaggtttgatatcatgcagtatgattttacaacgattatggaccggcggggaaaggatgccatcgcagtagatgcgcctgccggaaacaatacaggcaatgatttttttgcaggtgcgaaaattcgggaagggtttgatctgatcccgatgtgggtagcggatatgaattttccggcgcttccggcaattccggaggcgatcatccagaggacaaagcatccggcatacggttattttgatccgtcggcggcatattatgacgggatcatcaactggcagaagacacgtaatggcgtgaacgatctgacaaaagagtgcatcggctatgagaacggtgtgctcggcggtgtggtttcggctttgaaagtactgtgttccaatggggattctgttttgctgcagtctccgacgtatatcggatttacacattgtattgaggacaatggatggaacatcgttctgaatccactggtgttggatgaagaaggaatctggcggattgattacgaagatatggaagaaaaaattgtgcaaaacaagatccatgcggcagttttttgttcgccgcacaatccgaccggacgtgtctgggagcgctgggagattgaaaaggcaatggaaatctatcagaagcatgatgtgtatgtgatctcagatgagatctggtcagatctgacacttccgggatatcagcatatcccgacacagtctgtgtccgaggatgcaaaaaacagaaccattgcgctttacgctccgtccaagacatttaatctggcaggattgatcggttcgtatcatatcatttataattcgtatttgagagaccgggtatgtatggaagggaaaatgacccattacaattctatgaatgtgttgtccatgcatgcgctgatcgcggcatattcgaaagaaggaatggagtgggtggacgagcttcgcaccgtgctggatacgaacatttcctatgccatggagtttatcaggcgagaatttccgggtgtttccgtgtccagaccgcaggggacgtacatgctctttttagactgcacagactggtgcgaggcgcatcaccagaccattgaggagctgcagagggcaggcgtggaagtgggcgtgatctggcaggatggtcgtccgttccacggagcgtgccatatccggatgaatctggcgctgccgcacagtcgtgtgaaagaagcgtttgaacgattgaaacagtatgtgtttctcgactgaaaaatagtgacataaaaaaggagtacaacatgcagtatatcattccgcactactataagaagtttgcatgtatcggcggggactgtccggatacttgctgcgcagggtggcagattatgatcgatcccgcttcgctgaaaaaatacagacagacaaaagggcggcttggcagccgcctgcacaatgaaattgactgggaggaaggcgcgtttcgccaatatgagaagcgctgtgcctttctcaatgaagaaaatctgtgtgatctgtacatagaaggcaacggatccgggatgttctgcaagacctgcaggctgtatccgaggcatgtggaagaatttgaaggactgcgggagatttccctgtctttatcctgtccggaagcagcaaacctgatcctgggctgcgaagagccggtccgttttctggaggcggaaaatccggatcgggaagagacttatgaggattttgatttcttcttgtttaccaaactggaagacgcgagaactctgatctttcagattcttcagaatcgggagtatccagtccggctgagaatggcaatcgtgctggcactggcgcatgatctgcaggagaggatcgacaaaaatgccctgtttgagattgatgggcttctaaagcgttacgagaaggaacgtgtctggacctggtttcaggaaaaactggacaatctggatacagaggcaaaaacgcagcaggaggtttgcggcaatctgtttgtgatcctgaatcatctggaagtgctcagagacgactggaagggatatgtcaaagaagcaaaaaatatgttgttggaatcagagctgtcagcagagcaaagaaaagagttcgaatccgtgtttacggagaagatcatggaacagctgatggtttattttgtatttacttacttttgcggggcagtctacgatgaacaggcatatgggaaactaaaatttgcagtggcaggttgtattttgatccgggcgctggcaaaaggtgtatttttgaaaaatggaacgctggagttttcggatgttgcagaggcggcacgccggtatgcaagagaagtggagcattcggatttcaacaagtgcaaaatggagcagatgctgcaggatgaaggcaaatttggactggaaaaattatttgtaattttataaaaggcgataggataagaaagaaacaacaggggggattttatgacaaaaacagcagcgcctatgacaagcggatcgatctggaaacagatgactttttttgcgatgccgatttttctgggcaatttatttcagcaattatataacaccgtggattctctgatcgttggaaatttcctggggagcagtgcactggccgcagtcagctcatccggaagtctgatctttatgctgattggatttttgagtggaatctcagcgggagcgggggtgattgttgcccggttttttggtgcaggagatgagaaaaatctgcagcgcgcggtacacaccacagttgcatttggtctggtggcaggagttttgatgaccggcgtcggagtggcactttctccgcagatcctgcggtggatggatacgcccgaaagtgtaatgagggaatcggtgacatatctacagatttattttgcgggatctttaggatttgtgatgtacaatgtcctggtgggaattctgcaggctgtgggagacagcagacatcctttgtattatctgatcgtatcgtctgtgatcaatctggtgctggatctgttgtttatcacaggatttcatacaggagtgggaggtgcggcggttgcaaccgtgatctctcagattgtgagtgcactcctttgtttctggcagctgctgcggacaaaggaaagctatggattgaagattcgaaaaatccgttttgacaaaggaatccttgtccagatcatcaagatcggactgccttccggagtgcagaactctatcattgcgtttgcaaacgtaatcgtgcagtccaatatcaatgcattcggagagatggcaatggcgggctatggggcctacacaaaggtggaagggttcggttttctgcccatcaacagctttactatggcactgacgacatttgtaggacagaatctgggtgcaaagcaggaggagcgcacgagaaaaggggcgcgatttggaattctcgcagcagttatattggcagaactgattggtgtcgtggtatttcttctggcaccacagctgatcgcggcatttgactcttctcctgagatcattcggtttggtgtggaaaaagccagaacagcagcgttattttactgtctgcttgcattttcacattccattgcagcaattctgcgcggtgcggggaagacgatggtgtccatggtcattatgatgatgtgctggtgcgtgatccgggtgtctttcctttccgtgatgattccgctcactcacagcattcaggtggtatactgggtatatccgctgacatggagtttaagttctctggcatttttctggtattataagaaagcgaagtggatataataaatagtaacagaccagatcagggaatggagaatcgaaatgaaacgtgttctcgcagtgttactaagtgcagtactgagtctctctgtggctgttgtgcccgggattcagactctggcagaagagccggatgcagctcagaaaacagaagggcagcaagaggcagaggtggaagtacaggcaccaagtgccgttttgatggaagcgtctacaggcgctgtgttgtatgaaaaagatgcagatacaagacgcgcgccggccagtgtcacgaagatcatgactatgcttttggtctttgatgcactggaggatggaaaaattgcgttggaagatgaggtgtcaacctcggaatatgcagcgtccatgggcggttctcaggtgtttttagaacccggagaaacgcagagtgtggatacgatgttaaaatgtatttccgtagccagtgccaatgatgcctgtaccgccatggcagagtacatagcgggcagtgaagaggcttttgtaaagatgatgaatgaacgggcggcagggctcggcatgaaaaatacaacgtttcaaaactgtaacggactggataccgagggacatttgacaacggcaagagatattgctctgatgtccagagaattgatcgaaaaatatccgaagattcatgattactgcatgatctggatggatacgatcacccataccacaaaaaaggggacttctgaatttggattgtccaacacgaacaaactggtacggcagtatccgtatgccacaggtttaaagacaggttccaccgatgaagcaaaattctgcgtgtctgccacagctgaaaaagacgggatggaactgatcgcagtgatcctgggcggagaaaattcgaaacagcggtttcaggatgcgacgaagcttctgaattatggattcggaaaatgccaggtatacgaagacaatgatccgccgaagttaaagccggtcgaagtgcagggtggtgtcaaagagcagattctctgtgagtatgcggatacgttccgctatctggacacaagcggagcaaatctggcaggggtgacaaagaagacacagatgaagcagtctgtaaaagctccggtgaaaaaaggacagaaagtaggcgaacttgtctataagctgggagaaaaagaaatcggaagagtggagattctggcaaaagaaagctgtaaaaaagcagaatttctggattatctgaaaaaagtgatgcaaaaaatcagggtgtagcgaagtgctgcacctttccttatgttgaactgcatccaaaaaaatgataggataagaagaaaaaatgacaaaaaggagaatgccatgaaagcagtgatcttagtggtctttgttctgacagtggcggcagttctttgtctgctggaagcgtaccgggagcagcagtatttcaaggtgacagaggacggtgttgtatcccgcaggctgaacgggctgaaaaaggaaaagaagatcgtgtttttaagcgatctgcacaataaagaatatggagtcggaaatgaacgtttgctggatgcgatctgcaaagcgaggccggatctgattctgatcggcggggatatgctggtcggaaagaaagggtgttccgttgctccggctctgaaatttgtttcaaaactgcctgcgatcgctccggtttattatgcctgcggaaatcacgagcagcggatgaagagaaaaccggaagtctatggggaggtttatcaggcgtatcaaaagcaattagaagaatgcggcgtgcattttctggaaaatagcagtgtcctgcttaaggaggatgactgcaggatccggatttcggctctggaactgccccttgcaacttatacaaaattcaaaaaataccgggtcacagagcaggatgtaacagcatgtattgaaaaagaagctgcggattatgagattcttctggcgcacaatccggtttattttgacgcatataaaaaatggggagcagatctggtgctttccgggcatcttcacggcgggattatccgtctgccgggaatcggaggtctgatcacgcctcaggcgattccgtttccgaaatattccggggagatgacaacagaaggagagcagacgatcattgtaagccgtgggcttggcactcatacgatcaatcttcgttttttgaatgaggcagagatgatcgtgattcatctgcggggcgaaaaagacagttgagaatttgaaggatttcccgtataatgaaacacagtgtgaaataacagacggtagatgggagaaataaaacagatggggataccggtaaaattgcaggtttttgaaggtccgttggatctgctgttacatttgatcgagaaaaataagattgatatctatgacattccgatcgtagagatcaccagccagtatatggaatatatccggcagatggagcgggaagatttaaacgtcatgagtgaatttctcgtgatggcggcaacacttctggatatcaaatgccggatgctgctcccgaaagagatcaatgaagagggcgaagaggaagatccgagagcagagctggtagaacagcttttacagtataaaatgtacaaatatatgtcctacgagctgcgggatcgtcaggtagatgcagaccagtatttttaccgggaggcagatattcccaaggaggtgaaaagttatgttcctgcggtagatctggatcagcttttaggggacgtgacgctggtacagctgaggaagattttccgggaagtgatgcgcaggcaggaagagaagatcgatccggtgcggagtaagttcggtaagatcgagaaagaagaagtaccgcttccggacaagcttttgtatgtggagacttatgcaaggacacataaaaaattcagttttcgtatgcttcttgaaaaacagaggagcaagatgcatattgtggtgacatttctggcagtgctggagttgatgaagacgggcatgatccgtgtttatcaggaagaaatctgcggggagatcctgatcgattcccagatataacagagcataagagcatgtcaggagaaacaggaaggaaagagaaagaatggagcaaaaaaaactgcaggcagccatagaagcaattttgtttgcaatgggaggctctgtggagctgaaaaaacttgcacaggcgatcggacatgacgaagaaacgacaaaaaaaataatccgccagatgatggaccggtatgagaaagaagatcggggaatccggatcatcgaactggaagcttcgtttcagatgtgcacgaaaaaagagatgtatgaatatttgatccgggtagcaaagcagccgaaaaaacaggttcttacggatgtacttttggaaacgctttcgatcatcgcctacaagcagccggttacaaaactggaaatcgaaaaaatccgtggcgtcaaatcggatcatgcagtcagcaagctggtagaatatgatctggttgaggaagtggggcgtatggatgcgccgggaaaaccgcttttatttggaaccacagaagagtttctgcgcagattcagtgtacattctctggatgaacttcctgcgccgaatccggagcaggtagcacattttaaagaagaagcagaggatgaggtacagttaaagttaaacctgtagttctgattaaaaatcttcggacataggatatagcaaagaatgtctggagaataaaaaagcaatgcatgagaaaagaagggaaagaggacgaacatatcgggtcgggctgatcctgggcttttgtcttctgattgcagtaaatggtctgtttccggtttcgtgtgtatatgcggaggaagaacagacaaaaatcgcatacggggagaatactccaggacagttatacgcccggtcggcagttttgatggatgcagacagcgggcgtattttgtttgcaaaaaatgccgaaacagagcgtcctatggcgagtacaaccaagatcatgacctgcattcttgcattggaacgtgcagacccggatgagagtgtgtcagtcagtgccaatgcggcagcccagcccagagtccgactggggacagtggaaggacagaaatttaagcttaaggatcttttatattctctgatgctggaatcacataacgatacagcggtgatgctggcagaacatctggctggaagcgtggagcagtttgcggatgagatgaaccagaaagcaagagaactgggacttagccatacccattttgtcacacccaatggtctggacggggcagatgacggcgggagccatcggaccacggcagaagaactggcaaggattatgcgctattgtgtgatggagtctccaaagcggaaggaatttctggaaattacaggcgtgtcttcctatcagttttcggatctggagcagacgcagacgtattcctgcatcaatcacaacgcgtttcttacgatgatggaaggcgctgtatctggaaaaaccggatttaccggggaggcaggatattgctacgtgggggcattaaaaagagaaaagcgaacctttatcgtagcacttctggcgtgcggctggccgaacaatcggagctataaatgggaggatacaaaaaaactgatggagtacggtctggaacattttgaatatcagagtatgaaaggcgccgggcaaaaatttaaaatccgggtgacggatgggattccggattccaatcagaaagaggcgtatacatatgcagaagcactgtcagagcagtcaaatctttcgtttctgctggcagactgggaatctgttcaggtaagaaggaacattccggcagtattaccggctcctgtccgggaagggacagaagtgggaacgatagaatatcgggtcaacggagaaactcttgccagacttccggtagtaatccaaaggtctgtgggaaaaattgatttttcatggtgctggaagaaaatagcagcaaaatatttcttaaaagagaaaatatattaaaataaatcaaggcaagtgattaaaaatgtcactggtatcgaatggaagagtatgatagtataaacgaaataaaaaaagacaagtaaattgatgtaatataaggagtgcttgcgatgaagaattttgaaaaatatgaaagaagctattttatgccgccggtgccgtgctatgactgggtgaagaaagaccatattgaaaaaccgcccgtctggtgcagcgtggatctgcgggatgggaatcaggcattgatcgagcctatgagtctggaggaaaaaatagaattcttccagatgcttctggatgtcggcttcaagcagatcgaagtgggatttccggcagcgtctgagacagaatatcaatttctgcgtacattgatcgagcagaatatgatccctgaggatgtaacgatccaggttctgacacaggcgagagagcatattatcaaacggacctttgaagcggtcaaaggagcgccgcatgcggtcattcatctgtataattcaacttctgtcgcacagagagaacaagtgtttaaaaagaataaagaagaaatcaaaaaaattgcggtagacggagccattcttctgaatgagctggcaaaggagacagaagggaatttcacgtttgagtacagcccggaaagtttccagggaaccgaggtggattatgcgctggaagtgtgcaatgcagttctcagagtgtgggagccgtccagggagcgaaaagtgatcatcaatcttccgacaaccgtggaaaacgcgatgccgcatgtgttcgcaagtcaggtggaatatatgagcaagcacttatataacagagaacatgtattgttatcgcttcatccgcataacgacagaggatccggcgtcagtgacgcagagcttggaattctggcaggagcggaccggatcgagggaacgctgtttggaaacggcgaacggaccggaaatgtggatattatcacggttgctatgaatatgtattcacagggagtggatccgggcttggatttttccaacatgagtgagatcagtgagacctatgagagacttaccagaatgcaggtttctccgagacagccatatgccggagaactggtatttaccgcgttttccggttctcaccaggatgcgatcgcaaaaggaatggcatggagagaagagaagcagtgccagacatggtcggttccttaccttcctctggatccaaaagatgtgggacgccgctacgagaccgatgtgatccgtatcaacagtcagtccggaaaaggcggagtcaactatattttaaaacagagctttggaatcagccttccgcagaaaatgagagaagaggtcggctatcttgtaaaggatgtgtcggataaagcgcataaagaactgacgccagactgggtataccatatatttgaagatcattatattcacgtaaaaacaatctttacagtagatgaatgtcactttaaacaggaagacggaatccttgcggaggcgacgatccatcatgcgggaagcgaccgtgtgatcaacggaatgggaaatggacgtctggatgcggtgagcaatgctattaagcactattttgacatcgattatgagctggcattttatgaagaacattccatgacaaaagggtcttcatccaaagcggtcgcttatgtgggcgtgatctgcaataaaaagcgctactggggagtcggcattgatgccgatatcatcaaagcttctgtagaagccctggtggtggcagtcaataagatcgaagaactccgaaatcagcaggaatgcaaggatgcaagactcttggagatcacgaattatatctatgcaaactataagcatgtgacactggatgagctgtccgaaaagtttttcctgtcgaaaccatacctttccaaatatatcaaggaaaaatcaggaatgacattcggagacatcctgaaaaatgtccggatgaaaaaagcctgcacgatgctcagggaaggcaatgcaactgtagagagtatcgcagagactgtgggatatcagaacgtagaacatttcaaccggatctttaaaaagatgtatcaggtcactccggtgcaattccgtaatcagaagtaaaaaacaaagacatatttccaaagtcaggaaatatgtctttttttataaaaattcggaaaaaataaaagaaaatggcaaagaaataacaaaaaacagaaattcaattgaattttttcgctaagtaatatatactagaataggcaaaaattttggtttatatttaaacacattttataatatggagggctagaatatgagcaacaatgcaacagaaaactcagcaagcagaagaattgccacagtgcttgatgagggcagctttgttgaaatcggtggtgcagttacagcaagaaatacagatttcaacctgcaggaaaaagaaactccggctgacggggtcattaccggctatggagtgattgacggaaatcttgtctatgtctacagccaggatgcatctgttttaaaaggtgcgatcggcgagatgcatgcaaagaagattgcaaacatctatgacatggcaatgaagatgggagcgccggtcatcggtctgatcgactgtgcaggtcttcgtcttcaggaagcgacagacgcgctggaggcatttggaagcctgtactttaaacaggcaatggcatccggtgtgatccctcagatcacagctgtttttggtatgtgtggcggtggtcttgcagtcgtgccgggactgacggatttcacattcatggaaaataaagaaggaaaattgttcgttaattcaccaaatgctctggaaggaaacattgattccaaatgtgacacagcgagtgctgaatatcagagcaagacagcagggcttgtcgatgtgacaggaacagaagaagagatcttaggacagatccgttctctgatctgcatgctccctgcaaactttgaggatgatgcatcctatgacgaatgtacagacgacctgaaccgtgtctgcgcagatcttgccaatgctgcggaagatacaggaattgcacttgccacaatttctgacaacaatattttctttgaaaccaagagagaatatgcaaaagaaatggtaacaggatttatccgtctgaacggaatgacagtgggagctgttgcaaaccgttccaaagtatatgatgcagaaggaaatgcagagtcctatgaacaggttctgacagttgacggatgtaaaaaagcagcagattttatcaatttctgtgatgctttctcgattccggtattatccctgacaaacgtgacaggatttgaagcaactctggaagctgagaaggatatggcacgtgcagttgcaaaactgacttacgcattcgcgaatgcatctgtaccaaaggttaatgtgatcgtaggaaaagcttacggaagcgcatatattgcgatgaacagcaaatctatcggggcagatctggtatacgcatggccgacagctgagatcggaatgatggatgcttctatggcagcaaagatcatgtatgcagatgcaaacgcagagacattgaaagaaaaggcagcagaatacaaagagctgcagtccagcccggtttccgcggcaagaagaggatatgtggatgcaatcattgatgcagccgatacaagaaaatatgtgatcggagcatttgagatgctgttcacaaagagagaggatcgtccggcaaaaaaacacggtacggtttagtgaggtgaggcaaagtgaagaaaaaattaagtttaatcgtacttgcctgtgctcttaccttaggtgtttcaggatgcggcagcgaggcagatacgacaacaagtaatgaaaaagagtccatggtggcttattcagaggcgattgtcagcagcttcagtcagacaccggatgaagtttttgaccagtatgaagagatgtccgaactgcagctggatctgatgcttctgaatacaggacttcctgtagattctgagaatttcctttccatgattgaagcctggaaagcgggagaggcagaatgcggagcattcaaaagctatggagaattcgagacagagatgacaagctccggaatcgtagtttctacagaagcagagtatgagaataagactgcagacattgaatttacattcgatgaagaacagcagatggacagcttgacgatcaatgcacattattctactgcggagattctgaaaaaagcgggactgaacaccattcttggaatgggaactgtattcgttgttttgatctttatttcattcattatttctctgttcagatttattccggaacttgagaagaaatttaagaacaaaaaaactgcagaaccggcaaaagcaccggctccggctcctgtaccagttgcagaaccggcagcagaagaagcttcagatgatgcagagcttgtagcagtgatctcagcagcgatcgcagcggcagaaggaacttctgcagacggatttgtagttcgctcgatcaagagaagaaaatcgaataaatggaacaaatggaattaatcaggaggattttaaaatgaaaaattatacaattactgtaaatggaaatgtatatgatgtgacagtagaagaaaagggagcaggtactgcaccggttgcagcggcagcaccagttgcagctccaaaggcagcaccggcagcggctccgaaagcagcagcaccggcaggagcaggaagtatccaggtaaaagcgggagcagctggaaaagtattcagtattgacgcaagcgtaggacaggctgtaaaagcaggagatgccattgtaacagtagaagctatgaaaatggaaatccctgtagtagctccggaagatggtacagttgctagcattgatgtggcagtaggcgacgcagtagagtcaggagcagtattagccacattaaactaggaggttttgacaaatggaatatatttcaaatacgctggggaacctggtagagcagactgcgtttatgaacctgacgttcggaaacctgattatgatcgcagttgcctgctttttcctttatctggcgattagacacggctttgaaccgctgctgttagttccgattgcatttggtatgcttctggttaatatttatccggatatcatgcttcatgcagaagattcggcgaacggaacaggcggacttctgtattatttctatgttctggatgagtggtcaatcctgccgtctctgatattccttggtgtcggtgcgatgacagactttggaccattgatcgcgaacccgaagagtttccttctgggtgcggcagcacagtttggtattttcgccgcataccttggagcaatggcaatgggattctctgacaaagcggctgcagcgatttctatcatcggtggtgctgacggcccgacttctattttcctcgcaggaaaattacagcagacagcaatcttaggaccgatcgcggtagcggcatattcttatatgtcactggttccgatcattcagccgccgattatgaagcttcttacaacagaagaagagcgtaagatcaagatggagcagttaagaccagtttccaaactggagagaatcctcttcccgatcatcgttacgatcgtagtatgtacgattcttcctacaacagctcctctggtaggtatgctgatgcttggtaacctgtttaaagaatcaggtgttgtaagacagctgacagagacagcatccaatgctttgatgtatatcgtagtaatcctgcttggtacatctgtaggtgctacaacaagtgcagaagcattcctgaacatggatacactgaaaatcgttgcactgggactgatcgcgtttgcattcggtacagcagccggagtattgttcggtaaactgatgtgctgggcaacaaagggcaaggtaaatcctctgatcggttctgcgggtgtgtctgcggttcctatggcagcccgtgtttctcagaaagtcggagcagaagcagatcctacaaacttcctgctgatgcatgcgatgggaccgaacgttgccggagttatcggtactgcggtggcagccggaacatttatggcgatctttggtgtgaaataataatggaggacagtaaaaatggcagaaattgcaaaaaaaccaattaaaattacagaaacaattctgcgtgatgcgcatcagtctctgattgcgacaagaatgacaacagagcagatgatgccgatcgtggataaaatggataaagtcggatatcatgcagtagagtgctggggaggagctacatttgatgcatcactccgtttcctgcacgaagatccatgggagagacttcgtaaattccgtgacggattcaagaacacaaaactgcagatgttattccgcggacagaacattctgggataccgtccatacgcagatgacgtggtagagtatttcgtacagaaatctgctgcaaacggaattgacatcattcgtatctttgactgtatgaatgatatgagaaatctgcagacagcagttacagcagcgaataaagaaaacgcccatgcacaggttgcaatgtcctatacattgggtgatgcatatactctggaatattgggtagatctcgcaaaaagaattgaagacatgggagcaaattctatctgtgtaaaagatatggcaggtcttctttgcccatatcaggcaacagaacttgtaacagcattaaaagaagcagttgagattccaatcgagatgcatacacactatacatcaggagttgcttctatgacatacctgaaatctgtagaggctggtgctgacatcattgatacagcaatgtcaccatttgcacttggaacttctcagccggcaacagaagtgatggtagagacattcaaagggactccatatgatacaggactggatcagaacctgcttgcagagatcgctgattacttcagaccgatcagagacgaagcacttgagtccggactgctcaatccgaagaaccttggtgtgaatatcaagacacttctgtaccaggtaccgggaggaatgctttccaacctgacatctcagttaaaagagcagggagcagaagataaattctatgaggttctggaagaagtaccgcgtgtgcgtaaagaccttggagagccgccgcttgttacaccttcttctcagatcgttggtactcaggcagtattcaacgtgctgatgggagaacgctacaagatggcaacaaaagagacaaaagatgtactgtctggaaaatatggagcaacagcaaaaccgtttaatccagaagtacagaaaaaagtaatcggagaagatgcagaagtgatcacatgccgcccagccgatctgattccaaacgagctggatacactccgcaaagagtgtgcacagtacagccagcaggatgaggatgtgctgacatatgcattgttcccacaggttgcaacagacttcttcaaatacagagatgctcagcagacaaaagtagatgcaaaagtagcagatacagaagacggagcatatccggtataataaaatgaaagaaaaggattggaagatgaaagttttccggtccttttttgttgtccggaaaagaaataaaaattcaattccttgtgcagaatctgttttagtgatataattacccgtggcaaaggaggacgattttatgtgtatcaaagatagaatagaacgattacgtcagaaaatggaagaacaccatatttctgtttatatgattccgacagcagattatcaccagagtgaatatgtaggtgaacactttaaatccagagcatttatcacaggatttacaggctctgcagggactgctgtcatcacaaaagaagaaagttgtctctggacggacggaagatatttccttcaggcagaaagccagcttcagggaagcgggatccgtctgcagaagatgggagaaccggaagtgccgacgatcgcagaatatattgaatctgtactgggagaatctgaaaatatcggatttgacggaagaaccatcgggattacagaaggagaacagtacgaaaagatcgcgaaagagaagcacggacaggtgtactatggctgtgatctgattgatgagatctgggaagagagaccggcgctgtctgaaaaaccggcattttatctggaagagacctatacaggagaatctacggcatcgaaactgaaacgagtcagagagagaatggagaaagaaaatacaggctatcatcttctgaccagcctggatgatattgactggctgctgaatgtgcgcggacaggatgtggagtattttccgcttctgctttcttatgcgctgatcaccatggattctgtggaattatatgcagatgaaagaaagtttgatgagaatatcttaaagcattttgaggagtgccaggtacatctgcatccatacaatgcaatctatgaagatgtaaaatctcttccggagggggcttcaattcttctggatccacagagagtgaattatgcattgtatcgcaacattccgaaagctgtccgtattgtaaaggaagaaaatccggaagtgctgatgaagtgcgtgaaaaatgcagctgagatcgagaatatcagaagaggtcacatcaaagacggcgtggcgcatacaaaatttatgtactggctgaagaagcatgctggcaaagagacgattacagagctgagcgcatctgagaagctggagaacttcagaaaagagcaggaaggatatctctggccgagctttgatccgatctgtgcctatggacagcatgcggcgatcgtgcattattcttctacaccggagacgaatgtggaattgaaagaaggcggactgtttttgacagataccggcggaaattattatgatggatccacagatatcacacgtacggtggcgatcggtgaggttgacgaaaaacagaaagaagactttacaatggtagcctgcagtatgctgcgtcttgctgacgcaaagtttcttgccggatgcagcggcatggttctggattatgcagccagagaaccattctggcgcagaaacttaaactataatcatggaaccggacatggcgtgggatatcttggaaatattcacgaggcgccgatcggattccgctggaaggcaacaagggatgccatgtgcgagattgagccgggaatggtgatcacaaacgagccgggaatttatatagaaggttcccatggaatccgcattgaaaatgagctgcttgtgcgtgcaggagaaaagaacgaatatggacagtttttgtattttgagccgcttacctttgttccgattgatctggatgcgctgcgtccggaattgatgacagaggaagaaaagcagctgcttaatgcatatcatcagagcgtatatgagaagatcagtccatatctggaagcagaagagaaagaatggctgaaggaatacacccgtcctgtaaaatagcagaatgaaaaacaaagaggaagaagaggaaatgaagtgtgagtgaaaatagtacaaacgaattattgatccgcatggaagaaaaatacaaaaaaatgagcaaaggccagaaacggcttgcggattatgtgacggaaaactatgataaggctgtatttctgacagcagctcgtctcggagaagtggtaggagtcagtgaatccacagttgtacgttttgccacacagcttggatacaaaggatatcccggtttccagaaagcactggaagaactggtgcgcaacaaattgaattccattcagaggatggaggttacctatgggcggatcagtcagtcggaaattctggaaacggtgcttcagtcagatattgaaaagataaaactgacattggccgggattgatcagaaagcatttgaacttgcgattgatacgattctcagtgctaaacgtatttatgtagtgggaatacgcagctgcgcaccgctggcctcctttttatgcttttatctgaatctggtatgtgaaaatgttactgctgtcaacaccaacagttccagtgagatttttgaacagctgatccggatcaacgaagaggatgtgatcattgggatcagtttcccgagatattctatgcgcacgctcaaagcgctggagtttgcgagcaaccggaaagcaaaggtgatcacactgacagacagtgtgcactcacctatgaatctgtattcttcctgtaatctgatcgccagaagtgacatggcttcgatcgtggattcgctggtggcccctttgagtgtgatcaatgcgctggtggtggctctctgtatgaaaaagcagaaagaagtagtcaatacactggaaacactggagcagatctggggcgaatatcaggtatacagtaaagatgaattgaatcaggtggatgatacgctgacagagtcttcttctggaaaaagcgaggagaataaagatgagtaaagtgctgataatcgggggcggcgcggccggaatgatggctgcagtcgctgccggagaaaacggtcatgatgtgtggctgtatgagaaaaatgaccgtctgggaagaaaattattcatcaccgggaagggacgctgcaatattacgaatgcaggggacatggaaaccctgtttgcttccgtgatgagcaatccaaagtttttatacagcagtttttacacctttacaaatgatcaggtgattgatttttttgaagagcttggtgtcagaacaaaaatagaacggggcaatcgtgtgtttccgttatctgaccattcttccgatgtgatcgcgggactgaagcgaaaactggagactctgggtgtccatatctgtctggaaacagaggtggaaaagatagaggaaagagacgggaagttccaggcaatcgtcttaaaaggcggacagcgaaagacaggagatgcctgtattgtcgcgacaggaggaatctcttacccggcgacaggatctaccggtgacggataccggttcgcaaaagaaaacggacatcagattacaaaactatatccggctctggttccgatggaagtcagggaatggtatgcaaaggaactgcaggggctctctcttcgcaatgtaagcgcagcggtctatgatggaaagaagaagctgtatgaagatttcggtgagatgctttttacccattacggagtcagcggaccactgatgctaagtgccagcagcgtgatcggaaagaggctttctgaaaaagaactgtgtctggtgatcgatctgaaacctgctttgacggcagaacagctggatgcccgtgtgcttcgcgaatttgaggagcataaaaacaaacagtttaaaaatgcggtggatcatttgttcccatccaaattaaaaccagttatgctggagctttccggtatttcggaagagaagaaagtcaatgagatttcaagagaagagagacagcgattcgtacatctgatcaaacattttgagatgactttaagcggacttcgcagctacaaagaggcgatcatcacaaaaggcggagtaaatgtcaaagagatcgatccgggaacgatggagtcaaaaaagatttccggactgtattttgtgggagaagttctggacctggatgcactgacaggcggatttaatctgcagattgcctggtctacggcatatcttgcgggaatttccattccttaacgaatagagcaggaaagaaaaggagaagcaatatgggatataatgtggcgattgacggaccggcaggagcagggaaaagtaccattgcgaagctggtcgcaaaagaaaaaggatatatttacgtagataccggagcgatgtaccgggcaatggcggtttattttctgcaggaggggatttccccgcaggatacagaaaaaatccgtcttgcggcacaaaatgcggatgtgagcatctgttatgaggacgggatccagcaggtttatttaaacggatccaatgtcacagacagactccgcgaggaagcagtcggaaatatggcttctgtcagttctgcagttcgggaggtacgtgcaaggcttctggacctgcagagaaacctggccaaagaagcggatgtgatcatggacggaagagatatcggaaccaatatcctcccaaatgcagatgtcaagatctatctgacggccagtgtaaaaacaagggcagaccgacggtacaaagaactgacagaaaaagggatttcctgcagctatgaggagattgctgaagatataaagaagcgggatgagcgtgacatgagccgtgaaactgcgcctttaaagcaggcagaggatgcgattttgatagacagttctgacatgagcatcgaggaagtagttcatgccatctgcagacagtgcaaataaatggcggaggcagaggatgaatgtaaaacgtgcaaagactgctggtttttgcttcggcgtaaaacgggcggtagaaacagtttatgaacaggcaaaaaattcggatgcagcaccaatctacacttacggaccgatcattcacaatgaagaagtcgtaaaagatctggaaaatcagggcgtgatcgtccttcgtacggagcaggagctggaacagcttacagagggaacggtcattatccgttctcacggagtggcaaaatatatctacgagaagctggagaaaaagaagatccagatcgtggatgcaacctgtccatttgtgaagaagatccatcgcattgtaagccgggaaagtgcagccggaaaacagatcgtcattatcgggaatccgaagcatccggaggtggaaggaatccgcggctgggcaggagaacaggtttttgtggtggaaacaaaagaagatgccgcttcccttgtactggattcggcaagagccgtatgtgttgtcgcccaaacgacatttaattacaataaatttcaagatttagttgaaattatttcgaaaaagagttatgatgtaagtgttttaaatacaatctgcggtgcgaccagggaacgccagacggaagccaggagcattgcggaagaggtggatgctatgatagtgattggtgacaaacatagttccaatacccagaagttatttgaaatatgcaagggagcatgtaaggatacgtactatatacagacacttgacgatttggatttgaatcaattagggtcagtggaaacagtaggtattacagcaggggcatccacgcccaataatataattgaggaggttcaaaataatgtcagaattatcttttgaacaaatgttagaagaatcatttaaaacaattcacaacggagaggtagtagagggaactgtaattgatgtgaaaccagatgagatcatcctgaatatcggatacaaagcagacggtatcatcacaaagagtgaatactccaacgatcagtctctggacctgacaacagttgtttctgttggtgattctatgactgtaaaagtattgaaagtcaatgatggagaaggtcaggtgttactgacatataagagactcgcagcagaaaaaggaaacgaaagactgcgcgaagcattcgagaacaaagaagttttaaaagcaacagtaactcagatccttggcggaggactgtgcgcaactgtagaaggtgcacgtgtatttattccggcaagcctcgtatcagattcttatgaaaaagatctgagcaaatacgaaggacaggagattgagtttgtgatcagcgaattcaacccaagaagaaaccgcgtgatcggtgacagaagacagcttcttgtagcagagagagcagaaaaacagaaagaactgtttgcaaaactgcaggttggagatacagtagaaggaactgttaagaacgtaacagatttcggtgcatttatcgaccttggcggagtagacggacttcttcacatttctgaaatgtcatggggaagagttgagaatccgaagaaggtattccaggttggagatcaggtaaaagttcttgtgaaagacatcaacgatacaaagatcgcactgagcttaaaattccctgagacaaatccatgggcacacgctgctgaagacttcgcagttggttctgaggttacaggaaaagttgcacgtatgacagattttggtgcattcgttgaactggcgcctggagtagatgcattactgcatgtttctcagatttcaagagcacatgtagaaaaaccatctgatgttctttctattggacaggaaatcactgcaaaagtggtagatctgaacgaagcagagaagaagatcagcctgagcatgaaagcacttgagccagacactgttgaagaaacagaagagtagaatgaaacacatagagaggtggagtttaatggcttcgcctctttttttgcgaagaactttttgctataataaaatctagtgcagcaaaagaaaggaaggaaaattagatgggacttttaacatttaaaggtggaatccacccaaaagacggaaaagcgcttgctaaagatcagccgatcaaagagctcttgcctctgggtgaactggtgtatccgctgtctcagcatatcggtgcgcctgcagttccattggtgaaaaaaggcgaccatgtcttaaaaggacagaagattgcggaagcaggcggatttgtatctgcgccggtttacgcatccgtggcaggaactgtaaaagcaatcgaaatgagatacaatccggcgggaagtaaggtaaattgtatcgtactggaaaacgatggtacatatgaggaagtggaatacaccccgattacttctctgaaagaactcacaaaagaagaaattatcgagagaatcagtgaagccggtgttgtgggaatgggtggtgcaggattcccgacaaaggtaaagctttctccaaaggaagccgataagattgagtacatcattgcgaacggtgcggaatgtgagccgtatattacagcagattaccgtcgtatgatggaatgtacaaaggagattgtcagcggaatggaagtggtgctgtctttattcccgaatgcagaaggaatttttgcagtggaggacaataaaaaagactgcgtagagaaattaaaagaggcgattgccggaaaatcccgtatgagcgtgaaagtactggagacgaaatatccgcagggtgcagagcgtcagttgatctatgccacgacaaagcgtgccattcatgcggcaatgttgccggcagatgcaggatgtatagtagataatgtggagactctgatcgcgatcaatcaggcggtacgttttggaaagcctctgatggagcgtgtagtcacagtcagtggtgatgatattcagaatccgggaaactttagagttccaatcggaatgaaccacagagaactggtggatgccgccggaggatttataacagaacctcagaaactgatttcaggaggtccgatgatgggatttgccatggtcacactggatgcgccggtgacaaagacatcttcttcgattctggcgtttcaaaaggatgaggcagcagaagcaaaagagactgcctgcatcaactgcggacgttgtgtggaagtatgtccgagcaggatcattccttccagactggcagatctttcagagcgtcacaacgaagaaggatttgtgaagatgaacggactggaatgtgtggaatgtggttcctgcagttttgtctgtccggcaaaaagaaatctaaaacaggcgatcggttctatgagaaagattgcactggcaaacaaaagaaagtaagaaagtgaggacaaaatcgtgagtgcaaacttcaatgtatctccttccccgcatataagggatcgagtgaagagcagcaatatcatgctttttgtagtgatcgcgctgcttcctgcgactttttttggcatttataatttcagacatgagaatgcgtggcttctggttctggtgactacagcttccgcagtactcgcagaatatatttatgagaaactgatgcacaaacctgtgacaattcaggatttcagtgcggttgtgacaggtctgttactggccttgaaccttccgcctacattgccgctctggatgggagcgcttggctctgtgtttgcgatcatcgttgtaaagcagctgttcggcggtcttggacagaattttatgaacccggcactgggagcgcgttgttttcttttaatctcgtttacagggaaaatgacatactttgtatatgatggagtgacaggaccgacaccgctggcaaatttaagagccggtgaggctgtgaatacgtttgatatgatgatgggaaatatccgcggaacaatcggagagacttctgtgatcgcgattatgatcggtgccatgttcttgatcctgatgggcgtgatcgatcttcggattccgggaacttatatcgtaacatttgtaatctttatcactctgttcggcggtcatggctttgatccgcagtacattaccgctcatctctgcggaggcggactgatgctgggagcatggtttatggcaaccgattatgtgacttctccgatcacaaagaccggacagattgtatacggagtctgtcttggacttctgaccggaatcttccgtttgttcggaggttctgcagagggtgtttcctatgcaattatcatcagtaaccttttggtaccgctgatcgaaaagatcactcttccaagaccatttggaaaaggaggggaacgctaatgaataagatgatcaaaaatacatgtatcctgacagtgatcacccttgtggcaggatgtcttctgggactggtctatgaggtgacaaaagcgccgatcgcaaaagcgaaagaagcggataaacaggcagcataccagaaagtgcttccggaggcggattccttcgaagcatatgcagattttgacgaacaatcagctgcttctatccttcaggatgcaggatatgatgcagatatcacagaagtagcgcaggcaatggataacaacggcagtgtgatcggatatgtgatctctgtaacttctcatgaggcatatgccggagatttgagcttatctgtcggaattttaaatgacggaactgtaaaaggtgtggagatgctctcgatcagtgagaccgcaggtcttggaatgaaagcagatgagagcgagtttaaagatcagttcaaagataaaaatgtagagaaatttacctatacgaaaaacggcgagaagggtgatgacaagattgacgccatcagtggtgcaacgatcacgaccaacgctgtgaccaatgcagtcgattccgcgctggtatattttcagaatactttccagaatgagttaggaggcatgatcaatgaatagatgtacagagagactttacaatggtctgatcaaagaaaatccaacctttgttctgatgctcggaatgtgtccgacgcttgcggtgacgacttctgcaatcaacggaatcggaatgggactttctacaaccgtagtactggtgctgtccaatatgctgatctccatgctgcgtaagatcattccggattccgtacgtatgcctgcatttatcgttgttgtggcatcttttgtaacgattgtacagtttttgctggaagggtttgttccaagtctgtatgattcactgggactttatattcctctgatcgtagtaaactgtatcattctgggaagagccgagagttatgcatccaaaaatccggtactgccgtctgtttttgacggaatcggaatgggacttggatttacagccggcctgacttccatcggaattgttagagagctgatcggttccggaaaaatctttaatttccaggtacttccggatacatatgagccgattacgatctttattctggcaccgggtgcattttttgttcttgcgggtctgacagcattgcagaacaagattaagaaccgtgcacagaaaaaaggaaaaccggtaaacaataatgacggatgtgccggaggatgcgcgtcctgtgcagggtgtggcagcgccggaacaaaagagtaggaggagcggacgatgaaagaattattattgatcgcagttggctcagcgcttgtaaacaacgttgtactgagccagttccttggaatctgtccattccttggagtatcaaaaaatgtaaaaacagcagccggtatgggaggagccgttgtctttgttatcacgatttcttcgtttgtaacggggctgatctaccagtttattttagtgccgctgcatttcgaatatctgcagacgattgtgtttatccttgttattgcggcactggtgcagtttgtagaaatgtttctgaaaaaagcaatgccgccgctgtatcaggcgctgggagtttacctgcctctgattacaaccaactgtgcggtactcggagttgcactgacaaatgtgcagaaatcttatagcattggtgcgggcgttgtcaacggagttgcaacagcagtcggattcctgattgcaatcgtactgatggctggaatccgtgaaaaaatcgagtacaatgatgttccggaatcctttcagggaactccgatcgtgctggtaacagccggattgatggcgattgcgtttttcggattctcgggattgatttaaggaggacataagagatgatatcaggaattttgatcgctgcggcgattgtcggaggaaccggactgtttatcggcgtctttcttggagtatccggcaaaaagtttgcagtagaagtagatgaaagagaagaagccattctggcagagcttccgggaaataactgtggtggctgtggatatgcaggctgttccggtcttgcagctgcgatcgtaaagggagaagccgaagttggcggatgtccggtcggaggcgcacctgtcgctgagaagatcggagcaatcatgggacagagcgcaggaagtcaggaacgaaaggttgcatttgtgaaatgtgccggaacctgcgagaatgcatcaaatgtatatgaatattacggaattaaagactgtacgatggcgaatctgatgcaggacggaggacaaaaaggatgttcttatggatgtcttggattcggaagctgtgtgaaggcctgtccgtttgatgccattcacgtggagaacgggattgcggttgtagacaaagaagcatgtaaagcatgtggaaaatgcatcgaagcctgtccgaaaaagctgattgagctgattccatataagcagaagacattcgtgcaatgcagctcccatgacaagggaaaggcattgatgagcgtctgtaaagtgggctgtatcggatgtaagctttgtgagagaagctgtgaagccggtgcgatcactgtgttgaacggtctggctcatattgatgcagacaaatgtacaaactgtggtgtgtgtgcagaaaaatgtccgagaaagattattattccgagacagactgcagaataggatttatcatgtaaaactccccgatcggggagtttttgttatattttaccacctgcaaaatcaagagatttcttgaatcttaatcacaatttttgtaatataatcggcttcatcagaaattacaaaatcgttcaaaccaacttcgtaagcgtagccagtaagttgtaaattatttttattggcataatccaacatctgttgatacagtgctggcaatttatcccatgtacccttttgataaccgcaaagatattttccttttggttttataagactatttggaacagacttcttgttcaaggcaatcgtatatatcccctcatatttatcaaagttcatcttatatacattatcaagcgaaataagacttcccattcccatgcgtatttgttcgattccccatatatctttcaagtgggaaaaaatttctgatatatcatcttttgagaaatcataaggatagactaaaagcctttctgatttgcattcttcaattctgatttcctgctcttgcaaagtttcacaaaaagcgattttcgctttcttcctttgcattacagttttaatatctttcagcttttgaatttgcttatcaatttctttttctttctcattcacaatttttaagaagttggcaggtgtaggattttttcgatatgcttcaatttcttcaatactcatatttaattctttcagcatacgaatatattcaaaatctatgctttgtgaaatatcataatagcgatatccattttcagccttggtaagcggacggaaaagaccgatttcatcataataatgtaatgtacgtttatttacttcgtgtagttttgcgaattgtgcggttgttagccttttaatttcttttctcattttcgtatatctccttattgacattacagttactgtatactttatcatacatgatataaatgatgaaaacaaggagaagaacaatgcaaatagaattaagagaatatcaaaaacaagattttaaagctttggaaactatcatcagagaaacttggcattatgatgattttagtacatcaaaaacggcggtcaaattagcaagagtatttctaagcagttgcttaacaaactatactttttcaagagtagcggtagttgacggaaatgtggcaggtattatactggcgaataatattaccaaacataaaagtcctctttcaaacaggctgttgcagataaaatcaatactatcattatacagttcaaaagaggggcgaaatgtttcaaaaatctttggtaacgtcaatggaatagataagcaattactaaacgaaaataacaagacttatccggcagaacttgccttatttgccgtaagttcttcgtgcagaggaaaagggattggaaaaatgctttttcaatcagcactcaattacatgaagcaggaaaagctgaaagaattttatttgtttacagacacaagttgtaattatggtttttatgaacaccaaggaatgaaaagacgtttagaaaagaaacacgtatttaacattaaaggacagcaggcagtaatgaatttctttatttatgattatcagctttcaaattgagttaagaactgaaaggagctttctcttatggaacaaaaaaggatcaaaatgaaacaactacacaaaaagtctgtgatatggtaaaatttatacaatatattgagaaaacaaaaaatgtcagagaggaatggtcgtatgaaaagatatgttgcattattaagaggaatcaatatcagtggcaaaaacaaaatagcgatgtctgaattaaaagcgggttttgcagaacttggatatacagcagtttctacatatcttaatagcggcaatgttgttttctgcgcggacattgatgacaaagagggactttcaaatgaaataagatccatgataaataaacgatttgggttggacattcccgtttttgttgtttcgcaggaagagttggaagacatattgaaaaatgctccagaatggtggggagacagcaacaaggagatctatgataatcttatttttatgtttccgaacatatcttatgacagtttttataatgaagttggaaatccaaaagaagagtacgaaaaaatctatcattataaaaatgtgattttctggtcttttagccgcaaagattatcaaaaaacaaattggtggtcaaaaactgccagttcaaagatcagtgacagaattacgatccggacggcaaatacagtaagaaaaattgttaaaatgtaatgaatggagcaaattgcatatgaatgctttaattgtatatggaagtaattataatgtagcagtttattgctcaatcaactatgttcccaaaagtaaaaaatcggaattttatgaggtgagttatgtaaaaagcaaaagcaattaatattttgggagaattttgtggcaagcgtgatatagaagaatttacacaaaatgtattagaaaaaaattggaatcaatcaggctgatgtaatggttttatttggaggaagcattatagctggtggtgatattcttgctgaagccattcagaacgaagtggcaaagaaaaatgttattgtcggaggtgctggacacacaacagagacattgagaaatgttgctggagcaacagattattttagggaatttaggttattctattttgtaacaaggaaagatagaaaggtgtggatgtttatatggcaaagaaattagacttaaacaaaccagtatttgaattggttcaggaatatcctgagcttgtagatgttttaaaggatttaggattttcagagattacaaagcctgcaatgcttaactctgtgggacgcatcacaacaattccaaagggagctaagatgagaaacatatccatgatgaaggttgtgccggcacttatgagtaatgggtttgaacttattgggaagatgccaaatatctttgcacttggaaagaataatgcaggagacgagaccagcagtgaagatggggcttttcaggaaaatacaagagaaaagataaagagctatttaaagcgacttggagaaggcgaagacttagagagtgtgcgcaaagacttcgtagagaatttttcagaggtagaggcatctgaaattatgaaagctgagcaggagctaattaaggaaggcacaccaatcacagaagtgcagaaattgtgcgatgttcacagtgccttatttcacggtgcaacaaaggaagaaaagattgcaaatgcagaaaaagcagtagaagagtcacttaagaaagaggagacatctaagaaactgatgccggatgcatacaatcagaagcatgctgcagcaaagactcttagagaaactgttggacatccgatgtatcgatgggctcttgaaaacgagaagatagccgcattgattcatgaaattcaaggagatattgagtctgggaatgatgtaggagagaagctatctgagcttcgacagatttctattcattatgcagaaaaaggagatcttgtctatccggtattaaaggtacgctatgagatctcaggaccttcggatgtgatgtggacagtggatgatgaaattcgtgatgagctagctgcacttgataaaatatcagattatgatgaagaatggatgaaccgacttcagacagttctcaaacgagcagatgagatgatctataaagaaaataatattttataccctatctgcgcagtgaatttcagcagggaagagtggtatggcatttacgaggatgctaaggactatgcacctgtatttggagtagaaatgatctgggatgaggcagaaaaatatagtgctgataaaaaagcaagaacagaggcggctctaagcgatggagaaatcatattaggtggtggtcatatgacagttccacagctggaagcacttctcaatacattgcctatcgagattacatttgtggatgataataatatcaatcgcttcttcaacgaaggaccaaaggtgttcaaacgccctcagatggcgattgacagggaagtattttcttgccatccacctaagatagaagcgatggtgcgagcaattttagatgattttagaaataataagcgtgacagagttccagtttggatggagaagaatggaaaaccattccttgtaacatatatggcagtaagagataagaaaggcaattatcttggaacggttgaagtagtacaggatatgcagtttgcaaaagagcattttgaacaataaggagggcaaggatatg

SEQ ID NO: 6999 - DNA, 17312 bp, Unknown
  gut microbiota DNA sequence
aaaacatgattatccagagacagagctgctgaaatggcttcagttcatcaatgcagagacagaggaggaatttgaaatggcagcagaaaaaagtgaatacattaagaaggcatacaggctgttgtggagctgcttcaggaaatggaactggaaaaagaagtgatatgtggaaaagttcaggaaaagtttcacatttcttcacaggaagcagcacaggaagtggaaaaatattggaagtagggtcaatgggcgactgggaatatccacataaaatgttccaggctttcatgtcaaaccagttcgcagattgcagggatactaagtgtggtctcacgtagcgcctagtatgcctgactcagtttgatatctttgataatctgtagaaacgtgcgtccgatttcgtaaatcatgtgagataattgagagtcctgcattgaacattttcaggcagtatggtattattttaaatagaaaacggtaaggaaagaggagagaaaacaagacagattctctcctttttccgtatatccgcgaaaagaggttaaatgcagatgatttttgatacacatgcacattatgatgacagacagtttgaagaagacagagaagaattgcttggttctatgcgggaaaatggcgtagagctgatcgtagatgcaggttctgatattgcgtcctgggacaagattgagcagctgacagacagatatccgttcatttacggtgcgatcggggtacatccggacgaagtgggtgaactggacgaggagaagatgaagcggatggaacaactgcttgccagggaaaagatggtcgctgtcggagagatcggactggattattactgggataaggagaaccgggatttacagaaaatgtggtttatccggcagctggaacttgcgagacaactggatttgccggtgatcattcacagccgggaagcagccgcagatacgatggagattatgaagcagtatgcaggagaattaagcggtgtgatccattgtttttcctattccccggagcaggcgaaagagtatgtaaagatgggattttatcttggaatcggtggtgtcgtaacctttaaaaatgcaaagaaattaaaagaagtggtgcaggagatccctttggagtcactggttcttgagacggacagcccgtatctggctcctgttccgaatcgtggaaaacgtaacagttccctgaatcttgtgtatgttgcagaagagatcgcaggattaaagggaatttcttacgaagaggttgtaagacagacaacagaaaatgcaaaaaaattatatcgtttcaaaaagtagagaaagaggtgtgcagatgaaagaaccaacacttggaaatccgcagaatacgatcgcggtgcttcagaagtataactttgtgtttcagaaaaaattcggacagaatttcctgatagatacgcatgtactggataagatcatcggatctgcagagattactaaggatgattttgtgctggagatcggaccgggaatcggaacgatgacacagtatctggcatgcgctgcgggaaaggtagcggcagtagagatagataaggcattgattccgattctggaggatactctggatggctatgacaatgtgcaggtcatcaatgaggatgtgttaaaagtggatattgctgagcttgcaaaacgggagaatgaaggaaagccgatcaaagttgtggcaaatcttccatattatattacgactccgatcatcatgggattgtttgaaaatcatgttccaatgaagagtattacagtcatggttcagaaagaagtagcagatcggatgcaggtaggaccgggaacgaaggattacggagcgctgtcacttgcggtccagtattacgcaaaaccatatattgtagccaatgtaccgccgaactgttttatgccgcgcccgaaggtcggttctgcagtcatccgtcttgacagatatgaagaaccaccggtgcaggtaaaagatgaaaaactgatgtttcggatcatccgggcttcgttcaatcagagaagaaaaacgcttgcgaatggcctgaagaattcaccggagctggattttacgaaggagcagatcgaagcggcgatcggacatctcggcagaggcgcgagtatccgtggagaagccctgactctggaagaatttgcagagcttgcgaactatttaagtgatcaaatcgtgtaatgatttctgtgcaggtccaaacagaataaacagcaatagttcataaatatttaatacacagttaattgtataggagcaaaatctttagtataataaagaaatataaaacaaatgacggaaggagaggctatatgcagagagacattgagaacatcatttttgaaaatacacccaagattcaggagctggcacatatttgtgagacgaatacagcgattgacaaagaactgtataccaagtatgaggtgaagagaggtcttcgtgatttaaatggaaaaggtgtacttgcaggtctgaccaacatttcagatattgtaaataccaaagtcgtagacggcaaagaagttccgtgtgaaggaagcctctactaccgtggatataatatcaaagagctgatcggcggatttttaaaagcagagcacccgggatttgaagagacaacatatctccttttgtttggagaacttccgacaaaggtgcagctggatgaatttcgtgccatgatcgcagagcgccggacacttccgccgaactttgtacgggatgtaatcatgaaagcgccgagcagtgatatgatgaacaacatttcccgctatatcctgagtatgtatacatacgatgacaaagcggatgatatttcgattccgaacgtacttcgtcagtgtctgaatctgatcagtcagttcccaatgtttatggtatatgcctaccatgcatataattacagaagaggtgaggatctttatatttatgcacctcatccggagctttccgcagcggagaatatcctgatgatgcttcgtgaagacagaaagtatacagcgcttgaggcagagatcctggatatggcacttgtgcttcatatggatcatggcggtggtaataactccacctttacgactcatgtagttacttcttccggtaccgatacgtattctacgattacagcagcgatggcttccctgaaaggaccgaagcatggcggtgcgaatgtaaaagtgacacagatgtttgaggatatgaaggcaacactgacagactggactgatgaagagcagatccgtcagtatctggaagcactgttggataagaaagcctttgataaaaaaggtctgatctacggaatgggacatgcggtttattccatttctgatcctcgtgcagatgtatttcgtgcgtttgtaaagcagcttgcacaggagaaaggctgcgaggcagagtatgcgctttatgagaaggtagagcatatggctccggaagtaatcgccgagaagcgcaagatttacaaaggtgtcagtgcgaatgtggacttttacagtggtctggtgtacagtatgctggatcttcctccgtcactgtatacaccgatctttgcggctgcacgtattgtaggatggagtgcacaccgtctggaagagctgaagaatgcggataagatcatccgtccggcatataagccgctggctcctcatcgggaatatataaaattagatgacaggtagagagaaagatgaaagatgaattttactttccatccaaagatggaaatacagagattcatacaattgaatggaaaccggaaggacaggtaaaggcagtcttgcagttgagtcacgggatggttgagtatgttgacagatattcggagtttgcagaatatctctgcgaaaaaggattttatgtagtcggcaacgatcatctgggacatggaaagtcagtacagagtaagtcagagtatggattttttaatgaaaaatatggaaatgcatgtgttcttggagatttacatacattgagacagcggacgatgaaaaaatacccggacgtgccttattttatgcttggacacagcatgggatcgtctctgctgagacaatatattcagatgtatggcaatggactcagtggagcgatcatcatggggaccatgtcagagcagaataagacggaactcaagcttggaaaagatctgtgcaggatactggcagttttaaaaggatggcattatcgaagcaagctggtagacaagatggtgaatggacctttctgtaaaaaattcaagccggcaaggacgagggcagactgggtgaccagtgatacggaaaagctggatcagtatgtttccgatccgctgtgttcgtttgtatttacagtaaatgcctactatcagatgttctgcggaattcagcagacgcagaagcgggaaagcatctatatgataccgaagacgctgccgatttttatggtgtccggttcggacgatccggtcggaggattcggcaaaggtgtcagaaagatctatgagaagtatcgggcggccggaatacaggatgtgactttgcggctgtatgccggagaccgacatgagattttgaatgaaacagaccgggagcaggtatatcaggatttatacgaatggatgcagagtaagatggaagtataatcagaatccgctgaaagtgtttcaacgttgcactttcagcggattttttatttaccggcatccatatagttatataatgtgaattttgagatgccgagtatagaagctaccttatctccggacttcgtgatcagaaaagcgccggcatcatttaaatactgaaccactttgattttttcgtcttttgtcatcagtgctgccggtttcccgatattggagatagcctgttcgatcagggtatccagaagctcggtgacattgtgtgtaatctgaggagtcgcactgcgggaagcggatggctcggcgggattctgtgtctggataaaggactgcaggaactgattcgctgcagccagtgcggtaatatcataattgatagaaaaaatataggcaagcgttccggattcgtccttaatgtaaaaggtcgaagacttcagcagacgtccgtcatttgtttttgtcagataagcgtactgatcctgcagtgtggacggatcggctttgatcgcttccagtacgacattggatgcactgtcaccggattttcggtcagtgacatgtccgttttcaatatataagattgtgttttcgattccatggcgtacatcgtggatcacgatttcgcaggaatcaccgaactgctgtgcaagtccgtgcgcaatttgttttaatagatctaaagagtatcccattgtttacatcctctcctgataaatgtgtaatcgtcttctatgatatcatgattcgttaacgctcattatatcataaaaagaaaacagaagctaaaagaaatttagacatctgaaaatatttcagaaatcaggttgaattcatgtgctgataagagtattctataaatatcaaatgaacagatagaaatgccggaaaaaggaggagtcctatgaaattattagtaaaaaatggtatgatcgcaacagagtcgcaggtatttcagggggatattctgatcgaagatgaaaaaataaagtccataggaacagttttggaagaggaggatgccgaggtgatcgatgccacaggcagatatgtgatcccggggggtgtggacgtacatacgcatatggatctgcagtcaggaaagtatcgtgcagtggatgatttttatgatggaacggtggcagcagcctgtggaggaacaacgacgatcgtggatcacatggcgttcggcccgaagggatgcagcctgtggcatcaggtggaagaatatcatcgtctggcagatgggaaatcagtcattgattatggatttcatggggtgatccagcatgtcaatgcatccatactgggggagatgaaagagattgccgaaaatgatggaattacaagttttaaggtatatacgacatatgatgacatgttgactgatgacgagatttttcaggtactcaaagaagcaaaaaaggacgggatagtgatcgcagtgcactgcgagaatgatggtgtgatcaattatcttaggaagacataccgcgagtcgggatgtacagagccaaagtatcatccgctcagcagaccggcgcgttgtgaggcggaggcagtggaccgtctgctgcatctggcagccatggcaggtgatgcaccgctgtatattgtacatttgtccagcaaagaagggctgatggaggttatgaaagcgcgggcatcccaccagaagaattttgcagtggagacctgtacgcaatatctgactctcacggatgagatgtatgaagatcccaaggaagggctgaaagcgatcatgtctccgccgcttcgcaaaaaagaggatcaggatgcattatggcaggcattaaaggatggcgtgatcgatgttgtggcaacagatcactgcccgtttcactttgggaaagaaaagcaggcaggagcgcaggattttacagcttgtccaaacggtgcaccgggagttgaagagcggatgcgcattctgttctctgagggtgtgatgaaaggcagaattacactgccgcagatggtgcattatctgtgtacgaatcctagccggatgtatggattatatccgcagaagggaactctgctgccgggttcagatgcggatctgattctcttaaatccggagaaagagcgcatactgacacatgcggatatgcacagtgcagtagattatacctgttatgaggggatggcagtgaaaggtgagattgaactggtcatgcagagagggcatgtgatcgtgaaagagaatcagttcttaggtaaaaaaggagacggaaaatatctgaaacggcataagagcgtattggcagaataaagaaaaggatggacagtgatggaatttacaattagaaatatgatggaacaggataaacaggaagtattggatatgatgcgggtattttacgcatctcccgcagtgcagagtaatggatcggatgagatttttgagaatgatatcagaacatgcataggagggagtccatatctggaaggatatgtgtttgaaaatgaagggcagcttttggggtatgccatggcagccaaaagcttttccacagagtttggaaagcagtgtgtctggatcgaagatctgtatatgaagccagaaagcagaggacttggtatcggaagtaagttttttgaatatatagaagaaaaatacgcagacgtggtagttcgcctggaagtggaagaagaaaatgaaagagcagttcatgtctataaaaaagcaggatatgaagtactgccatatatggagatgatccgtaaataaataatagagaagacctgaaagtggaagtgatatactccctttcgggtctttttttgagttgtttgttttgcactgaaatgatataattgaaatatgattttagtgcaaaatgctcaaaattagtttgggtaaaagatgtcgtaaaacaggaggtgcaaaaacattgaaatgcgatgaaaagttagtcagactggaagaaacctatggggattgggtgaaacaggaaaaagaaaactgcaggatgagctccggggagatgacgaaggaattgtatccgtatcaggccctgttttctccgattcaggtgaataagactatgatcaaaaaccgcgtggtaatgggaccgatggggaatctgaatatgtgtgaagagtcaggacgtcccaatgacaagatgcttcagtactttttcgcccgtgcaaaaggggggacagggcttttgacaacagggctgattccggtcagtcacggaatcgatccgacggtgacagaggtggatgatctgtcactgtttccgagaatcgatcatgccagaacagtgtttgcaggttggagagatcttgcacagggagtacatgcgtatggaagtaaaatctttattcagattacaccgggacttggaagagtaggaccaccgacttgtgtgatgacaaaacataagattccggtttctgcgtccgtgaatccgagcttttatattccgcagcttccatgtattccgctgacagatgccaatttgaaaaaaattgtaaaaaactgcgggcaggcggcagcagatgcaaaagagatgggattagacggtatctacctgcatgggcatgaaggatatctgctggaacagatgacgaatccggcatttaacagaagacagatgggacgctataaagattatgaaatgtttgggcttgatatcatccgtgagattcgaaagagggcgggagattccttcccgatcatgtatcggattgacctctcactggcactgaacgaaacatatcaggaacggatgaatgaagtcagcagtctgaagcggtttaaaaatggaagaacgattaaggataccctgcattatatggcgaaactggtccgtgccggagtggatctgtttgatgtggatctgggctgctatgacaactggtggctgccgcatccaccggagggaatgccggcgggatgtttccttgatatgtccaagatcgcaaaagaattcttccacagaaatcgtatcaaatcgaataccggagtggacgttccggttgttgcagtcggaaaactggggtatccggatatcgcagaaaaagcgatccgggatggtgactgcgacatggtgatgcttgccagaccactgcttgcagatccggactggtgcaacaaggcgtttgccggcaatgtggaggagatccggccgtgtatcggctgtcaggaaggctgcgttaatgagtttattctgggagggcatcctcagtgtgcagttaatccgcgaaccggattcgaggaacgttttccggaaacctttacaccggctgagaaaaagaaaaacattgctgttgtgggaggcgggccggcaggaattacatttgcattgatcgcggcaaaacgcggacacaacgtaaccttgtatgaaaaatcagagaagctgggcggcaagattgctgtaggaagtattccgaagatcaaatttgacctgcgcaactatctggcataccttgagaaacaggtggagctttgtcaggagcagtatcagcttcaggtacataaaaatacaacggtgactgcagaacttctaaaagaaaaagcatatgattcagttatttttgcgtatggaacaaaggaaatctttccgccgtttgaaggcagagaggaggcaaatctaatccttggaacagaccttctggaacatccggaaaaagcggaaggtgcaaataatatcgtgatcgtaggcggtggagtggtaggctgtgagactgcacactggctggcaaatgaatatggaaagaacgttacggttctggaaatgctgcctcattttatgatgggggtctgtacagcaaaccgaggacatttgcttcattatctggaaaaatcaggggtgcggctgtataactgtacaaaggtaaaagcgcttgcaaaagacggcgtttatgtggaacagaatcagtcccaaactgtgccggatccgtataatacctggcagccgctgcttcctccgaatattccgaacccgatggagaaagcaatcaaagaagaaatcgtggagaagaagattccggcagatctgatcgtgttggcaatggggggaaaagcggatgagacatttttctttgaagcgggagaagaacatctggcaaaagagatttataacattggagacagcagccgggcaggaagagttctggaggcagtacgcggtgcatatcatcttgcagtgcggatttagtggaaaggaagaaaaggtatgagcagagagacaaaaattatcgcattgaccggaaaagggggcgtgggaaagacttctatttccgcagctcttgtaaagcttctggttgaggaatttccggaggaaaagatccttgccattgatgcagatccggcaattggtctggctacagcactgggaattgagcccaaactgacgctggatgacattcgaaacgaaattgttgcgaatgtggaggatggaaatacaaaggaagcaatggaattgttgtctgagtccaggtataagatcgcagaggcaatcgtcgaaaaagaaggttttgcgtttcttgcaatcggacgtccggagtcagccggatgttattgccgcatcaattcatatttaaaagaagtgatcacgatgatctcagagcagtttgattatgtggtcattgacggagaggcaggcattgagcagatcaaccgccgtgtaatggagaaagtgacccatctgcttttgatctcggataccagcaaaaagggattggaagtcatcaagacaattgaaaatgttgcaatggagctggtgaaatatgaccgcatcggtctgatcgtgaaccgggtggaggacccggcgatgatcgaaagactggataccagaggtctggagcttttggcagcgatcccgtcagacaaaaaactggcattgtatgattttgaaggacgcagcattatggagcttccagaagaatcacctgtggtagtcaatgtgcgggatgcaatgcagaagttcggcattctgctgtaagtgtcaggagggctgttatgaaagatctaaaacatatgatctattttgaaaagttactggacagtgcctgtaacgatctggtccgggaagcgcagaaggagaaccgggtcgctgttgggtacacctgttttcatatcccggaagtgctgctgaatctggatcactgtttttctgtcagactacgggctccgtatatgggttctacagagattgcaacgtattatctggcaagcagtgcctgcgaattttccagagcattgctggaacgggcaatcgagggcggatttcagtttctggatgcgattgccggggttgatatctgtgaatgcatgaaccggtgttacgaaaatatggaactgctggagatccaggggaaagagaaaaagaatttctttatcagctatgtggatgtgccgggaaaagatgaagaaatcacggtggagcatgtggtagagcagctgcgaagaaaggtgctggaaccgctgcatgaacggtatggaacggatatatccgatgcggcgatgagaaaagctgtggagaagcacaatgagatctgcaggatcatttctgagatgggagaaatgcgaaaagcagaaaatccggtgatcacaggcgcagaatttcacaagattgttcttgcaacctatgtctgtccaaaagatctgatcctggataaattgtatgaaacactggaggaactcaaacacagggagccggataaaaaatcaaaattccgtgcaagagttgtgatcgtgggcggagagatcgatgatccggatatgatcgaactggtggaagacagcggtgcttatgttgccgcagaccggttctgttatggatcgatcccgggccgtcaggaaattgtattaaatgatacggaggatgtgctcactcagattgtgcggatcaatattgatcagacctcctgtccgaggtatgtcacgccaaataagatcaagtacagacaggatcaggcggcgaaactggtggaggaatatcatgcagacggtattatttatgagcagatgaaattctgttcctactggtcttttgagagaacactgcagagtcatgttcttgccgaagaatataagataccgaccttatcaattgaccggccgtatcaggcaaaatcaagcggacagcttcgaacccgggtacaggcatttgtggagagtctggaaatcaagaagatcaaagcgcgcagagaggaggccggaaaatgagacgaggaacaaaaatccagaagttgaaacaagcacttccgaggattgtaaaggatgtcaggcattatgcaaaaccaagggtaaagctgcataatgaagggcttggagattactatacggaagggtaccgttctctgaaccagagggagtggaaaggggtaagagatacagcgtatgattttgcctcctggctgaaggtatatggatatatggcagtgacacttggaaagcatccggtggctctgacgaaatcttttgtgcgttacccgtggatggcttcttatctgacggtggcgaatatgctggatcgccataagctggggctgcgcggaaaacagctccgttatacgcaggaacagttttacggagtggtacataactcggtagatgtgatcgccaagatcattgaacgagatgagaatctcaattcaccaaataataaacgggctgcaaaattacgtgcaaagacggtgatgtttgacgagatgaccccgtcgatcattatggcaggttttccgatgctggactggatcgatattgccatgtcaccggtctgcctgcctggagaggtggaccagaatgcaaatattatgtacgtagatgcagcagagcgtatggggcttgcagctgatgtgtgtcctcttccgtccgctgaagttggatgtgcgattgtggatgattatccgcaggtaggaagttcttttatcacaagttctatgccgtgtgacggatctctcggcgcggctctgtttatggatcgctatatgaaaaaactgccgagctttacgttgaccccgccgcagcggtttaatgaaccggagacgaatgcttatgcagtaaaagatctgaaaaactgtatccgttttattgaagaaacttaccatgtgaaatgggactgggatgcattctgggaaaaggcagaggaatataataagacaacgcagtgtatgctggataaatgggatgtaaactgtaccccatatccgcaggtgataggaagtgcgctgtccctgcagagggaatatgaattccagactgcggcctgtctagatccgtttatgacaaagcaggatgaaaaagtgacaaagatgatgctcaaaggatatgaaaaggaccgggaagcagacagaagagattataaataccgtgcgatcgtatggtgctgtccggcacattattatacacattttacgacctgggcagaacatacatggggaatccgtacactggtcgatatggaaagtatgttgagctatcatttctatcacatcggagataaagaacaagcacttacagatatggcaatggcatacgagcggatgatgatgcgttcgcacagcaatggcggatatgtcaatgcattggatgaatgttggaaaatgtgtgagaaatttaatgcgaatattgtgatcatgtacgatcatgtttcctgcaaaaactttggcggtcttcacggattgtttgaagatcaggcaagagagcggggtattcatctgatctgggtacagcatgacctgatggatccgagaactgtgtccagaaaagcaatgcgcgatgcagtgaacaaatatatgttaacggtattcagagaagaaccactggatccgacctatctggattacagtgatgaactgacctggtaaggagggaaaaagatgaaatatttcgggggatgtgatgtaggttcgacctatacgaaaacggtgattttggatgaaaacggggcaatcgttgcagcaaatacgatcaagagtaagatcaacagtgcgcagagcgccaaggcagggctggatcaggcgatcgcggatgccggtctgaaggagatttccgatctgacgtatctgatcggaaccggatacgggcgaaacaaagtaccgcaggcagatgaaaatatttccgagatcagctgtcatgcaatgggtgtgcatgtgacagatccgtcggtgcgggcgatcattgatatcggcggacaggatgtaaaaggaattgcggttgatacggacggaacggtgaaaacatttgcgatgaatgacaaatgtgcggccggtacagggcgtttctttgaatccatggcgaatgcgttcgagatgtctctggaagaattttcgaagctgagtcttacagcggaaaatgtgattccgatcacggcacagtgtacggtatttgcagagtctgaggttatcacactggtcggagaaggaaaaccgcagaatgaaattgcggcaggaattcagcaggcagttgcaaaacgctgttttgtaatggcgaaaaaagccggagcgaaagatgcgatcacactgacgggcggatgtgcgaaaaatcaaggattaaaagcagcgattgagaaggtgctccgtatgaaggtcatagaacttaagatcgatccacagctgatgggtgcgctcggagcggcagaatatgcgagacaaaagggattagacttataaggaaggggcgatccggatgaaaaaaacagtcagattttttgcaaaagtgtttcttgccgtgagtgcagtgacagcggttttgtttaccatctatatgaccaatgcagattccaagctgatcgaatttatttatgacaagctgcttcattatcatgagacgaaaaaagtagaggatcacatttagttatgcaggtatatgataaagttattgagaagacaagagaattactgaagccttttccggcaaaagagttgaacagaaatcatgcaaaatcatggaatttactgaaagagaatgaatttcttctccaaaaagaagtagcatttgaactgggaatccgttctcagccttctacctgctatcaggcagtgacctcttcaaaagaactgatttcggaagatcagatccttttatatggaccggatcttccggaaatcaaaaaaagtgtcccgtttaccaggatcacatggattcagatagatccgattgaagaccaggataaagcgtaccagcggatcaaaaagctggaatttgcaaaatttaagatcattccggaagggtatatgatgctgtcgtccagcatggatcaaaaagagcaggttcgagtgagtaaaaaagcagtcaaaaaaggattggattttgcaacggtcggcaatctgatgattcagagatataaggaagaatttcaggcaaagcatgtccagattctgtttatcacacgggagcttccggtgatggaccagctcatcgcacaggggaaaaaggtggatgagatcacaaatgcatttgaccatattttgaaaaatattattctggattgcgatctgtgtccgttgcatccgatctgcgatgatgtagaggaactgcggcagatacattttgccagaaagtaagagaatgtcccgtagaaatcaagtaacttctgcgggacataataaagcgtgtagtatagaggaaatacatcaaactctcagacattgtctgtgtgacaattcatgtgtctggaacatggtttctaaacagttcaaattcaaaggcagtttcgctgactcttcagttttgatgaaagaaaaatagttatctaaagaggaaataggtactattgaactaatttatatagtattataatgtgttaaaaagtccgaaaacagtttgaaatgtttacatatttacaaagttacatgtttacaatgtgcttaacgggtggtatattatagatataaataaggcactactgatagttggttagtccagatttaataagttacaaaaaagtaaccgcaatcctttggctgaggggcggttacttttttgattgattaatatatgcaatcagaatcgttacaataatactaagtatcattagtacgatggagagcatttcaaaatcgctcataagtcaagccctcctttcccagatttcctgcatgcaagatttctatgtaatcagagggttcagtccccctgttgaaggactaaccgcctaccattctcatgtagtgcctcgtcttattttatcaaacacattgtttgcatgacaagatattttgtcagaatccatatatgcaaataatttgaaatataagtggcagctatgaaaattatgttagtattatcaaatgcagaaggagattgtaataagccaatacaacttacagacaacaaagcaaaatcagaaatggaaaagttgcaaaacttataggaagatattatttaaagaataaaatcaacagatattcttttagaaaaatttgccccgaatttgtccaaaaagcattttggggagatgcaggaacagcgaaaacccgttaacctttcggctaacgggtttcgttgttttatagttatctaaaggaatgagagtaaagtgtgacatcttgggtcgccccaagatgccgttactttatgaggggggagatagttgtttatcaactatctgagtattagtatacggaataaatgtgtccaaagtatgttgaatctattaaagaaatagaaaaattcttatgaaattcttaaaacatgtcaggattttggaatccgtattgtattcccggcatagatcagatttggattttgaatgttgtttaatgcttgcaaagtggcaatagttgttccaaatcgctgggcaatttcactcagcgtatctccggatcgtatcacataagcggtatattgcggggcgggtggtttcggtttctgagacaaatgatttagtcctgcattttttataatagaaggataatcaacaaaaacatagtccagatcaacgtccccggatattccggcgatctctccctgacttgtgaattgccacatctggcagtctgtattatccagcttgctgttataaaaagcgtaccacagtgcatatcttgaagaaagtgacagaagacggtacgttttgaggaaattccggttgctgtaatacattgcaaaatatccgtttttttccattctgtcacaaaaattctgcacaattttccctacggtttccggtgtgaaagcaactccgttttgtgcggcatagtttacagatgcctgttcaatatcgtagcatacaggataatcgagacgataaccggagattgctttgagacagccatcagcttcctggcgtgcaatctccggagtcagggcatagcagaaccaatagactccgatcgggagaccaatccggttacattctgaggcattgcgtttaaattgtggatcaatcgtgttaaaaccatagccggcacggagcatggcaaactgatagcctgcggctttgaccttttcccaatctacatttccttgaaattcgctgacatccagtccttttatttgcattatataatcctttcataaaatataaaaacgggtttcttatgtttattatatgaaaaaatgaggaatatgtgcagagtagcagtgattgtttttcataaggattataacggcattgttacaaacagaaatgaaatcgaattaagaatttcataagtggagaaaatacgcgaacagcggaaa

SEQ ID NO: 7000 - DNA, 2971 bp, Unknown
  gut microbiota DNA sequence
attctggtgaaagatagattccagatgttaaatgatgctcatttcgagtatgtattggatagtatgaagagaaatacagggaaagttcagaatgtgaaaaattatttgttgaccagtttatataatgcaccgttgactatggagcattactatcgcttggcagtgaaccatgacttgtatggaggcggacaggcagggtaataaacgatcaaatttgtgacacgatgtcgtaaagtgaggtggacgatagaatgagttggaaaaatagattaatgaaaaaagaaaaaaacaagagaaataagcaatttggaataaaatgtaaagaaactaatcacctgattgaactgttggggatgctttgcttatttggcttaatgaatctttgggaagttgtatttccagaagatacgatatggaatcgtgcgataagcattttattaggtggaggtgggctttatttttttcaaaagcttattctgggttcatccaaaaatgaatgaaaggattgaagtgtagaaattaaaaaatttggagaaaggagtttagaggatggcatatcaggaaagcgagatggagtgggaagaattttgggaatggattcacaatctggaagacggaaaagtattggaggtaacatttgaagccgaatcatcatttggattttgtaaggattaaattaattaccgagaaaagattatacagtgaggaagaattgacgtcatcacagaaagtagttcaatttatttccaaagaattagcagaatgtgacagagaagtactttgtattttgaattgtaatgcaaaatgtcaggtgatcaacatgaacgttgtcagtatgggatcattaacagaaacactggtaacaggacgagaactttttaaaagtgcgattctttctaacgcaagaggggtgatcttaatccataatcatccgtcaggaaatttcacgccaagtaaggaggatttcctggttacaactaaaatgtgtatcggaggggatattttgggaattgatgtgtgggatcatattatcattgcaggaggaagtggaaaacgttattctatggcagaacagggaaaaatgcaggagttcaggaacagatggaaagaggctggggagtttgtggcagatccgctgtttcagccaccagcgaaggaacaacgttttgggaaacacttgtaaaagatatcgtagaaatggttttgtagaaatgcttgaatcgttgctgatgtttggctaaaatagttgtagtatgagagaaaattaggagaagtgctatgacatattatgtaactgggtattatcaaggaaaatcaattctgaaacgggaagaccatctcttttttctgaaatgtgaagaagccgaagcacctacagggacaatggtagaagttgatgcagcaaaaccagtatcagaactttcagagaaggaacaactggaaatttttcagatttatacgaggtaaagcggaatggagcgaatcaatggaaacaaagaaagatatggaaagacggagttcgagcggacgtaaggtaacctaaagtaatctggaatgcatcttgcagaggtgttatactaaaatcagagagtatggaaagagaaaaaaaggaatgaaagagattttgaaaaaatacaaacgacaagttcagattgctggtggtatttgtctgatcgcagtattgggaatcggcggatatgtagcagcgaatcaggatacagctgtgcagacacagacagagatgaaaaaggagacgaagtcctctgatcagaagatcacaaaaaatgatacaaaggatgcagcacttgaaaagaaaacagatacgaaaaaggagactgtaaaaaaggaagacacaaagtctgaaaaagtagtggaacaaaaggagacgacagcgaaaaagtcggaaagtgctgacaataagtccacagaaaaaacaaataaaaaagaagaggcaaaaacggagaaagagtcggagaaaacggattccaaaccatcggatcaaccagagtcgaaaccggaacaaaagccagaatcaaaaccagagcagaagccgagcaagccagaatcgaaaccagaaaaaccacagcacacgcatacctggcaagaaaagactcatacagtcaatcatccggaagtggggcataacgagcagtatgtggtgaaagaagcctggacagagacagtcacagaagatgtgtatgatccttgggattgttgcaatgtctgcggagcggactgtacagcggatccatcaggtcacatgaaacaacacgccttagcaggagaaggtggtggatggcatactgaatattacaaaacagtgacgagaacggtggaacatccggcagagtacggaacacgttatgtagtcgatactccagcttggacagaaactgtcagtgatggatttttctgtactggatgtggagcaaagaaatagtagagaggagtacatatggtagagaaagagcgaatgcagccattttggtatcaggggactctgactgatcccaacgaggagctgccgtttcccttagagcagttggaagcggagaacgcttggaatgatatgtgggatgccatgacagaagaggaacaggatgcttatatgaaagcggagtttggaacagaacaataaacagaagacaggaaataaaaaagaacattcgaaagagtgttctttttttgcacccattttgaagggagggagcaaaaatgagacgatatcggaaccgaatccggattgcggattcttcctaacaagggttgttgcaggaagaacaaaaagaaaaaaggagggaaacttgcatgaaaaaatggaaacggatactgtctgcaattctggcggttttgctgttgtcaggaagtatgcctgtatgggcggcagagacagtggatccagacgaacaggcaggagacatccaggaactcaaagaaaagctggaaggactgatccccgaagaagaacttg

SEQ ID NO: 7001 - DNA, 11716 bp, Unknown
  gut microbiota DNA sequence
aatttgttttttacatgttccgcaaatatcataagcgttacctccaaaatgtaatacatttaagtggcttcgccgcaaatttttctatatttgtcaaggattttttacaaaaaaagagcaggatatatatttttatataccttgctctgcaagaggctgccgactcaatgtcttaactaaatgacattgcctttctttctgcctctttttattttgccttcttctattttatcccagaacttctatttttctctgttaaacgtttgtaaaatctgatattctttacataagagagagtttatcaacttgattattttaagagtaaggggattattatgacacaaaaacaaccgataaatcagatcaccgagggtgtgatctggaaacaacttctattgttcttctttccgattttgctcggaaccttttttcaacaactgtacaacaccattgatactgtcattgtcggacaatttgtcggaaaagcagcacttgccagtgtgggcggttcctctgcacagatcgtggctctgattgtgggcttttttaccggtctgtcttcgggtgcttctgttttgatcgcccagtacttcggtgcgagaaatgaacatgctgccagtgacggacttcacaatgcctatgcaatctccatcgtgggaggaatcctgctcggaatcatcggatttttcgctacaccatctatgctccgactgatgaacacccccgatgagatcatgcaggactccgtgatctatctccggatttattttgcaggtattatttttgttttcctatataatatgggttccagtattctgcgcgccgtgggagattccaaacgtccgctttattatctgattgcctgctgcctgctgaacatcatacttgatgtattgtttgtagtcgctttccacatgggcgtgctgggagtcgccgttgcaaccttgatctcccaggcattcagcgccctgctcgtgacacgcaagcttcttcgttcggagggaatgttaaagctttccttctcccgcatccggttccacggatcggtcctgaaaaatcagttgaagcttggacttcctaccggattcgaagcaatcctgtttgccattaccaatatcgccattcaatccgcagtcaacacctttggaacagatacttctgccgcctggtctgcctacggaaaactggatgcgatcttctggatggtaagcactgcctttggaatctccatcactacttttgtgggtcagaactacggcgccggaaaactggaccggatccgcaagagtacccgtgtctgcctgatcatggacgcactgatatccgctgtattggttattttcctgatcgcagccagaaaaattttgttcagcctgtttacaaatgatgagaccgtcatccagatcggatgtgagatgcttgtcctgatcactccctggtacattgtatatgtattcatcgaagtacttgccggtgcactgcgcggagtcggtgatgtcatcgtgccggtgatcatcacgctgcttggtatctgcgtgatgcgaatcgcctggctgatcggcgtgctgaagatttctccgacaatttctgcgatcatcttcagctatccggtcacctggcttttgacagcactgttttttattgggtattatctgtataaacagaaaaagttttcctgatttttctacttcatccgaaaaatcggactgatcttcttatagattaaaaatacgatcaatgacaccagcacacctttcagaagattaaacggtgtcactgcaaacaggatcagtgttgagacacttgtaatctttgcattgatcgctgttcccatctctaccagagcattcagcggcattccaaatgctttggcatacaccggaagcaatacatatgcattcatcagtcctccgatcaccgtcatcaataccgtgcctgatgccataccgatcaacgcacctgttcttgtatgctttttatggtagatcaatcctgccggcacaataaatgcacatccgatcagaaagttggctacctctccaactcccgctgtctgagttccgctgataacaatatgcagcagatttttgatcagctcaattcccacacccgcaagcggtcccattgtaaaacatccaatcagaaccggtacttcactgaaatcaatcttgtaaaatgtgggtgcaaacggaagcggaatgtcgaatgtcatcaacaccactgcaactgcggaaagcattccgacaagcgccagtgttcttgcacctattttctgtgtactcttctctgctgtgtttgtttgtgtactcatgttttttctctccttcaaaatacatcaaaattttgataaagaaagaaaaccttccggattgtgtgccaagacaaaaacagaccccggatcaaaaaatccagggtctctctcttgcctttttgcacatacatcttctttcatccagactttactgttggtaccggaatttctgatctgcagatcaccggttcagccatcctccactcttagcagaaaacaggtcgcggactttaccgccagttgggacttacacccgaccccgaagatttatttcttatctgcaccccattatagtgctttctggcatgcaattcaagtaatttctgtaaatttgattattttctgttcgtactcacgtttttatcgtatatgatcgccagcccttttaacagaaggtcatcatccaatgtaatttcccgtttacaatgaggtactatttttttcgcaagtccaccggttgccactacagttgctttttctccgagagcttcttccatacgatcaataatgccatccattgccgatgcactactgtagatcacgccgctcttcatacagtctaccgtatttttcccgatgatctgtttcggtgcttccagactgatcccgctcaactgagatgcatttgcagtcagagaatccacggacacctgaattcccggatagatcatcccgccgatatagtctttgtttttatcgatcacacaaactgtattggccgtacccagatcaaaaataatcaacggtaccggatactgtgccacacctgcaacagctcccacaatcagatcgcttcccactgaagaagggttgtccatccggatattcagtccggtctttactccggctcccacgaccattacattttttttcaaaattttttccagcgccagtttcgctgcattggtcacctgtggtacaaccgaggaaataattcccccctcgatctgctccacatcaatatgataaatatccagaactgtcttaatgtcgatcgcatactcgatttctgttttctgatgaacggttgagagcctttctacaaacagacactccttgttctgaatacatccgatcactatatttgtatttccgatatcaatcgctaaaaccatgtgtaaatcccagtctttctttcatatttttcttcatcagcgttcttccgatcaatgccgtgagcactcctgcaacaatcgcctccggaactccgttgattccgatgatcgacagaataaatccataaaccgctttcaccgcaactccatttgccgccgcatacgtatccttaaaaaacagataaatcaaattcataaccaacaatgtatttgtcagtgaaccgcctactcccgccaaaatcagtccgattttggaaacacctgttgatttgctgcattttttcaccaatttgtaaatataatgcggaacgactcctgtcagaatacgcggaacaaaacagatgatcacgctgccgatccctccgctgaattctcccatactgtaaaatggggtaaatacaaaagaagtcacggtcggattcactgtattattaataaagctggtcagtccaaacagcagtcccagcagagctcccgtctttggtcccatcaaaagggatgccagaatcaccggaatatggataatcgttgctcttgtaaatcccagcgggatatatccgagaaaaggggtgaacgccatgattacaataataactccaaaaattgccgtctgtaccatatgccgtgtgcgcacactgctgcctgttgtctgtgttttgtttgttgtctgattcataaattgcctccttgttatcattctctttcgagatacaatactgattggcacagaatttttattctgtctccatattaatttgttgcttttaaaatttcgtccaggatccttaaggctgtctcctctttcgtcatttttccgagtgaaacttcctcctgcccggtaatgatcgtcaccacattggtatctccggcaaatcctgccccttctaccttcagattgtttgccacgatcatgtcaagatgcttcttttccagtttttttctggaattctccagcatattctccgtctccatggaaaaaccgcataaaaactgatgctcttttttatgctctcccagaaacttcaggatatcatctgtacgctccattggaatcgccagatcatcgtccttctttttcatcttttcactgctcactgattttggccggtaatctgccactgcagctgctttgatgataatgtcctgatctttggccctctttgtgacctcttcgtacatctcttttgctgttaccacgtccaccacgtgaacaaattccggttttgcaatggatgtcggaccacttaccagcgtcacctctgctccgcgcagcatacacatttttgcaatcgcatatcccatctttccggtggaatgattggtaataaatctgaccggatcgatcgattcctgtgtcggacctgccgtcaccagcacccgtttaccctgcatatctttttcatatgcgatttctcttaaaatgtactgtaacagcagctccggctcgggcatcttcccggctccggtatccccgcatgcgaggtatcccactgccggactgatcacctcatatccatagtgttccagaattttaagattgtcctgcaggatcggattatcgaacatgtttgtgttcattgccggtgcaatgatctttttacacttacatgccataactgtcgtcgtcagcatatcatctgcgatcccgtgcgcgatctttccgatcacattggcactggccggtgccactaaaaccacatccgcctgcttggcaagtgccacgtgctctacactgtactgaaaattccggtcaaacgtatccaccagacatttgttccctgtcaaagactcaaatgtgatcggattgataaaattaaccgcgtttttggtcatcagtacctgcacattggcatgcagctttttcagtgcactggcaagcgatgcgatcttgtacgcagcaatacttccggacaccgcaagtactactgttttgcctttcagcataaaaatcccccttttcctgttttgtagcatcccgagattcgggtatactcagtttctgttccattatatgggattattctgcaaattgcaattcttaaacgtcaactcccgcctttttaagaaattccacgcatggtcagctgaattcgtttcttcttcagatccacactcatcactttcacatcaacgatatctcccacactgacagcctccagcggatgcttgatatacttgtctgtaatctgggaaatgtgtaccagtccatcctgatgtaccccgatgtccacaaagactccaaaatcaatgacatttcgaacagttccttttaggatcatcccttctttcagatctttcatatccagcacatccgtacgaaggatcggttttggcatctcatctctcggatctcttgcaggtttttccagctcttttacaatatcacggagtgtgatttctccgatttccagctcttgagacagctttttgtaatctttaactgttttggacaaaccggacagattccctcctgccacatcctccagcgtaaatccctgtctctccagtagtttttctgtcgctccataagactccggatgaacccctgtggcatccagcggatttttcccgccctgaatgcgcatgaatccggcacattgttcaaatgctttcggccccagctttgcgaccttcaacagatctttacgatcctggaactttccgttttcctcccgatatgccacaatgtttttggcgattgcaccggaaatcccggaaatataggaaagcagaggcgctgatgcggtattcagatcaacacctaccttatttacacagtcttccacaactccgctcagtgattcacccagctttttctgattcatatcatgctgatactgtcccacgccgatggactgtggctcgatcttcaccagttccgcaagcggatcctgcagccttcttgcaatggatgccgcacttctctgtcccacatcaaacttcggaaattcttcgcttgccagtttgctggctgaatacacggatgctccagcctcattgacgatcacatactgcactttctccggaatctcttttaacagctccacaataaactgctcggactccctggatgctgttccgtttccaagcgaaatcaacgtaatatgatatttcggaatgatctttttcaataaatctttcgatgctttgatctttgcaggagtcgtcggggcagtcggataaatgacagtcgttcccaatacttttccggtcggatctaccacagcaagcttacatcctgtacggaatgccgggtcccatccaagtactacctggcctgtgatcggcggctgcatcaaaagctgatgcagatttttcccaaatacttcgattgctccattttctgctttttctgtcagatcactgcggatttctctttcaatcgccggaccgatcagacgcttatagctgtcttccaccgcttctttgagtgcctgctctgtatctagattctttccgtgaaatatctgtttttccagatagccaagaatctcttcctccggtgcctcaatcttcactgtcaggatcttttctttttctcccctgttcagcgcaagaatgcggtgtcctgccagctttgacaatggttcttcgaattcataatacatttcataaaccgactctgcttccggatcttttgccgtggagatcaattttccttttttcatggtgatctttcgaatccagcttctgtagtctgcctcatccgaaattgattctgcaatgatatcttttgctccggcaattgcatcttctgcgcagaccacacccttttcttccgatacatatttttcagcttcttctaaaagcggcattttcagcttctggaggataatcactgccgccaaaggctccaggcctttttcttttgcgatcgttgcccgtgttcttctcttcggacgatacggacgatacagatcttccaccacgacaagtgtccctgcttccaggatctgacttttcaattcctctgtcagtttttcctgttcttcaatgctggaaagtacctgctcttttttctcttccagatttctcaaatacacaagacgctcgtgcaatttccgcagctgttcatcattgagagatcctgttgcttcttttcgatatcttgaaataaacgggatcgtattcccttcatcaatcaattttacagctgcatctacttgccagcgctttacttccagttcttctgtcaatttttgattaatatccatgttgttttcctcacttttgttattattttttcccttgccctcatgaaaaatcgaataactggtgctattataacacaggtttctgttttgaaactacaaaaaagatttacgctccttcgattctttgctatcataaaaagaaaaaggaactgtacatattctatgaaccgaacgatcacatatttgatttccgacaaagatgccggatttaccattgagcaaaacttaagacaccgcggatattccgccaaaaacattacccatttaaaaaagacaccagaaagtgtcctgttaaatggtatatgggttcacatgacacaccacctgacatccggagatgaactggtgatccggattgtagaagagcaatcttcagaacgggttcctccggtagaacatcccatccatattgtctatgaggatgaagatattctcgtcatcgacaagcaggccgggatgccgatccacccctctttgaacaactactacaattctctggcaaatgcactcgcctggtattttgagcagcagaagaaaccctttatcttccgctgtgtgaaccggctggaccgtgatacttcaggactgaccatcattgccaaacatgtagtcagcgccgcgatcctgtcctccatgaatacaagacgggaaattcaccgggagtaccgtgccatcgtgcgcggacatctcactccggaatccggtgtcattaccgctccgcttggcagaaaagacagttccatcattgagcgaaccgtagattttgaccacggagaaaaagcagtcacctactatcagtttctggaagaaaaaaacggccacagccttgtctcactccggctgggaaccggacgcacccatcagatccggattcatatgaaatacatcggttttcctctggtcggagactatctgtacaaccctgatatggaatacatcacccgacaggctctgcactcctatcgtctgacgtttctccatcccatcaccgggcagaaaatggattttactgctcctcttcccgatgatatgaaaaagatcctgaactgactgcaggatctttctttatatctgttgttctgttatgcttcttctgtaaatgcaattaaaagctgatgtaaaatccggtgcagatgcggcagatattcctgcatcgtgaccggctgcttataaagaatacagttataacttgtagaaccgagcagctctataatcgtaaacaacaacaactccggctcttcacatttcacattaaatttgtttaatgcctccagataatgttcgtaaaatccctgtgcctccggaaactctgtgctggaaaacgcgtttttaaaaatgccccaggacaggttctttgcaataaattgcatcagcgaatgctgtttttcaaatcttccaataatgtaatctgtcaaaaacagaacctcttcctcaaagctgttgatttccttcttgtccagttctttatgtgcatcttcaaacagttttcctgcctgatatgcaatcagcctgtcccgcagatcgtacttgtccttgaaatataaatagaatgttccttttgcaagacctgccttatttacaatatcggatatggttgtctttgcaaaacctttatccgtaaacaattcatacgccgtctgaaacagtgcattcttctttcgtttcttattggtttctgcctttcccattttcattccccctggtatttcttgacttttgcagtatccctgcaactgtatccttaattatcaggcaaattttttagaaagtcaataaaaatgaccttttttcattttttgttcgcagattattgactattagtcattttgcactgcaatgtgaagtatagaaaaaagataggggatgatatcattggtcaaaactggcaaatggattgccaggcacagaattccaggcaaatgcttccggtaacacagaacttgcctctcagcttcaggcttccatcacagcactggtagcagcgcaagctcaggcaggaaatttgagcagctctctgcagcctcttgcctctgttacaaacgaaggcagtgtccaacttccaacactggataccaatgcactgacgcagacaataacacagatttccactgcttatgaaagcattgaatcctcttttgcaaaactatcaacaaagcttccggaaattcaaaaacaactggatcaactctctaacatcaaacttccggaaaacgcaatgtctcagttaaaagacaatgtggacaaaatcaatgctggtatgaaagttctggatcaaggactgaccaccgtatccaaaaacatgggacttctggacaaatccacagattctctctcaactgcagcagacggcattaacaccttactcggcggctttaaacaactgaacggctacaatcagacattactcgacggagcatccaaattgaaagcaaacagtccttctctcgttgccggtatcaatactctggcgggcggtacagacgaacttgcttccggactcaacacactcggctcccaattatgtagcggatcggaacactcgcagcaaacagtgctgcacttcgagacggtgcttccacactcctttccggaacaacagagctttccaaaggcggaaccatattgcaaaatggaagtaagcaggtaaagacggaatcacacaactccaggatggcgcccgcacattaaaagacggaatgcaggaatttaatgagcaaggtacccgtaaactgaaagatactgttgaaaaggaattaggcaatattctcgaccgattagaatccctgacctctgatcagtgcagctatgacaccttcagtggaaaggcaaaagatatggaaggaaatgtaaaattcgtcattgaaacagatgcgattaaataagatgaacaacacacattgataagagcatccctgtcaagatactggatcttcataactcaaaaaccttgacgggaatttattgttgcaaaataagttatccttactatataaaagatcatttcttataaacaaaaatatcgcaaaactgtttattacaacaattctacgatatcatcttctctcataaagtcagtaatgccggcgaccggaatcgaaccggtacgggagtataagtcccgcaggattttaagtcctgtgcgtctgccagttccgccacgccggcattactggctttatgaaaatgggacctacagggctcgaacctgtgaccctctgcttgtaaggcagatgctctcccagctgagctaagatcccagaatatacaatcttcttttctttaaaaacgacccagaagagactcgaactctcgacctccgccgtgacagggcggcgctctaaccaactgagccactgggccatattcattatttaagtggaccttcagggacttgaacccgggaccgatcggttatgagccgattgctctaaccagctgagctaaaggtccacactctataatgtcccgctaaaggaacaaagccgatgatcggactcgaaccgataacctgctgattacaaatcagctgctctgccaattgagccacatcggcataatgccttaacctatatcaaatcaaatcgacttgaaatgactccaacgggaatcgaacccgtgttaccgccgtgaaagggcgatgtcttaaccgcttgaccatggagcctcattacatcgcatttagtagcgactcaacataagaataatatcatatgtctttcatttttgcaagtatttttttactttttttcaaaagtatgggcttaagtggactcgaaccaccgacctcacgcttatcaggcgtgcgctctaaccggctgagctataagccctcataccagtcattaaaaaagagcctctcttgaagctcttagctccccgagttgggttcgaaccaacgacccttcggttaacagccgaatgctctaccactgagctatcgaggaatattaaacattgaagtataccttcaaaactgcatacaaagaatcatccatttcctatcaccttgcttggttatgccctcgacctattagtaacagtcagctccatgcgttaccgcacttccacctctgccc

SEQ ID NO: 7002 - DNA, 6763 bp, Unknown
  gut microbiota DNA sequence
ttttgtgcaatttttcaaatttgctcatttatagttactaggtaataatatagcatctcctaccactaatgcttctcccacatcaagcaaaggcaagaattctattgtacttttcaatgaatctggtagcagatttttaattacacctttatctctttcattagtcaatctcaaaaccacaaaattattgcattgacttaatatagttttactaacatctgctggtcgttggctaactgccaaaatcgataccccatactttcttccttcctttgctattcgctcaaaattatataatgcttgcttttgaaccgcatcagcatcctcctttataggtaaatacaaatgtgcttcgtcacaaacaagtgtaaacggtgttcgtttttgttcattcatccaaaactgaatatcatataataatctcgccaacgttcctgttacaacaggtagaacatcagatggaacttctgagaaatcaattatcttaatccctttttgaccactctgatagcctaacaagcgacaagccaaatttgccaaccaattatacatttgaatctcatccgttggttgaaacataaatccataagttttatctgcaatcttagtttccaatctagaaatgaatcgtgttaatttaccttcccattctcctttaatcggaccatttttccccataccttttctagtatcatcatcttttaacaactctaataaatctgtcattaaaaatggaatcggcgaatcaacagtaaatgttttcaatgtatctgtctttccttctctagtcaacgttgcttcttttaaactgcgaatgtgcaacgtaaatcgagatgcctgattcggagcatttgaatcacttctatctaaaatcattgataagagttcttctcggttaagtaaccaatatggcaagaacaaagcatcgtcgttcgacgtttccaaatccccaggacctgcaatcttaaaagattgtgcaattgcatctgtcccctccgttaaacttttatattctccatgcatatcaaacacaataatattagtatatttcaatttacttgctttttctaatatatttgccacacaccaactttttcccgatcctgtactccccaaaacagctgcatgtcgctgaaaaaacttgttgccatcaagtactgcttctgcacttgtatccatcataaaagaaccaattttcaatcgtttatctgtatcaatatctttccccaaaatattcataaaattttgaaggttctgacctataatctcataacatttactttcaatttgcggaaaagtttcaacacctcttttaaacaaatcatgtacagaaccgtatacagaataatatgtacctattacacttactttaatgtaatcagtggacgatgccatcatctcatcaatttcattatcttcgtccatataagtctccatatactttcgagtcactttgtcaatgagtgcaattaaattttcatgttgctttgatgtttctatcgccacgagatttcctacacaaatcttgttcatcagattactattttcaatttcaataataatctgctctgtatcaacatgtgttacatgtcctaacatatcattttccgaaaacactaacaaatttcccatcaaaatacctcctttatcatttcatgcaaatcccacaaatttattcctgacaaaatagtttcacctattgaattcaatatttttgtatcattactattggcatgacaaaccgcagtaattccagcacattctttaactatgttttccgcttttgttgacaatgaatgagtaagaatagttgctatatctctggaaagccttaatttataaggttttccagagatttttctttttattggctacaaattggctacatctgccatttggctactatctgggactgttgttccgttgatagcttagaaacagaaacacccaaggagataacaaatatgtttgatagcataggaaaattaacaagcaagatacagtttgaataaaatttccggatgccaagtggcacccggaagtgagagagatgtcctcaatcgtgctaagacgtttgtgatttgtaacgcatctgcaacaaatcttcggataaaccctgatttttccgctgttttcggttacctaaacgttaatcttagttctccaagagctaatctgacctacccaagagataatcggttctttttgctggaaaacggaagtgagattttgtataatatagaaaaatcagaaaggggtgcagaaatgaagaatggaaagatctgcattttgattgcagatgacgagaaggaaatccgggatattttgcggctgctgctgacgggggaaggctatgcagtttgtacagcggaaaatggaaaggaagcattagtgttggcttcggcggaggtagatctttaccttttggatgtgaatatgccggaactatccggttttatggcaggatcagaaatccgaaaacaatttaatgctcctattatttttctgacagcctattccggggaatcggacaaggttatgggcttttctgcgggggcagatgattatattgtcaagcccttttccaatatggagcttttgatgcgggtgaaagcgattttacgcaggagtgcccgtgggacggcaccagcgcaggaggaaaagaagagccatatcccttttggggatctaattttggacttggaatgccaatccgtgctgcgacaaggagaggtcattgtcttaacgtatacagaatttaaaatactggaattattggtcacccataaaaagaagatctattctctggaaaacatttaccaaagcatttgggaagaagatgcggtgggggatagtgctatcatggtgcatatcaaaaatatcagaaagaaactggaggatgattccagaaatccaagatatatcaaaactgcttggggacgggggtattatgttgatcagtgaaaaaagaagaaataccccaaaattgtccagaaagattatggggcttttatgtatcacggcggcaattgctttattcttctttggctttttatatttgacggcaaatgccattgcttcgacttatctccttgaaaatgatattttgctgacagaaggacagctgctgacgttgcagggggggatccgcagcctcagcctattgtcggcggtgcttttatttcttgccctgtttttgtttcttttggggcagaaaatggcttatctgagggagatcattcagggggtggaagccctgcgtacccatcggatggattttaccatgcccattgagggggacaatgaattgaaggaactggcagaaagcatcaatttcctttcggaaacggaacggcggctgcggcagctggaaacagagttgcaggcggaaaaggaacagttgatccgtgatctttcccacgatatccgtacccctctgacggcgatgttatcttattctgattatttggggcggaaagagacattggagcaggaggaagtgcaggaatacattgccctggtgcaacgaaaaggccagcagatcaaggcactgactgacagattattggatagcggcagcagagatttagaaaccattgaggatggcaagctgctgatggagcagcttgcgggagaatgggaagaaattctggagaatacgtttccctgtatcgtagatacaaaaaattgtcccgcattctatggatctttcgatattcaggagctgcggcggatctttgataatcttgcttctaatgtggaaaaatatgcggatcgggagcagcctgtggaattgcggatcgatgctgtggataaacgccttcgggtctgccaaaggaatggaatcaaaacgggcacggttccggtggagagcaatcaaatcggcttggaaagtatccggcggatcgccgctttgtatggcgggatggtgaaagtttccatagagcaaggaattttttctatccagatcacgctttctgaggttgatgggtcacatctttagaattctttagaattgcttggcaaatttctttagactgctatgctatgatgatctcagaaaagaaaaagaaagtgaggaatgtattatggcattaggtttattgttagttttatttatggtaatgagtatcattagtgtgatggggttggtgcttttgttccttttgaaaggagaaaaagggcagaaggctgtgttttactttatggcggtatggggcatggtcatcgcatggatgacggcgaatagctatcccaccaattatattaaggagcagttgatcgcctgggcgtttggtgcacttgctgtgattgcactgctgatacagatttgtggcaaaagcgaaagatctttcctgacagcaaaggtgttggtagcggcatctgttgtgctaggaatggtggctctgtttgtaatataatgtaaagaatgctccgtaggaaagagatttcctgcggagcattttcgttttgggttgacgctgaaatgatatgggggtatgatgaaaaattagagatgaaaaaagaagacgaagaaggagaataaaatggattcattacaaaagatatattgcagggcattcgctgtgcggtttatgacaaggtggtggcgaaccctaccattactaatattgaagaagccaggacactgtatctggaaagcggcacaaaggcgatcattgcctttggcggcggctctgccatggactgtgccaaggtgacaggggcttgtatcgtaaagcccaacaagcctatccataaaatgaagggattgctgcgcatctgcaagaaattacctctgctcatcgctgtactcactacagccggtacaggcagcgagacaacgttggcggcagtcatcacagacagcggcgcaaagcataaatatcccatcaacgatttttctttgattcccagatatgcggtattggattaccacgtgaccctaggtctgcccaaaaatatcacagccacaacgggcatggatgcactgacccatgcggtggagacgtatatcggtagaagcaccacaaaagagacgcgatttatggcagaacaggccaccagattgatttataaaaacctgaaaacggcttatgatgatggacagaatgtgaaagcaagagaaaatatgctgcaggctgcctattgtgctggcattgctttttcccgttcctatttggctatgtccatgccattgcccattctctggggggccaagtatggcgtgccccatgggcttgcaaatgcggtcatcctgccttatttcctagaggaatatggccctgcctgttatggaaagctggcaaaattggcaagatgcatcggtatggtaccaaaacataccaacgaccgcagagtggcagcggcttttatccagtggataaaggatatgaatcaatatatgaagatcccagaaccgattcaggaaatcagaaaagaagatatccctgccatggcaaaacacgtggcagccgagggcaatcccctctatcccgtgcctgttttgatggatgctggggagttggagatcatgtatgaaaaaattatagagaaaaaggagggaaaagcagatgcaggaaaagattcagaagcagagggagttctttcgagggggaaaacccattacattgtccttccgtaaagaagcacttaaacgtttgggccgtaccattcgtgcccatgaggaagaaatttatgaagccctgcggaaggatttgaataaatctaaaacggaagcttatatgtgtgagattggcatgacactggcggagttgtcctatatgctaaagcatatagatggctgggcaagaaaaagaaatgtgctgagccctattgcacagttttccagtgacagctttaccattagagagccttatggagtggtactcatcatgtctccctggaattatccttttatgctgaccatagaacccctgatcggcgcgattgcggcagggaactgctgtgtggtaaagccttctgcgtatgcccctgcaacctctgctgtcatctgcaaaatcctcagagaatgtttccctgaagaatatgtattggcggtagaaggaggcagagtggaaaatcaggcattgctggatcagagatttgattatatcttctttaccggcagtgtgaccgtgggcaaagaagtgatggcaaaggcagcaaagcatttgacccctgtgaccctagaattgggcggcaaaagcccttgtgttgtagaaaaatccgcaaagctgaatctgacggcgaagcgtattgcatttggtaaactgctgaactgtgggcagacctgcgttgctccggactatattctggtagagcgcagcgtaaaggatgaattttggggctatctgaaaaaatggatcgtgaagatgtacggcgaaaatgcgacggaaaatggcgattatgtaaaaataatcaaccagaagcatttcgacagagtatgtggtttgatcgaccagaagaaagtggtattcggcggaaaatggaacgaagagaccatgcagatccagcccaccattatggataatgtagtggctggtgatgccattatatttccttcgttatgaatactaacgtattttcccttctcgttggcaagttgtttttacgcttcctattattgcgaataatttcatcccatattttttgttcaaatgcttcttgattcaaagccgttaactctgcatcttcaatattatcaagcgtcaaatataaccttaaatagtgtctgctgattaagcagctatctgtaacttcc

SEQ ID NO: 7003 - DNA, 32528 bp, Unknown
  gut microbiota DNA sequence
atttatagggataatcaaaaatcagatataaagtttataaaaaaattgtgaatctgaattatctttcaccgcaatactccttttaacagcaaataattctctcccatattctacatcatattgactggaaaaatctactcaaaaaatcctgttccaaatggaattattactccacttccaacaggattttgattcaatcatttaaatatttcttactttttggatgattgtacgataatcttcatttttttcaaataaaatctgtttgcccagtacaaagccttctaccccttttttccagagacgctccagaatctcccaggtcacaccgccgtcgatcacaatatggaatttataccgctgacgcaatttcaaaagttgctcaattttaggttctacaaaatgaagatagtctcttcccgcaaatccgggatttacggtcatgaccagcacgtaatctactaacgacaacaattcctgaatactgtcaagtgaaattccgggattgatcacgatcccaggagcctttccaagtttacggattctgcagagtgtctctgttggaattgtttcagaatccggatggatataaataatatctgctccgaactctgcatatcgttctatataacgtccgggattatacatcatcatatgaacatccagcttcaaagaagtgtttttacgtattgtttcaatatcctgaaaactcatcccgaaattaggcacataatggccatccattacatctatatgtaaaatatccgctccactcacatcaagtctcataatctcatctttcagataatccatcgaaagattcaaaagcgacgggcataataatttttccataacgcctctctccctactgaataagtcctgcagcagttggtaatgtcatagaaatcgcaggaatacatgtggtcagcaacagtacgattaaaatcacaccaaaatagggcagtaattctttaaacacctgctcaatttttacatttccgaccttcgctcctgtaaacaagatagagccaaccggaggcgtaattgttccaatacaaaggttcagcgtgaccataataccaaactgtaccggatgcatcccgaacgtctgacaaattggcaggaaaatcggtgtaaaaatcaaaacagccggagtcggatccataaaggttcctacgatcaacaaaataatattcattaaaatcaaaatcacatatctgttttctgtaatagaaagcattccatttgcgatcagatccggcaaacctgtaaatgccataacccatgacataatagaggataatccaatcataaacgtaataatacccgtcatttttgcaggaattcgtcgttctgcaacatatccacatttctttgctttaacccctgcaaggaacatcacgagtaatccccacagaattcccggcacatatcctcccgtaaacaaggcagcaactgatacacttcctgcaattgtcgaataaacaatcatcagattggacggtggaatcagcattcccgtcggtgcagaagcaatatttacaccggcactgtaaaccggatcatatccttcctttttttccatcggtccgatcgtaccacccattgcagcagccgctgctgcaccggaacctgaaattgcaccaaataacatgtttgctactacattagactgcgccagtgcccccggcatacgtccggcaacaaccttggcaacattaacaattcgctctgcaattccaccgttattcataatatttcctgcaagaataaaaaacggaattgcaatcagtgaaaatgaattggctccggcaaacaatctctgcgcagatgtcgcaaatgaaatatttgcatcgagcatacacaacatagccagcgcggatgacaatcctaccgctacactgattgacacaccgatcgctagcataatcaccaaaagcacaaccataacaattgctgtttgatgtgtgactttatgaaatgagtattcaatgattcgggaaatgaagtgttcccagataaacaggtacaacaacattcctgttctcagtaactaaaattttgaaaagatagaagaaaataaaaaattgcttgagaaagtaagacaaaaatggtatattaataagtgtgttcccttagtaaaatggatattacggatccctcctaaggatcaagtgcaggttcgattcctgcagggaacgttttcaaaacgaggacagcagctttctttattcagccactgtcctcgttttatttttctatttctcttttcttcttacaaaaacaactacacctatcaccgcaatacaagcaacgcaaaaaatcacatacgattttgaatatttaaaaattcacatatccctgcagccagatctctcctttaaatcgtcttccaatctctggctctcccagaacctctttcttcggaacacaaacatcgaactccagttcattgacatctagtttcatctgataaagccgttctccggtcaatgtattctcccgctctctgatcgccagaatctctcccataattgaatacagatcacattccacaccataaggcataaagtaactgtccacaatggaatatacatcctctgtagccaatctacgagaaacttttgagtagatatccatatcttccagagtcaacgtttcaattgctccctgatctccattacgggcagcactcaaaagtttctttcgtgtttttgcttcctctcttgcgaaacgcatctgtgtctcgctttttcttacaggcagcaggattctcccggacagagcaagaccggaaaaagtgacaccgtttggagctcctgtcatcatacccagctgacgctctttcatatattctacgccattttgcattgtaaaaatcagactgatccccacttttgcatcttcacagattcctacgtactgttcgcgctcgattcgtttttcaatggaaacatctgcatatgttgtaacaccacttccctgaaaatacgggaaatagtattccatatcaaactggtcatgatcatccagttctccacacaatgtaatccccacatcctgaccgtattccttttgaaattcacagtagtctgcttcttcattataggaaacggtcatctgatgggtaaaggtttctcttgtctgctccaatatttcttttagctctgcttttttcttgatgggaccaaacccaattgctttcaaatactgatgcatattactccttattttttcggttcgatcactgcatttccacccatatatggacgtaacgcttccggaatcttcacagatccatctgcctgcagattgttctccaggaacgcgatcagcattcttggtggtgcaacaactgtattattcagtgtatgtgcaaaatattttccgtctgcaccttttacacggataccaagtcttctggcctgtgcatctcccagatttgagcagcttcctacttcaaagtatttctgctgtcttggagaccatgcctccacatccacagacttcactttcagatccgcaagatctccggaacagcattccagtgtgcgaaccggaatatccatagaacggaataaatccactgtgttcttccacaatttttcataccagtccatgctctcttccggtttacatacaacgatcatttcctgtttttcgaactggtgaatacgatatacaccacgttcctcaattccgtgtgcccctttttcttttctgaagcatggagaataacttgtcagtgtctgtggcagctgctcttccggaagaagtgtattgataaatttaccgatcatagagtgctcacttgttccgatcagatagagatcttctccttcaatcttatacatcattgcatccatttctgcaaagctcataacacctgtcacaacattgctgcggatcataaacggaggaatacagtaagtaaatcctctgttgatcatgaaatctcttgcataggaaataactgcagaatgcaatctcgcaatatctcccatcagataataaaatccgtttcctgccacttttcttgcactatccagatcgattccattgaatctttccataatttctgtgtgatatggaacttcaaaatcaggaacaaccggctcaccaaagcgctccagttccacattttcactgtcatcttttccaatcggaacagatggatcaatgatatttggaattgtcatcatgatttttttaattttttcttctacttctttttcttctgcagaaagtgcttccatcttatctgcactctctgttacttttcttttcagctcttctgcctcttcttttttgccctgagccatcattgcaccaatctgttttgatgttttgtttttctcagctctaagtgcttctacttcacctttaatttcacgatttttctgatccagttccaatacctcatctaccagtggtaacttagaatcctgaaatttgtttttaatattctgttttacaacttccggatttgatcttacaaatttgatatctaacataattttcctcctcatacagtgtatatcactgcttcattgcttttttcaaagactctctttcttcttctccgagttccatatagctttcgccttttacaatttcctttatataggtataacacccttctcggctgtgcatcgcattaaacacccagccattattattttcatctaacatcgtcagaacaaaactgagatttcctcccatttcctgaaatgcatcataacgtacaattcctattttctgataatgtgttttcattcttttgtaaattgtatcaatatctcttgtattctgttttactgcgcgttccagtttttctactgttttaaactgctccagaaatcctttttccagagatttaccatcttttccgcgcataaaaatctgatattttgcctgcatacgcttatgtttcatttgcagattgatcacaatcccaatgaaaaccacctgcatgatcaacaaaacaattaccagatacagtaatacttctgttgccattctcatgtctccttcttatatctgcgggacacctcttagctttgaatggacatgatcaagtcgaatattcgctccaattcttcctctgaataatattcgatttcaattttccccttaccattcgattttggatttacatttacctttgtccccatgattcccttcattttttcttccaggttttcatagataaatgtatgctcaattttttctttttttgcagtcttcttgggatttttcaatattttaatcagcttctcagtctccctcacactgagcttctcatcaaatattttatttgcaattgtgtactgttgttcttcgtcttccaatgcaagtaacgctctggcatgtccggttgagatcatatcatcaatcaccatctgctgaaccttactgttaagttttaaaagacgcattgagtttgtcactgccgttctgctcttcgatacacgttctgcaatctcatcctgttttagatgaaactctttcaataatcgcttgtatgcaattgcttcttcaattggattcagattttctctctgaatattttcaatcaaagaaatctccacaacttcctgctccgtatattcacgaaccagtaccggtacttcttttaatccggcaagctttgccgctctccatcttctttctcctgcaatgatttcataataatcatttttcttttgtaccaaaagtggctgaagtacgccaaactgtttgatagaatctgccagctcaagaagggcatcttcatcaaaatcttttctcggctgttcactatttggttctacctgagtaatctttactatagtctccccggatttttccacttttactttttctttttgagttttattagcctgtttttctgttgtcttcactgtcttgtttggaatcagactgtctaacccctttccaagtccatttcttttcactgccattttattcttctcctttattgatcacttcttcagccaataacaaataactttctgctcctgaagattttgggtcatataaatttattggcataccataacttggcgcctctgccagccggacatttcttggaataatcgttttgtagatgttttgatttaaattgtcttttacattttctacaacctggagtgagaggttcgttctggcatcatacattgtgaacacaacgccttctatttctaattttggatttaatctctcctgaacaagctctattgtgtggatcaactggcttaatccttccaatgcataatactcacactgaatcgggacaagtactgaatttgctgtggtcattgcattgatcgttagcatactcaatgccggtggacaatctatgataatataatcatatctgtccttcactttttcaacttcatttttaataatgtattctttattatcaacaccaatcaattcaatttctgctgccgacaaattaacattagacggaagtacatccaggttttcatagacttctttgcaaatacattcttcaatcccaatattcccaataattaaatcatatactgtattttcaacttcatctttatttacactcagtccacttgtcatatttccctgtggatccatatcaagtgccagaactttttgtccaagacttgcaagtgaagctgataaattgatagctgttgtagttttacctactccacctttttgatttgcaatcgctataattcttcccatattcgtactcctttcattgaacacgttcttattatatcaccttttactttcattatctatacaatgtttcacgtgaaacattgtgatttttatgaaatgttactgtttacactagatatttcgtattcaatactttctctctactttttaaaatgtttcacgtgaaacatttttgactataattcttataatcattttgtgattcagcatacatctaccgttccatttatttttgtgccaagtttgtccaaatatttgtttccggcacaatttcttcttcatttcccgcatagacctaattcagcttttcctctcctctattaaatttaaactatttctcattgtatcataaaaactacttttcagatagatttttcattaatccaaaatgtttcacgtgaaacattggctgtttactgtttgtctcacagaatttttcaaattttctttatttgacacctctcctgtagtataataagaaagtataaatggaattataaaggagggtatcattttgaactggaagaaaaatttgaaaacttgtacgatcctgacaggattaaccgttgcttctatgcatatcgttaatcgtttcgtttactatatgtctacaatagatgaaatgctgtctgacaaaaatgcagaatattatgactggcgttttggacgcatttgctaccacaaaacaggaagtggatctcctcttctcttgatccatggtctaaacgtctgcagttcttcctatgaatggaaccagattgtagatcaattatctaaaacaaatactgtatacacaattgatttattaggctgtggacgctcggacaaaccctatttgacctatacaaattatctttatgtccagttaatcactgattttattaaacatatcattggtgaaaaaactgatattatcgcaatgggggaatccggttcttttgtcttaatggcatgtgctaatgatcactcaattattgacaaagttcttttaattaatcctggtgatttgattgaactttcaaaaataccgacaaagcgtacaaagttaaaacagcattgtattaacatgcctgttgtaggaacatttctttacaatttacgctttaataaacgaaccatcgaaaaagatttacacttaaatggatactatgatttcaagaaaattgatacaaatacagtaaagaccttttttgaagctgcacatacagacaatactgccggaaaatatctgtattccagcatcaaatctcgctttacaaatgcaaatgtgatgtattctttaaatcgaattaacaacagcgtgtttattattgtagggaatgcaaatccagaatatgcactaattgcaaaccaatatcaaaattatatgccttctattgaaattcaagaaattgatcataccaaacgttttccacatctggaagaccctgaaacgtttttagaacaggttgaaattttatttgatatcaacaacggagaagagttatccacaaaataatgtggataactcttcttttttggtggataaactgtgaataacgtaaaaaaaggatgtaaacttttaaattgttgtacaattaaaatactttacatcctttttgtttacttcttgatttttaaagaataatttttttatttctctcttattttatgacagtggttcttttgctggaagtcctgcttttctcgggtatttttttcgtgtctcagaaatcttttttattttcacaaaagaacgtccaatctctgtatccggcagctgaaactttactgttttctcaatttttccaccaagaagagacactgctttttccgattgtttcaattcgtcttcaacagttcctgatttataggatacgaacatcccgcctactcgtatatatgggatgcagtattcactcaaggttgacagatttgccactgcacgggacacacacaggtcaaattgttctctgtatgctgtctgctttgcaaaatcttctgctcttccatgaagcgtttccacatcttcgagccctaatttttctactacggcatctaaaaaattaattctttttttcagagaatccaacaatacgactttcagatgaggaaaggcaatctttaacggcagtcccggaaatcccgcgccggttccgatgtcaatcacagaatttacctgattcatatccactgtttttacaattgcaaggctgtccacaaaatgtttctcatttacttcatcatactcggtgatccctgtcaggttcatcaccttattccactccaccagaagctcataatactgatgaaactgctctttctggcgttctgtcagccggatatccagctggcttaattgctgttcaaatttattttccatacactctcctgttctctcatctgctctccagatacaccagcagaaccgaaatatctgccggagataccccggatatccgggatgcctgcccgatggatgccggtcggatctgcgacaatttctgctttgcctctaatcgcagactctgtacctcttcataattaatatctgcaggaatccgctttttctccagttttttaaactgctctacctgctttttctgccgtttgatataaccttcatacttaatgttaatattcacctgctctgcaacgtcgtatttaagctctggacgcattttatccactgaggcaaggatttcatagctaagctccggacgacggatcagatcagccagagacgcgcctgaaacaagcggtgtacttccgcaggactccagaagctcctgtacttctttggtcgttcccacatgcacactttccacacgctcgatctctttttgaatctgctcttcttttttcagcaggttctgatagcgctcctcctcgatcagcccgacttcatatccgatctttgtcagtctgagatctgcattatcctgtcttaaaagcagacggtattctgctctggaagtcatcattcgatacggctcatgactctcttttgtgaccagatcatcaatcagaactccgatatatccctcggaacggtcaatgatgatcccttccttgccctgcagctttctcgccgcattaatacccgctacaagcccctgcgctgctgcctcctcatacccggagcttccgttaaactgcccgccgctgaacagcccttcgacatttttaaactccagtgtactctttaactgtctcgcatcaatacaatcatattcgatggcatacgcatttcttacaattttcgcatgttcaagccccggcacgctgcggtacatcgcatactgaacatcttccggaagagagcttgacatccctcccacatacatttcgttggtgtccagtccttccggctcaataaacacctggtgccggttcttatctgcaaattttaccaccttgtcctcgatcgacggacaatatctcggtcctgttccctcgatcattcctgaaaacaacggagaacggtccagattttctctgataatttcatgggtcttttcattcgtataagtcagccagcaggaaacctgatcgatctggatgtcctcagggtctgtcgtaaaggaaaacggtacgatccgctcgtctcctttctgctcttccattttgctgaaatcaatacttctcttgtcaatacgcgccggcgttcctgtcttaaaccgatacatttcgattccaagttctttcagactgtctgtcagataatttgccggctgcagtccgtttggcccggtctgcatgctgacgtctccgtaaatacatctcgcctttaaataggttccggtgcacaatacgaccgctctgcagcgatatgtggcaccggaataagttctgactcctgtaatgattttttttccgtcagccccatcctcagcaagaatctctgtcacttccatctgcttgatttccagattctcctgatcctcaagcacctttcgcatcgttttactgtaatttgccttgtccgcctgcgcacgcagagagtgcacagccggtccttttgaactgttcagcatcttagactggataaaagtccggtcgatcacctttcccatctcaccgcccaacgcgtccacttctttgacaaggtgtcctttggaactgcccccgatattcggattacacggcatcagcgcaatactgtccacacttactgtaaacatcagtgtctgaaatcccatcctcgcacacgcaagcgctgcttcacatccggcatgccctgctcctacgatcaccacatcatattcatctttattttcccatacagaatttgctgaatatttcattgaccaaatcttctcctatcgtttctcctgtaatacttccgagtgattcatatgcatccatcagatcgatggaataaaaatcctccggcatctcattttcaatactttcaatcactttatgcagactttctctcgcagactgaagtgctgctttctgtctgatatttgtaatgtatatttcatcattaaaggacagactgccctttaaaaacattttttccagtgtcttttccaactcctggattcccagttcttcctttgctgatatctcgatcatcggaatctctcgtcccagaagctgttctgccagcatctctttcgacacgacagtctccagatcagttttatttaacaggataatcgcctttttatcaagtaccagattcaggattttctggtcgttttcatccaatgaccgtgacgcatccaccacatagataaccagatcagcactctttgcatactcttttgctttttctacacccattttttcaatcacatcttccgtatcccggattcctgccgtatcaatgatattcaggctaagcccctgcagatggatctgttcttccaaaacgtctctggtcgtcccttcaatgtctgtcacaatggctctctctcttccggaaagcacattcaacaaagaggattttcctgcattcggttttccgacgatcacggtctggattccctcttttaaaatcctgccgtcatctgatgaccggatgagatcctccagttctcttaaaatcccttctgtcactgtctgcagcgtctctccatatccatccacactgatatgctccggatcatccagcgctgtttcaataaatgccgtgtgatacaagatctccttgcgcatctcttcaatttttcgctttacacttcctttgagctgactcatggagcttttcagcgcatactcattctgagatgtgattacatcgatcaccgcctctgcctgggaaagatccatctttccattcaaaaatgcgcgcttggtaaattctcccggttctgccggtctggccccgtttttgatcacagtttccagaacctttctcaccacaaatgttcctccatggcagttgatctccacggtatcttctcccgtaaaagttctcggtgctctcatcacactgaccagaacttcatctatcgtctcttccctatctttgataaatccatagtgtatcgtatggctctctgcctgagataactgttcttttcccttataaattctgtcaataattgcaaatgcttcctctccgctgatacgaacaattccaattcctgaattggtcatacctgtagaaatggcagcaatcgtatcctttttcatcttccacctcttggaaattctatttgtctgataaaaaaggacgttgttacgcttcacgaaagcctccgtgaagcgtaaaacgtcctctttcgcttcattttatactatctttttaatgtcacaactacttttctgtaaggctcttctccctcactgtgtgttgtcacatgcggatctgactgaagtgcagcatgaatgattcttctctcatatggattcattggctccagagaaactgctcttctcgttcttttcactttgaacgcaatgttctttgcaagatgtcttaacgtctcttctcttcttgctctgtagttttctgtatcaagtttaactctcacatatccgtcctgatgtttattggcaacacgatttgcaagatactgaagcgcatccagagtctgccctctttttccgatcagaattcccatattgctgcccttcatctcaacactgagagcaccttcagaatccacttcagaaacaatttccacatccatgtccattgcttttaaggtgtcattcaggaaagcttccacagctttgattgcttcatcagaaacttctgccagctctgtagctttctttcttgccggctcctcttctgctttttcttcctgcttttcctgtacaggctctgatacctgctcttttacaacacttggttttacttcttcaaccggtattgtctcttctttcacttctgccacaggttccggttttctgcgggcttcgatcactgcctgcttcattccgattccaagaaaacctgagctgcctttttcaatgacttcatattccagtctgtcactggtaactcccagctggatcaatgcctctgtgattgcatcatccactgtttttgctgatactctgatactaccgtccatcgtgaatccttcctttccccgactctctatttctcgctctcttccgttttatctttggcattctgtccactgttataacggcttaccatatttgcctttgatgcgagacttcccggcttggcatttttgatattctcttttgcctgctggatcttttcttctttttctttgctggaaacacttgtcttctgttctgttacatttcgagtgctctttgttgccatccggttgatttcttttgccggagcaccttttttctcacgtttcttcgccgcttttttgcgctgctcttcgatcatctcttctactgatttcttgctcagatatttattgatcgccatctgctgtacacatcttacgatcgcactgatcgcccagtacagaccaagacctgccggcagtgtaaatcccataaatacagagaacaacggcataatatagttcatagaattcatggatcttgccatcggattgtccggatcgatcgtcgttgtctgttgctgttgcatcagttttacactgataaactgtgtcagacctgccatgatcggaatgatcactgccagaatgattccaacaattgaaaaatccttcaaagcatccatcagcattgtcagcggctgctcaccaatgttaatgccaaggaatgtattcaaatgtcccatcgttgcagttgtcttatctacaactgtctcaagagacggcatcttgtccaccagggtattccatgtggagtcctggaatttatataacaccctcaccagaatattcgggtctgtataatcatatgcatttgcaggcatatacaccggagctgcatttccgatcttttccagaatcttctggtatccgtctgtcgccatgatctgattaacaaccggcatataaatctctttaataccatttacatatctcggtacttcctgaataacaggatacaatgcgaacaaaatcggaagctggatcaccatcggcagacatccgcctgtcggagaacttccgtatttttcgtagatcagctgctgctcttcctgcatcttgagcatggatgcctgatctctttttcctgcatattttttctgcagtttttgaatttccggcatcatcacagactgcatttttgaaaatttctgctgtttgatcgtcagcgggatcatcaatgtataaataataattgtaaacagaataatacatattccgatattctgaattccaaataaattcagaaaattatagattgcatccatgagcttaccaaacacccatgcaatctgtccgacaatcggccagtctgccgctgtcgcagcgattaaaccaaattccatcttttatcctccttaaggtaccggatcatatccgccttttgcaaatggattgcaccgcagaatcctccagacggtcagggcaagtcccttaactgcaccgtatttttcaattgcctcaatcccatactgggagcaggtcggcgtataaatacagtgatacgtcgtcttcaaaccggataaatacttctgataaaaccgtatcatccctatcaaaatcttcttcatctgcgtcacttcctttgaaatcatgcatatatattatgaagttttcccaggtggatgagcgcgctttctatatcatgataacttctctcttttgcgcctgctcttgcaatcactactaagtcaaatccacattggaaatgttcttcttgaagtcgatagctctctcgaataagccttgtaagatgatgtctcacaacgctgtttcctacttttttactgactgaaatccccaaacgatttttgtccatcccattttctctgatatacagtaccagatatcggttggcataggatttcccatttttatatacgacttgaaaatctttatttttctttaaagattcggaaaatttcatcgataacctctttttagcagctctttcccctggaaatactgcacttttttatagaagaaaaggccacatatatgcggcctaagctgataactgttttcttccttttgctcttctggcagctaaaacttttcttccgcctggtgtgctcattcttgctctgaatccgtgaacttttgctctggatcttttctttggctgaaatgtcattttcattggtacatacacctccttgtggttgatatacttattataaagtatttacaatatttgcctctttttttcgtatctctactatatatagtgtttatatagtactactgctgataaacagaaagacactgctcttaattatatgcaaaaaagcccataaagtcaagcattagcagcgaaaatactaaaatatagtttttcacatatttttttagaaatttttttattaccgctttttttcacacctgttccttttatttttttagttatccaaatcttttccacagaattatctacatttctgtttcttcgctcatttcttttcccatattctcaaacgccttatatttcctgagattttcacttttttgtttcatttacaaatttccctgattttcaccaaatttcgagtttccacattatctacatttttcttacccacagtaagaggatttatccacagttattcacattttgtggataactttatccaaatttgtggataaaccagcaaaacagtgtagaaaaccactggatattgtgtagatagcctgtagaaaaatttttatttctctttaagtttccctttttatcggcgttgatagtgtttaaaaagttttccacattatcaacaaagttttccacctatcaaattgtttcctgttatttttacattgcttctattttcattttgatgtagaatgtagttgagatactctgcttatctctcattttatattaattaggagtttaccattgatgaacattgtagaagaaaactgggagcagattttgaataagatgaaactagaatattgctcatccaatatttcgtacaatacgtggatcgcaccacttaccgtttacgaagtaaccgatgacaccgtctatattcttgtaaaattacgtgccagcctggagcacattgaagaaaaatacctgcttccttttaaagtatgtattgcagaagtcacaggatacgaatatgaagtctctttcgtgactgacgatcatgttgtcatccaggaaaaaaaagatacggcagtaaaaaaacagcagtcaaatgcgattttcgaacaggccaacctgaatccaaaatacacatttgatacttttgttgtaggaagcaataacaattttgctcatgctgcatcccttgctgttgcggattctccgggtgagatttacaatcctctcttcctctacggaggtgtaggacttggaaaaacccacctgatgcactccattgctcattttattctggaaaaggatccgacgaaaaaagtcctctatgtaaccagtgagacttttacgaatgaactaatcgatgctttgaaaataggtaaaaacggaaatgaacttgcgatgacgacattccgtgaaaaatacagaaataatgatgttctgctcattgacgatatccagtttatcatcggaaaagaaagtacacaggaagaatttttccatacattcaaccatcttcatgtttccggaaagcagatcatcatctccagtgataaacctccaaaagatatcgagactctggaggcacgtctgcgtacccggtttgaatggggactaatcgcggacatctcctctccggactatgagaccagaatggccattctccggaaaaaagaagaactggacggactggagcgataccacattccggatgaggtcatgcagtatattgccaataatattacatccaacatccgtgaactggaaggctctttgaacaaactcatcgcgcttgccaacctggagaacaagccgatcgatattcctctggctgcagaagccttaaaagatatgatttctccgaataatacacgggaaattacacctgagctcattatcgaggtcgtttctgaccactttaatgtacctgctgccgagttaaaaggtaaaaaacgaaacgctgagatcgttctgcctcgtcagattgttatgtatctctgccgtaaaatgactgataccccgttaaagaccatcggtctgattcttggcggcaaagatcatgcctccgtcagccatggtgtcaagaagattgaacatgatgtaaagacggatgaggctttgaacaataccgttaacatcattaagaaaaaactgaaccccatttaatttggagtttatacagaactattatgaatctaaacgtttattttctgagggttttttgaccctcagattctttccgtttaagtgtggataattctgtggaaatgctgtggattatagtgttaataaaataatttctcaaggaggcagtaaaagttatacaaacaccgtccccttgttttccatactgtttctacagacttatgaaagtggacaaccccttgatttataaggctttgaagcatttatcaacatatccacaccccctacggcggctaaggcggaaaacttttatatttctctttataagattcggctgctaaaagttttccactacaaatcatatttcacaaattcgaaaggagattatcaacagatgagaatcgtatgtacgaaatccaatcttgtaaaaggagtcagtattgtttctaaagctgttccttctaaaacaacaatgcctatcttagaatgtattttagttgacgcatcgacagatgttattaagttgacagcaaatgatatggaacttggaattgaaacccgaattgaaggtgatattttagaaagaggtatcatcgcattaaatgctaagattttttcggaaattgtaagaaagcttccggacagtgatgttgtaatcgaaacaacatctgacaatcagactctgatcacctgtgaaaaagcaaaattcaatattgcagcacagtccggagaagatttttcataccttcctgtaatagagaaagaagattacattactgtctcagaattcacattaaaagaagtgattcgtcagacaattttctccatcgcagataatgatacaaataagatgatgacgggtgaattgtttgaaattgaaggcaacatgctgaaagttgtctcactagatggtcacagaatctcaattcgtaagatagaattaaaagaaaattacgctcagaagaaggtcattgtccctggaaaaacgcttcaggaaatcagcaagatcattggtggagaggcggaagcactggttgatatttctttcacaaagaatcatatcgtatttgaatttgacaaaacagttgttgtatctcgtttgatcgaaggagaatattttaaaatcgatcagatgttatccagtgactatgaaacaaaagtcagaatccataaaaaagaacttctagactgtattgaccgtgccaccctgcttatcaaagagggagacaaaaaaccgatcattatcgatatcaaagacggaacgatggaattaaagatcaaatcccagatcggttctatggatgaaactatttttattaccaaagaaggaaaagacttgctcattggatttaacccgaaattcctgattgatgctcttcgtgtcattgacgatgaggaagtggatctgtattttatgaacgcgaaagctccgtgtttcatcaaagatgagaatcagagctatatttatctgatccttccggtaaattttaacgcagttgcgtagaaagtagagtgcatatggaaacaattaaattaagagaaacagatgagtttattaagcttggtcaggcattaaaggcagcaggactggtagaatcaggagtcgaagccaaggaagttattcaggatggaatggtcacggtaaacggagaggttgacacaagaagaggcagaaaattatatccgggagatactgcttcatttgacggacaggaaataaaaattgaaaaataacgaaaaaacgtgtaaaatagttacatattgatggagaaattatggttatcaaatctttaaagctcaaaaattacaggaattatgaattactggatatgacatttgattcaaagacaaatatcctgtatggagacaatgcccagggaaagaccaatatccttgaggcattgtatttgtcgggtacgacaaaatcccacagagggacaaaagacagagatttgatacagttcggcagagaggaatcacatctggagacgatcgtagagaaaaaggggatggaattccagattgatatgcatctcaaaaagaacagtccaaaaggaatcgcaatcaataaaattccaattcgaaaagcaagtgagttgtttggaattgtacattttgtctttttttctccggaggacctcaatattatcaaagacggacctgccggcagaagaagatttatcgatctggagttatctcagatcgacaaagtatatctgagcaatttatcaaattataatcgaatcatcaatcagagaaattctctgttaaaagagctttatcatcaggatcacttaatggatacgctggatatctgggatatgcagcttgctgagtatgggacaaaagtgatcgagagccgaaaacaatttatccggcaggtcaatcagatcattgccgacatacattacaggctgacaggcgggagagagcggattgaactgtcttatgagagcagtcttggaagtctttctctggagcaggctttgaaaaaaaaccgggagagagacattcggatgaaaagcacttctgtcggtccgcacagggatgatttgtgctttttatcaggtgatctggatattcgcaaattcggctcacaggggcagcagaggacagcagcactgtcgttaaaactgtctgagatcgaactggtgaaagaagtgatcaaagatacaccgattttattattagacgatgtattgtctgaactggacaagcacaggcaaaactatttgttagacagtattcatgatatacagaccgtgattacatgtactgggctggatgagtttgtgaatcatcgattttctataaataaaattttccgtgtaagcagcggaagtgtgacaaaagaaaactaggaggtttttaaatgggtgcaacaggtactgaatttgatgcagaatatggagcagaccagatccaaatattagagggactggaagcagtaagaaaaagaccgggaatgtatattggaagcacttctgcaagaggacttcatcatctggtatatgagattgtagacaatgcggtagatgaggcattggctggatattgtgatacgattaatgtgagtatcaatccggacaattctgtgacggtcgttgacaacggacgaggaatcccggttggattaaaccacaaggcagggattcctgcggtagaggttgtatttacgattcttcacgccggcggaaaattcggcggaggaggatacaaagtatccggaggtctgcacggagtaggtgcgtccgttgtaaacgcactctctgtatggcttgaagttgagatctacaacgaaggaaaaatttacaaacagcgatatgaacgcggaaagacgatgtattcgttaaaagtagtcggtgaatgtgatccggataaaaccggaacaaaagttacatttcttccggatggcgagatctttgaagagactgtatttgaatacgatgtattaaagcagagactgcgtgagatggcatttctcacaaaagggctgaagattattctgcaggatcttcgtgaagaagaaatcagagagcatacatttcattacgagggtggaatcaaagagtttgtcacttatctgaacaaaagcaagacacctttgtatgaccagatcatttattgtgaaggcgaaaaagacggagtagttgtcgagatggccatgcagcataacgactcctacagtgacaatacgtatggatttgtaaacaatattacaactccggaagggggaactcatattgagggattcagaaaggcattgacgaagacctttaatgagtatgccagaaagaataaactgctcaaggacaatgagccgaatctgtcaggtgatgacattcgtgaaggtctgacagcgattgtcagtgttaagatcggagagccgcagtttgagggtcagaccaagcagaagctcggaaacagtgaagcgcgtggagcagtggacaacattgtcagcactcagcttgagattttcctggagcagaatccgtctgtcgcaaaacagacagtagagaaatctctgatggcacaaagagcaagagaagcagcaagaaaggccagagatctgaccagaagaaaatcagctctggaggggatgtccctgcctggaaaactggcggattgttcagacaaaaatccggaaaactgtgagatctacatcgtcgagggagattcagcgggtggttctgcaaagacagcgagacagcgtgcgacacaggcgatccttccactgagaggaaaaatcctgaatgtagaaaaagcaaggctggataagatttacgccaatgcggagatcaaggctatgatcacggcgtttggaacaggaattcatgaggattttgatatttccaagctgcggtatcataagattattatcatgactgatgccgatgtggatggtgcgcatatcagcaccctgcttctgacatttttatatcgttttatgccggatctgatcagagaaggctatgtgtatctggcacagccgccgctgtataagctggaaaaaaataaaaaagtctggtatgcatacagtgatgaggaattaaatgagattcttacagaagtaggacgtgacagcaataataagattcagcgttataaaggtcttggtgaaatggatgcggatcagctctgggagacaacaatggatccggagcatcgtgtacttttgagggtgactatggatgacgagacatcttccgaactggatctgacatttactacactgatgggagacaaggtagaaccaagacgagagttcattgaagaaaatgccagatttgttaaaaatctggatatatagaattgcaatacacttaaaaaacaaggagaaggaacatggaagataatatttttgataaagtccatgaagttgacctgaaaaagacaatggagacttcctatatcgactatgcgatgagcgttatcgcatcccgtgccctgccggatgtcagagacggattaaagccggtacagagaagaatcctgtattcaatgatcgagctgaataatggacctgacaaaccgcatcgtaaatgtgcgcgtattgttggtgatacaatgggtaaatatcatcctcatggcgacagctctatttatggagcactggtaaatctggcacaggaatggtctacgagatatcctctggttgatggacacgggaactttgggtctgtagacggtgatggcgctgctgccatgcgatatacagaggcacgtctgagcaagatttccatggagatgactgctgacatcaataaaaataccgtagattttgcaccgaactttgacgagacagagaaagaaccgacagttcttccggccagattcccgaatcttctggtaaacggaacatccggtattgcagtcggaatggcaacgaacattccgccgcataacctgcgtgaaatcattggcgcggtcgtgaagatcattgacgaccagatcgatgaaaacggagagacaagtattgatgatattttaaagatcgtcaaaggaccggattttccaaccggagcagagattctcggaacaagaggaattgaagaagcataccgcacaggacgcggtaagatccgtgtgcgtgcgattaccaatattgaaccaatggcaaacggtaagaacaggattatcgtaacggagctgccatacatggtaaataaagcccgactgatcgagaagatcgcagagttggtacgtgataaaaaggtagatgggatcaccgatttaagcgatcagtccagccgtgagggaatgcgcatctgtatcgaattgagaagagatgtcaatccgaatgtaattttaaaccagctttataaacatacacagctgcaggataccttcggtgtgatcatgctggctttagtcaacaatgagccaaaagtcatgaatatcctggatatgctgaagcattatctgaagcaccaggaagaggttgtgacgagaagaacacagtatgagctgaacagagcagaagagcgtgctcatattttacagggattactgattgcactggataacattgatgaggtaatccggattatccgcggatctaagaatgttcagactgccaaggaagaattgatgtccagatttgatctgacagaagtacaggcgagcgcaattgtagatatgcgtctgcgtgcactgacaggtctggagcgtgagaagctggaagcagagtacgaagaactgatgaagaagatcggggaattaaaagcgattcttgcggacagaaaactgcttcttggtgtgatcaaaaaggagattcttgtcatttccgaaaaatatggagatgagagaagaacatccatcggatttgatgagtttgatatttccatggaagatctgatcccaagagaaaatgtggtgatcaccatgacaaaaatgggatacattaagagaatgtccatggatacattcaagagtcagaaccgaggcggaaaaggaatcaaaggaatgcagatcctggatgatgactatatcaaggaactgtttattacgacaacacatcactatatcatgttctttacaaatacaggacgtgtgtaccgtctgaaaggctatgagattccggaagcaagcagaactgcgcgcggtactgcaatcatcaatctgctgcagctgatgccggatgagaagatcacagcaatgattccaatccgggagtacgaggatggacagtatctgttgatggcaacagaaaaaggtcttgtgaaaaagactccgattaaagattatgcaaatgtcagaaagaccggactggctgcgatcgttctcagagaagatgataaactgatcgaagtgaagattacagatgatgaacaggatgtgatcctggttacaaaatacggtatgtgtatccggtttagtgagaaggatgtgcgtccgacaggccgtgtttctatgggagtgcgtggcatgaaccttggagatcatgatgaagtaatcggaatgcagatcagcgatcaaggaaaatatctgctcattgcatctgaaaaaggtatgggcaaactgacagatatggatgaatttacaagacagaaccgtggaggaaaaggtgtaaaatgctataagatcacggaaaaaacaggcgatgtggttggtatgaaggcggtcgatgaagacagcgagatcatgatgatcaatacggaaggaatcgtgatccgtatgaagtgttccgacatttctgtatacggacgaatcacatccggtgtaaaactgatcaatctgcctgagaatgaaaaagttgcaagtatcgcaaaagtaagaaaagcatctgcagagatcgatggagaagaaatcgaaatttctgaggatgaggaagagacagacgttccaatagaagaataaagagaaagagccttcgcatgatatgcggaggtttttttaaaacaaataatcagataaaatataaaaaaataaagaatataaagaaaatatagataaaaacagtaaattatagtataataaagaaaaaagaaccatacaacaaaataaagtgcacacaaaggaaaccagaaaaccaatgattaaaatgaaatcagggagaggagcgtgagattatgaaaaaggcaaagagttggctggcactacctttagcagtttgtatgtttgcagttatgattttttcagttgcagaggcggcggaaacaagtgatgaaaatccggctgagggaagacaagagattacgatcatcaatacaaatcatataacctggccggtcatcggagaaatgccgtcatatgaattagaggttcctgccggtgcacactattttatcaatatggttgaatggacgacgaagaacggagaaaacacgttactgtcaacagataaatttgaggaaggtgagtatgagcttcatgtaacatatgaagcaaaagaaggatatcaattcgcagcgccggagctgattactgtgctttctggaaatgaagtacagggaacaccaaaggtcgaagaatcagagaatggatggtatcggattataacattctcattcacggcaagacagtcagaaaagcatcagcacgatatgttggtggttcaggaaaaactaccgacatgtacagaagccggatataaagcctgctatcagtgtcagtcctgcaaaaagctgtatctcgacaaggcgggaacagaggagacaacggtagaagagattacgcttcctccgacgggacatcagtatcaggatggaatctgtactgtttgcggcgagatcgatccggattatgtaaaaccacatgagcacagcatgacagcagtacaggagaaaaaaccaacatgtacagaagccggaaataaagcatactaccggtgtgagacttgcggaaaattatatctggataaagatggaaagaacgaaacaacactggagaaggtgacgattgcagtaacaggacacatatatcgtgatggaagatgtgtagtatgtaaagccctggttccagcagtcaagactggtgattttgataacgactatgcaaaatgggtgattggactgctgatctcactcaacattattgtaggagcgatcatttatcgaaaatcaagaaaaataggataactggattgtatcaccccctttccgaaagagagccggaacctcaaaagagagcatccggctctctttttttgtttcaattttgaaggaactatactataatactggatagtgaaaacagaaacctgatgattgtaaaaaattctaggaggcattatgattcgtacaattgatgtgagagaaatctcaaaaaatatcaaagaaatgtgtattgaagcaaaccactatctgtcaaaagatatggacacagcaatgaaacaggcggagcaggacgaaaaatcaccgcttggaaaacagatattgggacagctgcaggaaaatttaaaaattgcggctgatgatatgattccaatctgtcaggataccggaatggcagttatatttctggaaatcgggcaggatgtgcatctggagggtggccttctggaagaggcagtcaatgaaggggtcagacaggggtacacagaaggttttttaagaaaatctgtggtaaaagatccattaatccgtgaaaatacaaaagataatacaccggcagtgcttcataccaaaatcgttgcaggagataaggtgaagataaaagtagcaccaaaaggatttggaagcgaaaatatgagccgtgtatttatgttgaagccggcagaaggtattgagggagtaaaacatgcgattctgacggcagtcagggacgccggtccgaatgcctgtcctccgatggtagttggagtaggaatcgggggaacctttgaaaaatgtgcgctgatggcaaaagaagctctgacaagagaagtgggggtacattctgacattccatatgtaaaagacatggaagaggagatgcttgtgaaaatcaacagccttggaatcggacccggagggcttggaggaacaactactgcgcttgcagttaatatcaatacatatccgacacatattgcagggcttccggtaggaatcaatatctgctgtcatgtaaacagacatgtcgttcgtgaactttaaaagaaaaacagaaaggaaagcattatgggaagacatttgcaggctccgatttcaaaagaagaattaaaaactctgaaatcaggagattatgtatatattacaggaactatttatacagcgcgggatgctgcgcataaaagaatgtatgaaacactgcagaatcaggaaaatcttccgattgatatccaggatcagattatctattatatgggaccgtctccggcaagggaaggacgtcctatcggttctgcaggtccgacaacggccagccgcatggataaatatacaccacagcttctggatcttgggatgggtgcgatgatcggaaaaggaaaaagaacacaggatgtgattgatgctgtaatcagaaatggtgcagtctattttgcggcagtaggaggcgcaggagcgttgctgtcaaaatgtatcacaaaatcagaagttgttgcatatgatgatctggggacagaagcaattcgaaagcttcaggtagaaaactttccggtaatcgttgtcatagacagtgagggcaataatttatatgaaagtgcaatcaaagagtattgcacctataaaaatgagtaatttcaggagcagaaaaaatgaaacgtattttattaatggtgtttcggaatatcttactggttccgtacatgtggatcaaattgtgtcacagagcggcacacccggaaaactatacactggaagaacatgttaagtttttaaagtggattgtttttcgtgccaacaaaggcggaaatgtaaaaatagaagaacatggtgcagaaaatcttccaaaagagaacggatttatgttttttccgaaccatcagggaatgtatgatgtgctggctatattagacgcatgtccatatccgttttctgtagtagccaaaaaagaagtaaaggatgttccgtttttaaagcaggtcttttcctgtatgcatgcatatatgatagaccgggaagatatcaggcagtctatgcaggtgatcattgatgtatcaaaggaagttcaaaatggaaagaactatctgatttttgccgagggaacccgttctaaaaatggaaatcagatcggctccttcaaaggcggaagctttaaagctgcaaccaaagcaaaatgtccgattgttccggttgcattgattgattcttttaaaccattcgatacgaaaacaatcagtcaggttacggtacaggtacactttttagaaccgctgtattatgaagaatacaaaaatatgaaaactacggagattgcagagatcgtacatgaccgtatccagaaaataattgatgaaaattgtccggaaagggctgaaatacaatgacattaacacagttaaaatatgcgatcactgttgcacatgccagatctatgaatgaagcggcgagaagactgtttatttcccagccgagcttatcctcagcaatcaaagaactggagacagaaatcgggattgatctgtttcgaagaaccaacagaggcgtgtctgttacgccggagggcgaggaatttatcgggtatgccaggcaggttgtggagcagtaccagctgatcgaatccaaatacgtggaaaaagaaaatcaaaaaaagaaattcagcgtatcaatgcagcactatacatttgcagtaaatgcctttgtagagatggtgagacagttcggcatggaagaatacgagtttgctgttcatgaaacaaaaacatatgacgtgattcaggacgttaagaatttcaaaagtgagatcgggattctgtatgtcaatgagtttaaccggaaagtactgacaaaattattccatgagtgtaatcttgaatttcatgaacttcttaagtgcagtatttatgtgtatatgtggaaaggacatccctgggcaaatcggaaagaaattgaactggaagagctaaatgaatacccttgtctgtcttttgaacaagggacgtacaattccttttattttgcagaagaagtgctgagtacatttgaatataagcagttgatcaaggtagatgatcgggcgacgattctgaattttatggtaggattgaatggatataccttatgttccggtatcatctgcgaggaacttaacggggaagagtattgtgcagtaaagctgaaatcagatgaagtgatgaccattggatacttggtcagaagcggagttgcaatcagtccactcgggaaaaaatatctggaagaaatatcaaaatataaagacaaaacgttggatatcaattaaaatatcacagccagtaatagaaaaaaactattactggctgtatttttttagaattaacacatttccaactaaaatgatatagttaaatacatcccaaacagaataagggaaaacgaataaaaaatggaaggaaaaagcaatggcggaaattaaaattgaaaatgtgtccaaaacatattcttccaaagaaggaactgttcaggcgttaaaaaatgtaagcctgacaataagatcaggagaaatttacggaattatcggaatgtcaggagcaggaaaaagtacattggtacgatgtatgaactttctggagcagcctacatccggaaatgtattgataaaaggacgtgcattgggcgggctgaaagagaaagaactgagaaagcaaagagaacagattggaatgatctttcagcattttaatcttctgatgcagaaatcagtactggaaaatgtgtgttttccgatgtatatccagggcaaaaagaaaaaggaagcaagagaaaaagcggaagaacttctggaaatcgtaggattgaaggaaaaagcaaatgcatttccttctcaattatcaggtggtcaaaaacagagagttgcaattgcaagagcacttgcaacatcgcctaaaatcttgttatgtgatgaagctacaagcgctttggatccacagacaacagcatcgattctggaattgttacaggaaatcaaccggaaatttaatattacgatcgtgatcattacccatcagatgtctgtggtcagaaaaatctgttctcatgtagcgatcatgaaatcaggagaaattgtggagacaggaagtgtgtccgagatattcagtcatccaaaatcagatgtggcaagagaattaatccgaaaagatgaaggagatgatatcagcagagcagaatcttccggcaatacaaaagatctgattcagagcggcagaaaagtacgaattgtattttcagaaaattcggcgttccagccagtgatcgctaatatgatcttaaagttccgggaaccggtcaacattctgcgggcagacacaagaaatatcggaggtgttgcaaaaggcgaaatgattctggagtttgcaggagacagcagacaggcagaggaaatgcagaactatttaaaaacatgtggcattgaactggaggaggtgacggatgatgtggagtgaagacgtgatcttaatgattttaaatggaataaaagaaactttatatatgacactggcatctacgattctgggatatgtctttggtctcccaatgggaatctgcctggcagtatcagataaagacggtttgaaaccgaatgcagtgttatataagatattagatcttatttcaaacattgtgagaagcatcccgtttctgattcttttaatccttgtgataccgctcacgagattgctcgtggggcaaagctacggatcatcagcaaccattgttccactggtggtggcagcagtgccgtttattgcaagaatggtggaatcttcggctaaagaagtggatgagggagtgattgaggctgcaaaagcaatgggagcaggaaatttcacgattatcaccagggttcttctcgtagaagcaagaacatctctgatcacaggagcgacaattgcaataggaacgatcctcggatactcagctatggcaggaactgtaggcggcggtggactgggagatatcgccatccgttatggatattatcgatatcagtctgaaatcatgatcgtgacagttgttctgcttgtgatactggttcagattttccagtcggcgggaatgaaagctgcatctgtactggataaaagaaaatagaaaaacagcaaaaacaaaagggaaaaggagagagaatatgaaaaaggtaacagcaattatattaacagggatcttaacattaggagtactgacaggatgccaaagtaattcaaaagcagaggagaaaggcagcagtgaagatgcaaagacgattaaagtagcagcatctgcaactccacacgctgaaatattggaacaggcaaaatcgattctgaaaaaagaaggatatcagctggaagtgacagtgtttgatgactatgtgcagccaaatgaagttgtagagagcggagaatttgatgcaaactatttccagcatgtgccatatctggaaagtttcaacgaggaaaaaggaactcatctggtagatgcaggagatatccattatgagccatttggaatttatccaggaacaaaaaagagtctggatgaaatttccgaaggtgataaaatcgcagtgccaaatgatacgacaaatgaagccagagcattgcttctcttacaggacaatggaattatcacattaaaagacggggcaggactcaatgcaacagtaaatgatattgaagaaaatccatataatgtagaaattgtagaactggaagctgcacaggtagcaagagtgaccggagaaactgcatatgtagtactaaatggaaactatgcgctggaagcaggatattctgtagccaaagatgcgcttgcatatgaaaaatcagattctgaggctgcaaaaacatatgtaaacattattgcagtaaaagagggaaatgaaaaagaggaaaagatacaggctcttgtaaaggcattgaaatcagatgagattaaagaatatatcgaaaaaacctatgacggagctgtgattccttttgaataagcacgacaattgcacatgaaaatggaacactaagggcggacataacaacaaatcaaagaaaaataaaaaagtttgaatttagacattgacattgtgacaacagtctagtataatcacatatgcactgttggtgcacaactgaataaatgctgtaagatattacagaaattcaggcgaggagaaatactcaagaggctgaagaggcgcccctgctaagggtgtaggtcgggaaaccggcgcgagggttcaaatccctctttctccgtttagtgcctatgcactaaaatgtattatcaaaatggatttaaaaagattcaaaaaagtgttgacaaacgaagatacacgtgataatatattaaagctgattcgaaacaagcgaaagtttgaaaagaatcacaaaaaaataaaacaaaaaagttcttgacaaacagaaaacaacatgataaaatatcagagttgcttctggagaaaagaaacaacaaagaaccttgataattaaacaatagacaacaaccttgaaaatt

SEQ ID NO: 7004 - DNA, 19336 bp, Unknown
  gut microbiota DNA sequence
gggcagaggtggaagtgcggtaacgcatggagctgactgttactaataggtcgagggcataaccaagcaaggtgataggaaatggatgattctttgtatgcagttttgaaggtacaatatatcttcaatatggcccagtggctcagttggttagagcgccgccctgtcacggcggaggtcgagagttcgagtctcttctgggtcgtttaagatggggtcttagctcagctgggagagcatctgccttacaagcagagggtcacaggttcgagccctgtaggccccacttattaaataaggatggattcccgagtggccaaagggggcagactgtaaatctgttggcaacgccttcgaaggttcgaatccttctccatccatttgagtaccgtaaggactcagttaagttgccgatgtggctcaattggcagagcagctgatttgtaatcagcaggttatcggttcgagtccgatcatcggctttctcttatgagaagaatttaatatcgcggggtggagcagtctggaagctcgtcgggctcataacccgaaggtcgtaggttcaaatcctgcccccgcaatttagacttttaagtcttatgcccagatagctcagttggtagagcagaggactgaaaatcctcgtgtcgctggttcgattccggctctgggcattttcgttgccaagagtaatgaaataattgaatacgggcgtgtagctcagttggtagagcacttgacttttaatcaagttgtccggggttcgaatccccgcacgctcattgtagaacaagcgattttgcttgttctttttgttatattaacttatattttgattacacctatgctatgcaaaagattcagcacagacataatatgtgaaaaagtctgaaatatgttggaatatttatttgaatcggaaatagatgtggataacatctaatttacaacacaggtatacagaagatataataaaagcgaaagtgatacggatagaaataaattggaaggataagcatttgcagaaaaatttatggaatacttatatgaaaaattagaagcatatgggaagtcggattattatgggtttcatatgcctgggcataaacgtaattcggatgttacacgagcgaatttaccatatggaattgatattacagagattgaaggatttgataatcttcatcatgcggaggagatcatcagggaagcggaagtcagggcagcgtccatgtatcatgcagaggagacgcactatttgattaatgggagtactgcgggtattttaagtgcggtaatgggatgtactaaaaaaggcggaaagattttaatggcaagaaactgtcataagtcggtctatcatgctgtttttttaaatgaattgcgtccggtatatatttatccggaatttgatgagacaatggaactgaatatggctgtgtctcctgagaaaattgagaggttattagaggaacataaggaggttcaggctgtggtattgacatcaccgacatatgacggggtgttgtcggatattgagaggatttctgaaattgtacatcagaaaaaaattccgttgattgtggatgaggcacacggagcacactttggatttcacccttattttccggagaatgcaaatacaaagggagcagatgttgtaatacacagtctgcataaaacacttccggcattgacgcagacagcactgattcacttgaatgggacacggatcgatcgaaggaagattcggaattatctgcatatttttcagacaagcagtccttcttatgtgttgatggcaagtatggatgaatgtctgaggacggtggcagagcagggggatgtgttgtttgagacttatgtgaagaatctggaaagcaaaaggggagagttgaaaaaattaaagcatatcagattgatggagacagaagaattcgacagatccaaactggtgctgtctgtaaaagatacgattcttaagaaagagaatcgagtgtttacagggaaaatgttatatgagagattgcttttagaatatcatctgcagatggaaatggctgcaggatcttatgtgattgccatgacttcgattggagatacaaaagaaggaatggatcggctgctcagtgctttgtttgagattgatgaggaattggaaaaaaagtcagaggaagagaaaaggtattatctgccccgtcaggaacaggtcttcacgagctttgaggtagaaggaatgcgaagaatggaaacagtaaggagcatgagctggcaggagtcagcggggtttatttccatggaatatgcgtatttgtatccgccgggaattccgctgatcgttccgggggaacggatcactaaggaaacagcagcgatgttagtagattatcagaacaaagggttttctgtggaaggaattagtgtggaaaactatatcgaggtgttgataaatgagtaaaattttttatattatggggaaaagttcttccggaaaagatacgatttataagaaaataagagaaaaactgccgcagttaaagcgtattactccttatacgacccgaccaatcagggaaggggagaccgatggtgtggaatatttttttgtggacgaagaaaggctgaacgagcttaaggagaaggaacgtgtcatagaagtacgttcttataatacaaagtgtggaatatggacatattttacagcagatgacgggcagattgatctccagaagtatgattatcttgtgatagggactctggaatcttattatgggatgcgggagtattttggagaagaacagctgattccgatttacattgaggtagaggacgggctgaggctggagagagcgctttgcagggaacgacagcagaaggaacccaaatatgcggagatgtgcagacgttttctggcagatgcagaggatttctccgaagagaatttgaaaagagcaggcattgtaaggagatttgaaaatctgaagatggaaaaatgtctgagtgaaattacagagttgattcgggaagaaatgacttcgctttaaaagaaaacaggaaaaagataaaaagagaagcagacgggcagatttgccgtttgtttctctttttttgctttacaaggttttaacttgcaattgaagtgatattaaaaaaggaatgttataatgacgaacgtgccattaagaaaggaaacagtttgatgttaaagaaagtaataaaagaggcattccctaccgtactggcgtttaccatgtcaggaatgtacagcattgtggatgggatttttgtaggaaaggcagcgggagatacagggcttgcagcgatcaatattgcgtggccgatcccggcactgatcactgcgctcggaattggaatcggaacgggaggaagtgttttgtactctcattacagagggcggggagagcagaaggtatgtgaaaatttgtttgagcttacaatgacacttctgatcggtacaggtatacttgcaacgattttgctgtctctggtacagaaaccgtttttagaaattttgggagctgcgggaagtgttcagacggaagcaatcaagtatacggcgatcattattgccggaagtatccttcaggtggcaggaaccggaatcatgcctcttttgagaaatatgaatcagtcgctgggagcaatgctcagcatggcggcaggatttgcagtcaatattctggtgaactattatctgatgttccgattgaatatgggaatcaagggagccgcatttggaacggtgacggcgcaggccgtggtagttatggcaggatgtgcgatcctgtggaaaacaggttatcgaaaatggagaccgttgtggcacggacaatatgctgcagatattttcaagattggaatcacggcatttggaacatcacttgcgccgacagcggcacttatttttacaaatctgcagtgtcttcgttatggtggaaatgcagcggtggcgtgttatgcggttatttcttatattgtatttcctgttcagtattttctgacaggaatcggagaaggtgtacagcctctgattagtttttatcatggtgcgaaaaaggagatggaggtaagagcagtaaaaaaaatcgcttacaccgcagaaattatttttggaatcacggcggcagcagttacgatttgtatgattccgtatattggaggatggtttggtctgtcagcagagtcaaagcagtgcttttcttcggggatgctgatcagttcatttgcatttctgttaacgggaacggcaaagttgaatgtatcctgtctcaatgcagtcatgcagacgaaaaaagcggtgttcatgacttatatagaaagcctggcagtttcgccaatctgtttgtttttgcttccggctgtctgggatatcagaggaatctggctggcgctcccggtaacggcaggcattatgacagggatttacgggttgataagaaaggatagaaaaaatgaagaataaagtaaaattcaggcaactgggcagtgtgactctttttgttctgccggcattaattcctctgatcgtattttggatttatccgatcctgcgatctgtctatattagtttcacagactgggattatatgactccggattacaattttgtattttttgataattttatttcgttgtttcaggatgccagattttacgatgcactttggaacacagttgtgtttacattgggaacgctgattccgacgatcgtacttggtctgatgctggctcttttgatgcagaaagcatttaaaggaagcgggatcatcaaatttattttgttttcgccatggatcacgccgactgttgcagtgtcgatcgtatggacctggatctacgatccgaatacgggaattgcaaatacggtaatgagatttctgcatctccccgaattacagtggattaaaagttcagacacagcaatgctcgctgtgatcattgtgactgtgtggaagagtctcggatatgcgatgatcttttatctttccgcattggaaaaggttccgaaagagttgtacgaggcaagcgggctggatggagcaaaaagctggcagagattccgggatgttacgattccgtgtatctctccaaccacgtttttcctggtaattattacgatggtaacttcactgcaggcatatgatcagattcagattctgactcagggaggtccgtccggaagcacaagaaccttgctgtatatgtattatcagcttggatttgaagagtttaacatggggcaggcaactgcggtggcgattgtgatgattataatcaccgtagtattatcggcagtacagttcggtgcatcgaaaaaatgggtgcattattagaaagaaggacagattatgaagataagaacaggaatcgaaaaactcggaaaaggaatgattttactgatcttcagtattttcacaatctttccgtttgtatggatgattttaagtgcactgaaaacaaaggcggagattatggatgtccgttcattttttccggcagaattccagtggcataacttttaccaggtcatttttgaatcaccgcttcttcgatatgtcggcaacagtttgtttgtatcagtgatcacgctggcgctgcagatcgtaacaggtgcgatgatcgcctatgcgattgtttttatgaattttaaaggcaagaaagcgttgtttgcagtcatcatgggaacttatatgcttccgacagcagcaacatatattccgagctatattattctggcaaactggaatctgctgaacacgtttacagggctgatcatttccaactgtgtcagcattttcggaatctttctgcttcgacaggcatttatgcaggttccaatgggactgatcgaggcagcaagaatcgacggggcaagctcctggaagattttgtggcgggtcgtgtgtccaatgacaaaatcttcgttcatcacatttggactgatgaactttattacctgctacaacagttatatgtggccttctctgatcacagatgcggatgagaagatgatggtgtcacagggattgagaaaattctttatagaaggcggtgcttatggaacagaatggcccctggtcatggcaggaagtacattgatcgtactgccgcttctgattctgtttgcatttacgcaaaagtggtttatcaatggaatcggcggagatacgggtatgaaaggataattccttttttacataaagaaagcaaagaaaaaatgacatacgatgcatgaaggagaaaaaagaaaatgaaaaagagaattgtatcagcattattagtttgtgtacttggaatgtccctggtgacaggatgtggaaacaatgcaaaggctgcagaaacgacaaagacggcagatggaaaaattcagttggatctctggtattccgggggaaaaacagcagtcaatgtatttcaggacattgtagatgcattcaatgagtctcaggacaaatatgaagttaagacaacaacacaggcggattatacagagacttatgaaaaactgcaggcagggattgcaggaaagaaagctccggacatggcacttctggatacagataaatccagaaatctttctgaaaaaaatctggttgcagacatcaatgattatgtagaaaaagatgattcctttgaaaaagatgattatctgccggtattttatgagcagggggaggatgagaacggaaaattgtttgcactgcctgcatatggtacaacacaggtgatgtactacaataaggcggcatttgaaaaagcgggaattgacccggcaacgatcaagacctggcaggaccttgcagcggcagcagagaaaatgacagcttctgatggttcctttgtgggatgggagccaatgtggggctcaggaaatctgattgatgcagcactcagcaacggagcctctcttctgagtgaggacgggaaaaaagtgatgatcaattcagacgaatgggtagaggtatgggagagcttccgtacatggattcacgatgacaagatcatgaaagtaaattccggtggacagggctgggaatactggtacacgacgattgacgacgttctgcagaataaagcaggcggttatacaggttcttccggagatcaggcagatctggactttagcattgtgggagccatggaacagcctggatttaacgacaacccttcagcaccaacggcagatgcactgcagcttgtgatgcttcagaattcttctgatgaagaaaaagaaggtgtttatgagtttatgaaatattttacaactccggaaaatcaggcaaaatggtccatgggcacaggatatgtggcagtacgtgagtctacacaggaagtagaagagtttaagtcttatgcagaagaaaatcctcaggcactggttccgcttcagcaggcatctcacggaacaccggctcttcaggatccgacaggaggaaagattctggatgccctgtcaattgcagcggataaggtagagttggaaaacgtacctgcacaggaagctctggatgaagcacagaaaacagcacaggaagcattggatgcattataaaatgagagatcagattagatttaaaatcggaaaagaagaaaaaaatattcaggaaaaatggattgaaattccagaaggaacagaacacattcagatgatgatagaaatgcccgaagaatttcggtatatggcattcttgtttctggaagatcccaaaaaagaaattcggtttcagaagctgctgggatatgggcagcagaacccgggaatcggaaaaagtacaaaagatacaacgataggaggtgttccgggagagatttatcccggaacatggaaaatcggaatcggtatttttacagaatatgttgcgcagaagctgggagaacaaaccggagaaattgtactgacagtttcggaccggaaagatgtggtttctgatccgatcggcggagaatgctggggggaaaacggacttcatgtctcggaaaaaagctatcgttgggagaacgtattttgtccggaatccggatggtataagggtgattttcatacgcatacgaggttgtctgacggaaaagagacgatcgggcatgcttctgaaagagcagaggaaagcggtttggatttttatgtgccgacagaacataatctgatgcataccggctggtgtaagacttcactctgtgtgcttcccggaattgaggtaacgacagataaaggacacatgaatctgtttggaattacggaaatgccggagaaaattctggagatcgtgaagcataacggagaagaggtcatagatacgtatatggatcagacgatagcacaagcaaaacaaaaaggatggattcgcagtatcaatcatccgtttctgaccatctggaagtggcagtttgaaaatacagacctgcgggatatcaactgtatggagatcatcaatgatccgacgtatccggatggaccaggatctaatgatatggcaattcgttttttggatcaagtatggaatgaaggaattcgtgtgttcggagtgggaggaagtgattctcacaatctggaggatgaattttatgaaggggcaagccttccgtctgcggtgggagatcccgcaacatgggtattttgtgacggattaagtccgaaaaatctgatgaatgcagtaaggcagggacatctgtgtgtgaccagattctgcaaaatagagccaaaaatcaaggtagatggtcaggactgtattccgggagatgagatcactgcaaagaagtgtgagattacatatcgggcggaaattttgggactgacagaagaaccggaagcatttcttgtgatgaatggaaattatgtggaactgccggtcagttcatctgaaaacggaaaatatcatgtagagacacacttgattctggaaaatacgtcctggcagtggatcagactggaagtcagaacaaagaaaaaagaatttctgggatatgtaaatccggtattccgaggaaagaaagagccggagaggatcactttcggagaaatcaaaggagagacagaaggtttaacagatgattaaaggtattttatttgataaagatggaactctgattgactttttttccttatggctgggtgcggcaaaagcggtcgtaatacagtttttaaaagaaaatgagctttcggaggaagtgaaggaacgtgtgttttatgctatgggaatcgagaatggagaaatcgatccttatggcgggcttgcgtataagtcctattcagaaattgctctggatattacggatgaactttcaagggagcagatttatctggacagccgaaaagtgaggatgcagctggagcggctgtttgctgaatatgtgacggaaagtcaggcacagtatgtggaaacagcggacattaaagcagtccttgattcgctgaaacagagaaacatttggattggacttgcaacagcagatactgtgccgtctgcaaaaaactgtctgaaacggctggaggtactggaaaaatttgattatgtgggagcggatgatggtgtcctgcgcccgaaaccggaagcagatatgtttctggaatttcagaaaaaattcggactgaagccgcaggaaatcgcagtggttggagatacatataatgacattcgttttgcaagagaaaacgggggagttgccattggtgttttaagcggagtgagtcaggaagcagatttttgcggggaagcagattatatattaaattctgtgggagaacttccgcaattattggaacagatatagatattaaggaggcattgctgtggctgagattcagttgaaacatgtatataaaaaatatgaagacaaagtagttgcggtacaggattttaatcttaagatcaaggatcaggagtttgtgattttcgtaggtccttccggatgtggaaaatcgacaacgctgcggatgatcgcaggattggaggaaatatccgacggggagcttctgatcgatggaaaaatgatgaatcaggtacagtcatgcgacagagatattgcaatggtgtttcagaattatgcactgtactcgcatatgaccgtatttgagaatatggcatatagcctccggctgaaaaaggtaccgaaaaaagaacgcagacagaaggtggaggaagcggcaaagattcttggactcgaaggggttctggacagaaagccgggagaactttcgggcgggcagaagcagagagtggcaatgggacgtgcaattgtacggaatccaagaattttcctgatggatgagccattgtccaatctggatgcaaaattaagaacacagatgagggcggagatactgaggttgtaccagaagctgaaaacgacgtttatttatgtgacgcatgatcagacagaggcgatgacacttggaacaaagattgtagtgatgaaagacggagtgattcagcaagtcgcatcaccggaagaactttacaactgtccggcaaatacatttgtggcaggttttatcggaatgccgcctatgaatttctttcaggggaaatgctgcagaggcggagaatatggaacctatcttcagattggagattttgcggtcaatctgacagaagaagatgccgaaagagttttccgaaagggatatatgggtgaggtgatcacagtaggtgtgcgtccggaagatctggtacttacagaggaaggaacagagcatgaggttctggtgtatgaaatgctcggtgcagaaacctatctttattttacatacgaagggaaggatgtggcattgaggacaaatgcagacacaccatatagacggggagacaggatttctttttgtctcagaaatgataaactgcacttgtttgacggtgacaccgggatcagaatataagaaagacggcggaaggagacttctgctgttttttttgtgcaattgcaggaatctgggtatatcttacatcaaaattatgctatactgaaacagtaaccagaaggaattcaagaaaagacagcaggtgatgatatgagcagttttaaagacgtggttggacacaaaaatataatacagtatattgaaaatgcggtaaaaacagataaggtttcccatgcatatattttgaatggggaaaaaggttccggaaaacgacttctggcaaatttgttcgctatgagcctgcagtgtcagaaccgggatgaagacggagacgcatgcggaaagtgccagtcctgcaaacaggcagcatcgaataatcagccggatattatcagggtgacacacgaaaaaccaaatacgatcagtattgatgacatcagagagcagatcaacaatgatattgtgatcaagccatacagcagcaaatataagatctatattgtaccagatgcagatatgatgagtgtacaggcgcagaatgcgctgttgaagacgatcgaggagccgccggcttatgcggtgatcctgcttctgacagagaatgcggagattcttcttccgacgatccgttccagatgtgtaatgctgaagctgagaaatatcaaagatcagctgatcaaaaaatatctgatggaacagatggagattccggattataaagcagatgtgtgcgtggcgtttgcgcaggggaatatgggacgtgcgatcatgcttgcgacatcagagcattttaatgagatcaaggaagaggcagttcatctgctgcgtgagatcaatgacatggatgtggatgcgctggaggcagccgtaaaacgagtggtttcttataagatgaatatcacagactatctggatgtgatctcggtatggtatcgggatgtgctgatctataaagccacaaagaatgtggatcaggtcgtattttctgatcagctcagatttatcaaggaccgggcaagcaagagctcttacgagggaatcgagaatattctggacggaattgaaaaggcaaaggccagactaaaagcaaatgtcaattttgaactgacgatggaattgcttttattgacaataaaggagaactgatagaatgacaaaagtgattggagtaaggtttcggacagccggaaaaatctactatttttcaccgggaaagtttgagatcaaacagggagaccacgtgattgtggagactgcgcgcggtgtagagtatggaaaggttgtgatcggaaccagaaaagtaaaagatcaagaggtgatacagccgctgaagtctgtcattcggatcgccacagagcaggatcagaagacagaagagaaaaatagagagaaagaaaaggaagcatttcagatttgtctggaaaagatcagaaagcatggtctggagatgaaactgatcgatgcggaatatacatttgacaacaataaagtgctgttttatttcacagcagacgggcgtatcgatttccgtgagctggtaaaagatcttgcagcagtatttcgcattcggatcgagctgcgtcagatcggtgtaagagatgagacgaagatccggggcggaatcggaatctgcggaagaccattatgctgtcacacgtatttgtccgagtttgctgcggtttccattaagatggcaaaagagcagaatctgtccctgaatccgaccaagatttccggagtgtgcggaaggctgatgtgctgtctgacgaacgaggaagagacttatgaagaattaaacagccagcttccgtcagtaggagatacggttacgacttcagatggattgacaggaacggtccattccttaagtgttctgagaaaactggtgaaagtagttgtaaatctggaaaacgatgaaaaagaaatcagggaatatcaggcggaagaattaaaattccgtccgcgtaagcgaaaagcgaaggtctcaaaagaagagatgcgcaagctcgcggaactggaaaagggagaaggagcgtcaagattagatgacaaataatttaaaatccggagagcgtctggatgatctgcagcttaatgggcttcagatcatccaggatccggaacgattttgttttgggattgatgcggtgatgctttctgattttgccagggtcaaaccgggggagaaggttctggatctgggaaccggaactgggatcttaccgattttattgtccgcaaagaccagaggagagcattttatcggacttgagattcaaaaagaaagtgctgatatggcgcgaagaagtatagagtggaatcatctgcaggaaaaaattgagattgtgcagggagatatcaaagaggcggcagcgttattcaagccgactttttttgatgtgatcgtgaccaatccaccgtatatgctgaaccagcatggtctgcagaatccgggagatgccaaagcgatcgcgcggcatgagattttatgtactctggatgatattttacgagagagcaaacaattacttgcggacgggaaaggacggttttatatgatacataaaccgtttcgtctgggagagattctgacgaagatgagtgaatataagatcgaaccgaagaggatccgatttgtgcatccttatattgataaggaacctacgatggtgctgattgaaggtcttcgaggcggaaaaccgagggtaacgatcgaaccgcctataattatgtatacccggtgagggtgagagaaaggaaacagcatgacaggaacgttatatttgtgtgcaactccaatcggaaatctggaagatatgacttttcgtgtgatccgtacactcaaagaagtggatctgatcgcagcggaggatacaagaaacagtatcaagctgttaaatcattttgagatacagacaccaatgaccagttatcacgaatacaataaatacgaaaaaggaagaaagctggtagaaaagctgttggaaggacagaatatcgctttgatcacagatgccgggacgcccggaatttcggatcccggagaggaacttgtgaagatgtgctatgaatccggaattccggtaacatctcttccgggggcagcagcctgtattacggcactgacaatttccgggctgtctaccagacgatttgcatttgaagcatttttgccatcagataaaaaagaacgggaacagattttaaaggagatggagactgaaacgaggactatgatcgtatatgaagcacctcatcgtcttgtaaagactctgaaattgtttctggagcggcttggaaaccggaagattaccgtatgccgggagttgacaaaacgtcatgagacagctcttgcagtgactttggaagaagcagtggctcattatgaggcaaatcctccaaaaggggaatgtgttctggtgatcgaggggaagagccgggaagaagcccgggaagaggagagaaaacagtgggaagaaatgaccattgaagatcacatggaagtatacacaaaacagggaatggataagaaatcagcaatgaaagctgtcgcaaaggacaggggagtgtctaagagggatatttatcaatatctggaaagcagaaaataaaaaaggaacacggagatcagtgaaagatttctgtgttccttttttgtacgatgagcttatgtgattcagatttttttgatatccacaacctctccgtctctcatggagattactttttgtcctgcaatctcagtttctccccgcttgttagttacatagaggactgtaatgccaagctctttgttgatgcgccggatatcacgcatcatttcttttctgcgatattcgttctgtcgggcaaaatcttcatcgaccagaaggacttttggtttgcatacaacagcacgtccaagtgcaacgcgttgtttctgcgcctcattgatcacccggatctttttctcaagaatgtccgtgatattgaaaaaatgtgctgccattttcacacggctgtcaataatctgccgcggaagattgcgaaggcgcagtccaagcgcgatattgtcatacacgtttaagtgagaatagagctgataattctgaaacgccatggcaagactacggtcacggggcagaatatcgttgagcagatcttttccgagatagatttcaccggatgtaatatcctccataccaccgatcatgcgaagtatggtggattttccgcagccgcttggtccgaaaaaggtaacaaactctccgtcttctatatgcaaagaaagatttttgacagatacaaatccgttgggatatgtcttgttcagattttcaagagtaatactcgccatcagaacacctccttatgtctaacatcagtgtaccatattcaaacctgcaaaacaatctattgcagcatgaattgagacaggaccacgctggctgcaagtccggcgaaggtggcaatcagcgctccagtcagtgtgtagcgggagtttttgatctttgcggtcatgaaatagacactcatagtataaaagatggtctctgtacaggacatggaaatggatgcaatcagtccgatcagagaatccgtaccaaactctttatagagatccagaagaagtccggtagcggctgaggaagaaaacattttgacaaccgtaagaggaaccagttctccgggaaatccaatggcagcagtaaactgcccaatacaggaggaaatcatctccagaaacccggaagcgcggagaatacccactgacaccataagtccgatgagtgtgggcatgatcttgagaacggttaaaaatccgtttcgggcacctttgatgaaatgttcatagacgttgatcttcatcagaagtccatagacgatgatggcaaggatcagaaacgggacaataaaattggtgaggtagagaaaaagattcatgaatgactccaaaataaaatcagatttttaaatctatatgcggtttcagagaataacatccctcaagaactcataagataaaacaaaatcgattttgggagtttgccatgtcagatcgtttgcgaaagagcacaaaaaagcaagtcatctcgatcattcttgttcttaccttgctgttgtctgtgatattgtccggatgtcacgggcagtcttcagaaatccagaataaaaagttcagaaaatttaccgaaaccttattttgtcaggaagtggcgtcaaatacggtcagtctgcattatacactcaaagatcccggtcagtatgggattcaggattccccggttacattcggatattttaatacggataaaggaacccgaaaaatttccacagaaaatacacaggcggcattgaaacgattttcctatcggaaattatcaagggaaaacaggcttacatatgatgtgttggattattatctggagttatctaaaaaagaaagtgactatctgctgtatgaagagcccatggggacagtcagcggtgtgcagacacagattccggtactgttgtcagaatatcagtttcaaagtaaagaagatgtggatgcttatctggagttgatgaaaacaacacccgattattttaattccctgatcgcatttgaacaggaaaaggcacaaaaagggctttttatggcaagctatacggcggacaccgtaattgaacagtgtcaggcattcattgatatgggagactccaactatctgatttccacgtttgttgatcggatccagaagcttacagatctgtccgaatcggagaaaagtgattatatccagaaaaatgcatatatgctgcagacctatgtgttgccggcctatcagcagctgattaaaaccgtggtggagttgaaagattccggtaagaacgaagaaggactctgttatctgccaaacggaaaagaatattatgaactgacagtgcaggcgtccacaggatctgcaagaacagttcctcaattacagaaactgacaaagaatcaaatgaaagatgatctggcggcaatgaaagctgtgatcggactgacagcagaacaggcaaaggaaacagcagtgatggaatctaccgatccaaaagaaatattaaacagcctgagtctggatattcagaagacgttcccaaaacttccccagacgagtgtagaagtaaaatatgtgccaaaagccatggaagcacatctaagtccggcattctatatgataccggcattggatgacacagaagaaaatgtcatctatgtcaatcaggcccagatgggtaataagctgacactgtatacaacactggcccatgaggggtatccggggcatctgtatcagacggtttattacgcatcgacaaagccggatccactgcgcagtattttcaattttggcggatatgtagaaggctgggcaacgtatgcggaaatgggttcctactatctggcagattctcttaccagagagcaggcggttctgcttcagaaaaacagttccattttgctggcattgtatgcgctggcagatatgggcattcattatgatgggtggaatcggatggatactgtaaaatttttcaaagaatatggagtcggaagtgcggagatcgtaaatcagatttatgatctgatcattggatctccgggaaattatctgaagtattatatcggctatgtagaatttctggaattaaagaaaaaatgggtcgaaaaaaaaggcgagaatttttcccagaaagaatttcataaggcagtactggatgtaggaccggcaccgtttgaactggtagaaaaatatatgtggcagggagaaaaataaaagatgttgaattatctgtgggcaggaatgattataatcggaatcatatatggtgcattcaccggaaaaatgcccgatatcacgaatgcagctctggattctgcaaaagatgcagtaaccttgtgtattacaatggtgggagtgatggcattctggatgggaatcatggaaattgcgtcccgggcgggaattattgagatggcatcgaaaaaaatgagaccgctgatccgatttttgtttcctgatattccgaaagagcatcaggcgaatcagtatattacaacaaactttattgcaaattttctggggcttggctgggcggcaacgcctgccggacttcagggaatgcaggcactggccgaattagaacaggaaagaaggatgaaaagagcgccgggaaaggcaagaaagcccggcgtggcatccaatgaaatgtgcacatttctgatcatgaatatctcttcgctgcagttgatcccgatcaatgtgatcgcctaccggagtcagtatggaagtgtgaatccggcggcaattgtaggtgcggggattgtggcgacaacagtgagtacgctggccgggatggtgtattgtaagattatggacaggaagagataagtccgatccgggcatactcgatcaattcttcttccacgcgtttcatcacttcttttgtctccggattggtataagggatcctggcaatgattttgggaatatagttttgctcttcgatgatatccagactttcccggaagttaatatcataaaaataagcaagataagaaatccagtaatccatcggtgttacccggtcagaggacaggatacattcatgacgtaaaatagaatctcttacttttggagaaatcgcagaggcgcctgtttcctctgcggaagtatccataaaagtttccagtctgtcttccagttttacacggcagttgtccagtttatcggcatcccggatgatctttgcatgaagtaaagtacgtgcatcggaaattccatccagcttaaaatcactgtgtttggcaatggaaatacggatgatttcgtcaaaatctgattctggaataaagttacggatcagattttgatgaggcgcattgtcgaacagaattttgactccgtaagctgcgtgatccatcgtgtcagggagaaaactgtcaaattgcttcaactgttcaaaacgtccgatatcatgcagcagtgcgatcatcttggcgagggacgtatcttcctcagataatttcatacgggcggcaatatcggcactttctttgacaacaccgtaggtatgtacgatttttagacgaattttgtcattgtggcagtcgtagtcttttaaataattgttgaattgggttttggcggtataaaaatccataaaagtggcactccttacaaattacgttgttcttctaactgtttcttaagctgctcaagttctttttctttttgttgcaaaagaacttcctgagatgcaagcaactcatttttttgagcaatagtattctgttgttcatcgatcgtatcctacatttgatcgatcatgtactgcacggtattcttatccaatatttgtaattcttttgaaaacaatcccataactttctccacattcctgcaaagctcataaatctcccggtacataggaataaacttcggatattgt

SEQ ID NO: 7005 - DNA, 20821 bp, Unknown
  gut microbiota DNA sequence
tatttgtaattcttttgaaaacaatcccataactttctccacattcctgcaaagctcataaatctcccggtacataggaataaacttcggatattgtttgattagctggacgatcatttccggattatcctcgctgagaaatgtgagccacgcatctaaatcgtttttgataccttatcggacaaagtccgcccgccgcaggcatgtattacgggatgcctagatgggtatacctttattgtgacgggtttcccgatagatgtcaagtgggatgaaaacgaattcctgccggcaatatttagggggtacatcttcaaaaaagattatggtataataatactcttataagaaaccaagtcaggaaatgacattttatagcaaaggaggcagaggatgctgcgtgtagctgttgtagaagatgaaactgaatatcgtggattgatacaggagatggtgggcagatatgcaaaggaatatgatctccagattcagactacagcatttccggacggcagagagctggttcagaattatcacaaatttgacattcttctgatggatatcgaaatgcctcatctcaatggtatggaggcggctcagaagatacgggaactggataaggaggtagtgattgtttttatcacgaatatggcgcagtatgcgatcaagggctacgaagtagatgcgctggatttcattttaaaaccgctcaactattataccttttccatgcgttttacaagagctgtgggaagagtgaaaaaccgggaaggaaaaaggatctgtctgaatcttccggatggggcgaaatttctggacagcagagagatctattatgtagagatccagaaccggatgctccactatcacacgaaagcaggagtatttacgattcgcggagcattaaaggacgtgcaggaagagctggaagactggcattttgcaaaatgcaatcagtgttatctggtgaatttgaagtatgtttccgaaatcagaaaaaacattgcggttgtgagtggagatgagctggaaatcagcaggagaaacagacctgcatttctgagtgcagtggtagattttctgggaggctgatgcaggaaagggaagagggaaacgatgagtgaaaatctaaagctgggaatggagagcctgtggtatgggattaatttatggatatcctgtttggtgtttctgcttccgctgagaagaaagacacattttaaagtcagactgattctgtcgggagcagtatgtgttttaattctgtccggagtatattatttgatagaaaatcttacagactggagctactgggggcaggtgccccttttatttatcacgtattttagtgcggttctgattttttacagttgtgtgaagggcaagggatttggcctctggtattgtggtgtatggggaacgatgacatttttgctggtactggaaaccagctatgtactttgcagtccactgctgggagatttgggaaactggcttttgaaaattttattttcggtggcagtaaatgtggccataggactgacactggctcgctggatgccggaaaaggggcaatatcagattggcccgagacagatggtttctgcatgggtgttttgtattatgtcagaaaatttgtttatttacgcaaaggtcgatccgggggctgctttattcaacattgtgttgcagttttattgtatcaccttattgtatctgcaaagtgcattgtttaaaaagagcagtatgagaaaagagctggaaaccattcagcttctctggcatcaacaaaaagggcagtatcagctgtccaaagagacgatagagctgatcaatcacaaatgtcatgatctgaagcatcaggtacaggcgatacgtgctgtcaaagatgaaaaagagagggaaacatatctcgaaaaaattgaaaaatccgtgcagatctacagtgctattgtgagaacaggaaatgaaattctggataccattttgacagaaaaaagtctgatctgtgaaaatagcgggattcatatcaactgtgtggcagatggatctctgctggcttttatgaatccggtagatttgtatacattgtttggaaatgctctggataacgcaattgaagcggtgagaaagctggaaagcaaagaaaaaagagtgattgatatcatgctgtacgaaagacaaagctttctgatgctgcagatagtcaatccgatgtgcggagaagtgaagtttgaggatggacttccgcttacgacaaaggcgaagaacggatatcacggatatggaatgaagagcatgctccataccattcaaaaatatgagggacatttgacaacagaggtaaaaaatggatgtttttatttcaacgttatgcttcctcttgaaagagattccaacaaaaagtagaagagacacaaagggtctggtcagtgagccaggctcttttttgtaaaaaatttacccacttactccataagaaataccacctgaacaaaaacggttgtatttgcaaattattgcagatataatcatttcgaaataaattgagaagtgtaagaaataacaaaaaacatggagtaattactatgcgaaccagtaaaatgagaagagaaattgaactgaagaaaggctgggtgttcacagggcgtgacggaaaagcggtcaaagtggatttaccgcatacctggaatgcagtggacggacaggatggaggaaatgactattatcgaggaacctgtcactacagcactacatttgcagccccggattttgacagcaagacccagagagtatatctggagtttcagggagtaaattcctctgccgaggtggagttaaacggtcagaaggtgatgagtcatgacggcggatattctacattccgtgcagatgtgacagagtttttaacaaaagaaaacaagttagaagtagcagtggataacagtgtcaacgacagagtatatcctcaaaaagcagatttcacattttatggtggaatttacagagatgttcttcttcgtattgtatcaaatgaacattttgagatggactactacggcggagacggtgtaatggtaacgccgacagtagaaggaaaagatggaaaggttcatgtagagagtttccataaggcagaaaatgccaaagtagcagtaactttgattgatgcacagggaaatcctgtagcaaaaggtgaaggaaaagatgtgacggttacgataccggatgtacatctttgggatggagtagaagatccatatttatatacagcagtagtagagttgatgaaagacggagaagtcaaagacgacgttcgcattccatttggtgtccgtacattcagcgtggatccgaaaaaaggatttttcctgaacggacgctcctatcctctgcatggagtatccagacaccaggatcggaagggaatcggaaatgcattaacaaaagaacaccacagagaagatatggaatttatccgtgagatcggggcgaatacagttcgtctcgcgcattatcagcatgatcagtatttctatgatctgtgtgatcagtacggaatgattgtctgggcggagattccatacatctcagaacatatgccaaacggacgggaaaataccattagccagatgaaagagctgattgtacagaattacaatcatccaagtatcgttacatggggaatatccaatgagatcacgatttccacaaaggataataaggatatgctggataatcaccgtgaactcaatgatctgtgtcacaaaatggattccatacgtcctacaacactggcctgctatgcagtgtgcggtcctttcaacaaggtagcacatctgtctgacttagtaagctggaacttgtatttgggatggtatgttccagggttgtttttaaatgactggtggatcagctttttccaccgcgtgtaccctaacaggtgtttgggatattctgagtatggctgtgaaggaatgccgaatttacattcctcacgtccaagaagaggagaccatacagaagaatatcagagtctctaccatgaatttatgctgaaatgttttgagcgtcatccgtatatgtggagtacccacgtatggaacatgttcgattttgcggcagatgcgagagatcagggtggagagccgggaatgaatcataagggacttatgacattcgaccggaaagtaaaaaaagacagcttctacatttacaaagcgtactggagcaaagagccttttgtacatctttgcggaagccgctacgtagacagaacggaagcagtcactacagttaaggtttattcgaaccagacaaaagttgcattatatgcaaacggcaagctgctggaagaaaagacaggcaataaagtctttgaattccgggttccgttaaacggagaagttcgtctggaagctgtgtccggtcaggcaaaagatacgagcacaattcgccgtgtcagccagccaaatccggattacaagctcaaaaagagcaaaggaaagagccagaactgggtataagaaaaaagcaactgcaaatcttgcagaagaaattgaaataagaaacgagtaaatcggatggccctctgctttttacaaagcagaggtgctgttttaggcaaagagacagaccgccgcatccgggcgggagaatggagaataatatgaaacaggaatctactcaggcaacatctgtcaatgctctgaacagggcaaagatgtatcagcttgttcttttccctatgaataatggggcgacaaatgtctattatattttgacaatgaactttattgcatattatgcaaacggagttcttggcttattgctggcgtttgcaactacaatggtaacattgatgcgtgcaggagatgcgttcattgacccgatcatcggagcaatcatggacagaacttctaccaaatggggaaaattcagaccgtttatggtaatcggaaatctgattatgatcgtatcctcaattttactgtattttggaacccgtatcatttctgaggatatgatgtggctgcgttatttatgctttattttgttctacgcactgaatatggttggatatacattccagacatcggttacacgttcaggacagacatgtctgacaaatgacccgaaacagagacctctgtttacaatttttaatacgattgccagcctgatcggtatggggcttgtacagtttcttgcgccgatcgtaaccggaggaaattacagaacagaagaattctttaatatcatgattcctctggcgatgatcgtatcagcgatcatgactgcactggctgttatcggtattgcagaaaaagaccgtccggaattctttggacttggtggagaaggcggaaaagaaaaagttaaaataaaagaatatgtagctattttaaaagcaaacaaagaattacagagactgatgatcgctggtgcaggatgtaagcttgcattctcgatcgcaacgaatatgacggttctggcgatgctttacggagcgatgatgggagattacaaaggtctgtatcttccgatgatgatcgtcggatatgtgttttccgttccgttcttcctgttgacagtacgtacttcacagaagaaaggacagaaggcatctttaatgctctatatcagcgttgcacttgttatgtacatcggtgttttagcattgcttctgttgtggaaaccggaagttgcagcgatgaatctgagtctgacaaacctgaatctctatacgattctgtttatccttttcttcggaatcggatacggagcatactatgcaacagcagatatgccgattccaatggttgcagactgttcagattacgaaacattccgttccggacgctatattccgggaattatcggaaccttattctcacttgtggataagctggtaagctctctgggatctacagtagtaggaattgcggtgacaatcatcggactgtcaacacttccggatggaacaaccccttattcagagggaatgcatacgattgtaatcattttattctgtgttgttccaatgcttgcatggatcgcaacactgatcgcaatgcgcggatataaactgaccggtgcaagaatgaaagaaattcaggcgatcaatgcagtgcgtaaggatgcgatcagcaaaggaatgagcgtagaaaacgcaatgcagaaatggcagacgatcgatcaggtgccggatgaatttaaagcacactaaaagtgaaaaagtaaacatatagaagggatatcctttcatcagatatgctccctttcgggaaggcagttaaaataacaagactgttctcccgggagggggcatattgtgttacagaactatttgtacctgaaaccgacttcgtgctataatatgacagacacaaatcaacgagatacggagaaaattatgcagttacgatacgagatcccggacacattctggagtttgttccgttcggtaaaccgggagatttacatggagtcgctgttggtgatcaatgaggaatatcagtacagtaattattttctgacgaaagaaatctgtgtgcaggtattgagtgatatgaatgcacagaaacaggttttgcttcaacgggaggagaacgagacggactttgacatgttggagacgacagcatcccgcattttacggtggcttttaaagaccggatggctgaagaagatcgaagattacagtacgatgaccacaaatattgtgataccggattatgcggcggtttttattgaggcatttgagcgactcacgtccgaagagctggaagaaacagaattatatattcagaatgtatatgccacactgttttcctttcagaataattccagagtaaatctgaatatgctcaggacggccctgatcaatacaagaaagctgaacaaagcgctgcaggatatgcttcataatatggacaagtttttcgagaggcttttggatcaggagtcttacggagaacttttgcgggagcatctggacgggtatgtggaagaaattgtcaagaaaaagtatcatatcttaaagacctcagacaatttttatatctacaagatggacatcaaagaatgtctccgggatatgcgggaaaatgaagaatggattgaaagcatccggcagaaagcaaaagcagcaggagatacgaaagaggatgtgttagatctgctggatctgatcgaacggggctttgatgacattgaacacaggatctccaatatggacagagagcattccaaatatgtgcgggcaaccgtgagccggatgaattatctgttaagcggagagaccgataccaaggggttggtggtgcagcttctgaataaaatttctgcgcaggaagaaccggagaggctgcttacagaagcgggaaaacggatgaacctgtctttgtttgagatgatttccgaaaaatcattgtataagagaagaaaacagaggacagactttatcagccagatgggacaggatgaagaatatgaagatctgaaccgggaggatgtgctgaagttaaaccggattcagatgcgctacagcagacaggagatagaggattttatcgaagagcatatggaaaacgaagtgatggacgccggaacacttcatattacagaagagacagcatttgaaaaactgatcctggcatatgactacagtaccagaaagaacagtaaatatcgggtattgaatgaggaggagatagtcatccaaagtggacagtatcaatatccggcattaaaatttgtgcgaaggagaccgcaatgatcaaatattacgaacagctttcggaagaagagcaggacgatatcaaacatgtgatccagacattatatcgtcagacctttcttctggaacgaaaatttgaaaaacggaccgggcggatggttccggtcagggagtaccgtgtatgcagcaagcacagggaatttctggagaaatattttgcagttgccggaatcacactgcaggaaaatctgcatatgggcgtcatgtacatccagggagagacactatggggagaaaagctctccagacttgccacaatctatattctggtgttaaagctgatctatgatgagcagatggcagcagtgtcatccagcagccatatcgtgaccactcttggagcagtgaacggaaaagcgggagaattccatgtgttaagcggcctgccgtccccgacagagatgcggaggactgttgcatttttgaaaaaatatcagattgtggaacctgtggatgtgatggaggagctggatgagaacagcagacttgttatttatccgtgcatcaatacagtgctgcttggagatgatatcagagaactattagagacgttcagcgaggaggaagacagtggagacaaaacaggcgttcaaagcgctctcgaaaatctgcctgaataactggcattacatagacagaaaagtacttactcttaatcagggaatcaatttctttaccggacattccggaagtggaaagtctacagtgatcgacgccatgcagatcgtactgtacgcgaacacagacggaagaggattttttaataaggcggcagcagacgactctgaccgttctctgatcgaatatttaaggggaatggtgaacatcggggaaaataacgaatcccagtatttgagaaaccagaatttctccagtacgatcgttctggagctggagcagacagatacgaaagaaaagcagtgtgtgggagtggtatttgatgttgagacagccacaaatgagatcaatcgcctgtttttctggcataaaagcgggcttctggaaaatcagtaccgggcggataagcgctgcctgacgacatttgaagtcaaagaatatctgcagcggacattttcaaaggaagagtattattgtggtccgagcaatgagagattccgcagacagatgtatgacatttatctgggtggtctggatatcgaaaaatttcctcgtttgttcaagcgagccattccgttccgtatgaatatcaaactggaagatttcgtgaaagaatatatctgtatggagcaggatatgcacattgaagagctgcaggaaagtgtgatgcagtatggaagaatgcgcgggaaaatcgaagagaccatggaagaaatcgggtatcttcaggaaatccggggttcctatcggcagtatgaagaaaaacaggaagagacggcgtcctgtacctatcagatttccaggctggaaatcctgcatctgcagagtaagatccaggaactgaatgaccggatgaaagagacacagacggagattgcaggacaggaagcgaaaagagtcaatctggagaaagagcaggcagaacttcagaaagaatacgaagcaataattttgaagattgcggacagtggttatgcagccatggaaaaagatctggagagtctgaacgaagccctggaacggctgcagaacagtaaggcaagatggaaaaagactgcagatggtctcaaagagtggaaagaaaaagatgtgacgccgaaccagaccttgtgggatattgaccggtttgtttctggaaagatcacggaaggtgagctggaaaggctgcagataagtctgacacagatccgggaagaactggaagaagagcgtcaggagacagatgccagacttcgcgcggtcaaaaaagaagaaaaggcagcacgggaagaattaaaagagctgaaacagggaagaaaagcctatccaaaagaactggaagaagcgagatatgagttgagaaaccggctgcatgagaagtgcggcaagtttgtcaatgtgcagattctggcagatcttctggatgtgcgggacgaacgctggcacaatgccatcgaaggatatctcggaaacaacaagctgcttctagtcgtggaaccaaagtacgcgaaaattgccatggaaatctatcaggacatggataagaagaaatttttccgggcagcagttctggatacagaaaaagtacaggagacagaatgggaagtaaaagaaggagcccttgctaaggagctgattgcaaaagagccgtatgtgcaggcatacatcaatttcttcctcggaaatgttatcaaatgtgaaagtatcgaagagcttcgtcagaaccggatcggaatcactgcagactgtgtgctgtaccacagcttccgtctgcagcatatcaatccggaaaattatacgagaagggcatatatcggagagaccagtatgcgtcagaggatccgccgtctggaagaaaaatgtgagagtcttcaggaggaacggattccactgcaggaaatgctggaagaaatccgcaggatctctcagctggaaggactgacacagcctctggaggattacagacaatggctgtctgatctgcagaaaattccggcaaaggaggcagaaaaggccagacttctggatacaatgcagaagctgcgagaggaatccgttctggtgtgggagcagcagaaacaggaaatccagcagaagcaggaagcaaagaaagcagagattgaggcagttcagaaaaccatctggaatcatcaggaaaacggaaaacgattccagaacatgcaggtagattttaatgaacagttagtgcagaaagaaaatgaattccggcagcaggacagagaaaaatatgagccggaatttcaggagtatctggagggcagacagagccgcaattatgagtacctgatgcgggaacgtatcaagaaaaaacagcctttggaagatgcgcaggaaaaagcatatgaaaaactggtagaagcaaggagtgcatatcttcgaaaatatccgaacagaacctattctgcaacgatccgtgacaatgacgtgtacgaaaagcagctttcaaatcttgagtgcgataacctggaaaaatacagggaagaagcacaggaacaggcgagagcagcagtggaacactttaaagttgattttgtatccaagattcgttatgcaatcaaagaggcatatcagaaaaaagatgaattgaaccggatcatcagccgtctggatttcggaaaggacaagtatcagtttgtcattacgaaaaacaaaggtccggacggacgattctatcggatgtttatggatgacgcattggatatcaatccgtctcagttgagtgaccacatggaaaatcagatgaacctgtttaccatggagcatgaggaagaatacggagatctgatgaatgagctgatcgagattttcattccgccggagaatgccaccagggaagagctggaggaagccagaaaaaatatggataaatatgcagattatcgcacgtatctttcctttgatatgcagcagatcgtgcagggagaaaaggatatgcggatcggtctgagcaagatgatcaagaaaaattccggtggagaaggtcagaacccactttacatcgcgcttctggcaagctttgcacagatttacagaatcaatctgtctccgaagatcaagcgtccgccaaccctgcgtctggttgtcctggatgaggcattttccaaaatggatgcagagaaagtaacaagttgtatttctctgatccggggactgggatttcaggcgattatcagtgcaacaaatgataagattcagaactatctggaaaatgtagacaagacatttgtgtatgcaaatccgaataaaaagcatatttcgatacaggaatttgaacgaatggagtttgaacagctgcaaggggaagaatgatgacgtggatataaaattgtggattcgtgcatattactaggatttgctggaacgatcggaaaataaacgaaaaaaagatcttctggaattattagcggatgagaaaaaatatgccccgtgctttgaaggtctggatcagcttacagaatctgtttttaaaaggattttcagtaaaaaatatttgggaaatacaaaaacatttgaacaagagatgcaaagtcatgtcatcagtactgcgaaaaaattctgtccggatgtagaaaaagaaatggatgacacgacagtgcttcagcagctgtggatcgaagaatatgcacaagaactgtctttaaaagggaaactgcatttttgtctgaaagaagaaaatggaagcactcaggagattaatacagagtgttatcggttcggtactacattaaacagtcagacactggagcatgccgagataaaagaagtacagaatattcagaagatcgtgatatttgagaataaagccaattatatctctgcaccgtataaggatggtattctatacttatttagtcatggatatttttctccaaaagaatgtagatttttaaagcagctgcatcaagtgttaaaaaatcagacatcctgtgaagtgcaatattttcacagcggagatctggattacggtggaatcaaaatttttcagtatatacgcaaaacaatctttccggagttagagccgcttcagatggatgttgagacatatgaagcatatcaggaatttacagaagtgatagatccggaaacactggaaaaactaaagcgtgttcaggatgaaaatccaaagctgcaagagctgatcaaaaggctgatagaaacaggaaaaggaattgagcaagagtgttttttaatagagaaaagagggaatcacatatgaaattaatgatcgcatcagatattcacggttctgcatattactgcagaaaaatgttggaagcttacgacggagaaaaagcagacaagctccttttattaggggatattttatatcacggcccccgcaatgatcttccgaaagagtatgcgccgaaagaagtcattgccatgttaaatgcaagaaaacaggagctcttatgtgtcagaggaaattgtgacacggaagtggatcagatggttctggaatttccgattctggcggactattgttttttgaatctggatggacagaatatttatgcaacacatggtcatgtgtggaatccgggaaagctgccgatgctgaaagcaggggatattctgctgaacggacacacacatataccggcatgtgaaaagattcatacggaagcagatcagagtgtcatgtacatgaatccgggttctgtgtcgattccaaaagaaaattcagaacacagctacatgatctgtgagaatggtgtgtttgaatggaaaaatttagagggagagggttatcaaatatggaagagagatacgcgttgctgatcgatgcagacaatgtttcagcaaaatatatcaaaccgatactggatgagttgtccaagtatgggaatgtcacgtacaagaggatttacggggactggaccagcacctacaattccagttggaaagaggtgcttttgcagaactccatcacgccgatccagcagttcagctatacccatgggaaaaatgcgactgattccgcaatgatcatcgatgctatggatatgctgtacacaagcgagctggaaggattctgtctggtgtccagtgacagcgattttacaaagctggcaagcagacttcgggaaagcggaaaaatggtgattggaatgggagaagataagacgccgccgccgtttcgaaaagcctgtgacatttttaccgtactggaattgctgttagaagacagcatgcttgaaaaaccggaaaaagcagcagcacatgcagttgtaggaaaagagtccaaaaaagagtctgccggtgcagtctgcaagagtcagattgaagaagcggtcgtgaagattattacagaaaatcaaaataacgataaggagactggacttggagaggtcggaagccgtctggtcaaactgtacccggatttcgatgtgcgaagatatggatacagtctgttgtccaagtttctggaaacatttccaaaactgaagctgttacaggatggaacgaaagtatccgtgacattgtatgaagataaaagtcagcaggagcgtattgaagaatatattatgtaccagttgaaacaggcgggatgtcagggagtatctctgggaactctcggaaataagattcgaaataagttcgggaattttaaagtgagagattatggatattcgcagtttcagcagtatatcaaaagctttccggatgtagatttaaaggatgacggagagcagaagtgggcagtgttggtaggaaggggataaggtaagaaaaaaacaattgataaggggttacaaattgtgatatattagtgaaacggtgggaaaaacaatcaagatagattgttttttatcgtccaaaagaaaaagggaggaaaatagttatgaaacgagtagtatcaatcttgcttgcagcaaccttgatgctgacatcaggaacagtgacctacgctaccgaagaaaatcctgtacaaatggaatatcagactgagggtcaggatgcagttcaggcagtaaatggaacagaacaggctccattgaaagatataggagtggttcaggtatcaattgcgccgggaattacgctgcaaaaaagtgtaacgtttacggttggattaagtggtcaggaaagtcagagcattgaactggcagcaaatcaggaaattcaggatacaaaaggaacagttcattttagtcagttaccggcaggaacttatgagctgacagtggcagctccaggatttgctacatacacacagacaatcgaagtgaacagcaagtcgtatgctgtaaatttgatgacagggtttgtagagggatatacctatgaagagggggattatcatccgggtgtgttgctgattggtgatgtaacaggagacggagtgatcgatgacacagaccgttcagtattagtagatgcgattgatacagagcaggcatcagaattgacggatctgacaggagatcagaaaacagatctggcagatttggaatattttgcaaaaggatatcaggcagaagggcacacactggcctgcatagaagaatctgtttctgcagatgcgatcagcccgaaaccgggagaagacacaaatgtggaaggaaacctggaggatttactgaaaggagaaggaaatgttacactttcaacgcaaggtggaacagaaatttcagaagaacatcctgtttcagtagagttcgacctttcagaaagtgcagacacacaaattgacggaattctaattgagactaataaagaaaatccaattcaaaaagctactgtggatattacatatatagatgcagaaggaaacgagcagaccgtaactgcaccgatagaaaatggagtggagcacttactgagaactagtgatgtgcaggtttccatggatgaagatggaaatattcagattcatctcggaagtcagattgctgtaaaaaaagtaacgcttacgatccagggaatgcagaacaacaataatctggcggaaatttccaaagtggaatttgtaaacggaatggaaaaccggattccaaagccggatatggatattccgacaaatcttgcagttgagacaggtagtgaagaatttacacttacctgggatgcttgtaaaaatgtgacaggatacgaggttctgattgagcataacggagagcaggatacgtatacagtcaagaataattcattgaaagtaacatcatttaatgaaaagaaactcgtgaacaaagaacaatacacagcaaaagtgcagtctgttaatggaacctggaaaagcggatacagtgaatcggttacagcagttccgaaagcggacaaaaaaccggatgcaccggaaaatgtaaaggcagtcggaaaatataagagtgtggaagtttcctggaaaaacatgaaaaacacagagttttataatctgttttaccgtgaaaaaggtcaggaagaatacaccaaaatagaaaatatcacgacaaacagctatacaatatcagagctaaaagagaatgtaaaatatgaaatctatctgacaggtgtgaatgagttgggtgaaagtgatccatccttaacgagcacagctcagacaacggatctggaaccagcagtcatgccgaaatacaagcagatcaatacatccgaagaaggacaagtaagttctcatatcgtatctgcaacaagaggacgtggggagatgaaagacagtcctctggacttagagggtaagacggcatggggaactgtggataacaatcctgcatctcatttttatatggcagactgggatgacggtggggaatataccgattttaataacaaaggatttacattcgagtttgatcagccgtatacaatggatacaattgggttccaggaagtgacggcacagggaaatttcacacggatcagtctgaaatactgggatgaaaatggaagcgagcatgttgtagataaaaacaatctgaaaatagaggcaagaactgacaaaaataacaaaagatattattttattcggattgcagagccgattcaggctaaaaaaattagttttggaatcggaagagattattccggcctgcgtgttatcacggtttcagagattagtttttacaattatgactctctggaagatgatattatgggactatatgaggatgagcttcatacagttctgaaaggatctgtgacagagcagacgatacaggacctcaggaatcgtctgcagacaaaggacgaggcaagtggagagtatcatccggataaagaccgtttggaaaaagaactggataatgcagaggacattctgaacaatcagttgagtgagccgattctggtacacaataccattacaacaagagatacagacagaggttttagtggtctgaatgcatggcagccacttggaattactgcagcagcaggagaagagatcacactctttgtcggacacaatacaatgggaaccggatccaacacaaaccttcagcttgtagcgacacaatatcacgcagaatcaggttctgtgtcaaaagtggtaacaacactgaaaacaggaagaaatgatgtaacgatcccgaaaatctggtcaacagatgaagagtcaggaggagcattatatattcaatatacaggcaataatgcaaatgaccgctattctgttcgtgtcaatggcggagtggaagttccgacgttggatctttatggagtgacggatgcacaggaacggcagcaaagagcagaacagtatgtagaagcgttgaagggctatgtagaaaaaatggaagctgttcacaaaaaagtacatgaaaattccggaaatgaatctgtggaatacgaatacagcaaagaaaactgtatccttggagcaacagatattttactggataagatgctgttttcattgccggcacagcaggttttaagcggctgtgagggaaatgcacagaaattgttagattccatggatgcaatggaaggtatgatgaatctgttctatcagcataagggattgaatcagacagcaccggatgaaaaagacagattcccgcagagacatttgaatatccgttatcagagaatgtttgcaggagcatttatgtatgcggcaggagatcacattggaatcggatggaatgaaacagctggtatgatgacaggagttccggttcagtctgataatggaaaatacgtaagcggacgctattttggctggggaatcgcccatgagatcggacataacatcaatcagagtgcgtatgcatatgcagaagtgacaaataactattttgcagtgttggcacaggcaaaagatacaaatgacagtgttcggtttgaatatccgaaagtttatgagaaggtgacatccggaacaaccggaaaatcagaggacgtatttacacagcttggaatgtactggcagttacatctggcatatgattccggatataactttaaaacctatgacaactatgaagagcagttaaataatctgttttttgcaagagtggatacttatgcgagaaacacggcaaaagcaccggcacctcagggtatcgcgctgacattgtccggagacagagatcaggatttcatgagacttgcgtgtgcggcagcccagaagaatattctcgaattttttgaacgctggggaatgatcccgaacgatgagacgagaagttacgcagggcagtttgaaacagaaacaagggcaatttattatgtaaatgatgattcaagagtgtatcgtctggaaaatagcggaagcagcctgggaagtctgggagatgtagaagcagtcggagatgatactacagtaagcgtcaataaagacacagcaaatcaggtcgattttacattgacttccaagacaattccggaagaagacgtattgggctatgaaattacgcggaccatgatttcgggaggacaggttgaaaaagaagttgtaggatttacaacagaaaaccagttcagtgatcatgtgacaactgtaaataacagagtcatcacctatgaagtgacagtggtggacaagtatttgaatcgttcggcagcgaagacattgacaccggtcaagatcgaacatgatggaagcctggataaggaattctggactaccacaacgaaaaatatggaggcagttcatacagaagatccgggagaagcagatgaagatacaccatgtgcaccacagcaggaagcgccgatcttaaaagcagtggacaataagacggatacaacatatacaggaattgcaggagatgaggcagaagttttgatgcagtttaatcggaagcagatcatttcaggattgaaatatacagtaaacgagggaacagcgatcaaagattacagcatttatgtgcatggggataatgatgaatggacagaggttgtaaaaggttcatttgatgacaaaaaagtacagacggtatattttgaaaatgtggatggcaaatatgtcggcacatacagtacagatgcagtaaaactggtcattcataaccagaaagacaccgaaatatcaatatcggaactggatgtactgggagttaccggagataatgtagatttcagaagtgctcaagatggaacttccgcaattgggcgtttggcatcggattaccaatacggagaaacagaagcagataagataccggcagggtcaatcgtttttgttggttcgtataaaggaaatccggcatacaatgtagtacttctttatgatcaggatggaaatattgtaggcggaacaaatacggatggaagtttgaaagcgcagcagatcattcttgcagatgtaccggaaaccgggaatattcaggatgtatcggatggtacatggatttactggatcgatccgcaggatagtgcccaattagccggaaaacaggtgcgtgcagagctttacagagtaaatgatgcacagacaaacgaagggcagagactggtaagtgattctctgtatgtggaagtgcctcaggaaatgccggaaattgaactcaatggaaatcagtaatcaaaaaggagtatagtgtgaaaaagtatatagcaagaatcgtggtcatgcttcttattgcatcggtacttccgttacaagtatctgcagcagaaaaggaaagtattgaactggcagttgaagcggagcaggtcggtgtgtcattgacattgccgcagtctgtcagtggaaacatattgtcacttcaagtaggcttgaaggtagattcgaatgtgcaggaagagacgacagcaacatttcagttttctgaaaatgtggcaaaagtagcagactatcgttacaatcaagaaaaagggatcctgaatatttatctgtcaggaacaaagactctttttcaaaatggtacagagtctttgaaacttggaaatgtgcagatcaatacaacaaatgagaatggtgcaacagttcatgtaagtgttgttgaagattctgtaaaaatggtcaagggaacgaagacggaagtaattcaaaacatagattatccggaaaaagcagagattatcctgggcaatggtggtaatcaggataacggaggtgatccggacaatggtggcgaccaggataacggagatgctcaggataagacagagcttcagcaggtaatggaaatggcaaagagctacacgcagtctgagtatacaaaagaaagttatgcagtattgcagaaagccatggaaatggcgcagaaggttctagacaaagaagatgccacagaggaagagattacagaggccttaaagaatctggaaaatgcgatcggatcactggtaaagaaagaggacacatcttctccttctactgatcaggatgaaactacaaatcagggagcagataaaaataccagccagaatacggatcaaaagaatgacaagaatgttgtaaaaacaggagatgacagcatggtgattccgtttgtggcggcaattgcaatcagtgttgcagcggcagcatttattatttgcagaaggatgcgcagaaaatagaatatttgaattgtaaatagtatgggaagacaggagcgtcgagaaatgaaatcattttgcggcactcctgttttttataaaccctcttgacaaaactaaaaacctagtgtactatctaactatagcactgatacacgaggcggaaggaggaagaagatgaattacaatgcagagataccgatctatctgcaggtcattcacgacttgaagaaaaagatgatccagggaaagatacttcccggagagaagcttccatccaacagagagctggcggtcctttataagattaatcagaacactgcagcaagaatctacagagagatggagactcatggatattgttatacaaagcgggggattggaacatttgtgatggaggaagagacgatgttcgagacgataaaaaaagaaatggcagaagaattgttgagcagctttatacat

SEQ ID NO: 7006 - DNA, 26758 bp, Unknown
  gut microbiota DNA sequence
ttttcgtttaccccatcatcgattctaacctaaagaatttgctgtcctacaagcttctctgttgcatctgcaaatttcttcgcaccttcgctgctaaattccagttctacgacatagtttttctgctggtctactgcaacctgacttctggaaacatccgaacctttgatgtaaactgtattatccggtccgcgaaatgtcagctcggccatctcacccagttcctggatcgctgtttccggatcaaaattcttttcatcagatttccatgggaatctgacaatcacatctcctgctttctcatccaccgttacttcacgatctaatatattctgtgaatccagacgagtttcgatgacctctcttgccatctccaactgttctgctgtcagctttttcttcaaacctgacggttcaaaaaccgcctctacgcctccgcggatatcaatcccaaaacgcatgtcgcgaattcctttaatatcctctccgcatccaaaaactgcaatgcacacaaaaaagacgattactgcaagagcaatccatatatgtaattttttatttttcatttttcccgctttctttcaatatttcatatttttagattccgaaagcaagatctcgtttttttccatccttctccaataggatatcgtattcacacagaaatcgcgtgaaaggaagtgtatagaattgaatgcacgaaaaaaagactctctttaagcataccacaaaagagaatatcagaaataaaagcagttccatcggcaatctctgcgtgctcttacgctgttccgcactctgcgcagaaattgcttctcttggattctccaaacgcagataattatcatgaagaactttcttttctatgccatcggtatactgtgccgtcatctgtatacttgagctttgttctttcacaaatctatctgtattttcaaactgaaaatcagaaggaagcaaaatgctgacaaccatgatcaaaacagctgctaaaacagatcttactctatgattcatttttcttcctcctgattcctaaaagtatattgagagtaacactaaattcttcatatgtcaatatatgatttgcttttcagattttactctgtcaaaggctctgccgactttaatctgttatcgtgattttctcgatgaccggttgattttcagccttgactgttccattatcatcttctacgggaacatccttgcaaatctgatccacgatctccatgccgcttgtcacatgcccaaacgctgcataattcccatccaaatagtcactgtcctcctgaacaataaaaaactgtgaacttgcgctgtccggatcctgcgctctggccatagaaatcgttcctcttgtatgagagatttcattctctactccattgctggaaaattctcctttgatcgtctgatccgctcctcctgttccgtcgccattcggatcacctccctgaatcataaacccgtccatgatcctgtgaaatgtaagattgtcatagaatccgtcttttgcaagattcacaaaattggttacagtgatcggtgctgtatccgcatctaattccactgtaatcgttccataatctttgacctggatttctgcgtggtgtgttccgcttaaaagttcttcagaagcttctgttttcttctgttctgatttctttggagtctcttcctgtttctggcatcccgttacgacaaataaagccagaatgattgccgccgcaattcctatttttcttttcatccttccataatcctttcagacaaaagaggttccgcccggcatataccgaacagaacccccttttatattacatattttattctcaacagtgtgataaagaattatgcattcttttctgcgatagcagcctgtgcagcagcaaggcgagcgatcggcacacggaatggtgagcaggatacataatcaagaccaagtttgttgcagaattcaacagagcttggatctccaccgtgctctccacagattcctacgtgcaggtttggatttaccggttttcctaatgcgattgccatatccatgagtttaccaacacctgtctgatccagttttgcaaatggatcgttttcaaagatcttagcatcatagtaagcatccaggaattttcctgcatcatcacgagagaatccgaatgtcatctgtgtcaggtcgtttgtaccgaagcagaagaagtcagcttctttcgcgatctcatcagctgtaagagcagctcttgggatctcgatcattgtaccaacttcgtatttcaggtcacttcctgcagcagcgatctcagcgtcagctgtctcaactacgaatttcttcacgtatttaagctctttgatctctccaaccaatggaatcataatctctggttttactgtccagtccggatgcgctttctgtacattgatagctgcacggattacagcttttgtctgcatcttagcaatctccggatatgtaactgccagacggcatccacggtgtcccatcattgggttgaactcatgaagtccatcgatgattgctttgatctgctcaacagttttgccctgagcgtcagccagtttcttgatgtcctcttcctctgtaggaacgaactcatgaagcggtggatcaaggaaacggatagtaaccggatttccttccagtgcctcatacagtgcttcgaagtctccctgctgttccggaaggatcttctcaagtgctgcttctctttcttctacagtctcagaacagatcatctcacggaatgcatcaattctgtttccttcgaagaacatatgctctgtacggcaaagtccgataccttctgctcccagttcgcgagctttcttagcatctgcaggtgtatctgcatttgtacgaactttcattgttctgtatttatcagcccatcccatgattcttccgaattctccagcgattgtagcatcaactgtagggatgattccgtcatagatatttcctgtagatccgtccagagaaattgcatctccttcgtggtattcttttccgtttaatgtgaatttcttgtttgcttcgtccatcacgatgtctccacatccagatacacagcatgtacccattccacgtgcaacaacggcagcgtgagatgtcataccaccacgtactgtcaggataccctgagcagatttcatacctgtgatgtcttccggagatgtctccagacgaacaaggattactttttctcctcttgcagcccactctacagcgtcatctgctgtgaatacaactttaccgcaagcagctcctggagatgctccgagtgcttttgccattggtgttgcagcttttaatgcagcagcatcaaactgtgggtgaagcagagtgtcaaggtttctaggatcgatcatagcaacagcttcttcttctgttctcattccctcatcaacaaggtcacaagcgatctttaaagcagcctgtgctgttctcttaccattacgtgtctgaagcatatacagtttaccatgttctacagtaaactccatatcctgcatatctctgtagtgtttctccagagtattgcatacttctttaaactgagcaaatgcttccgggaatttctgttccatttcggaaatgtgcattggagtacgaactccggcaacaacgtcttctccctgtgcgtttgtcaggaactctccaaagagtccgttctctcctgtagcagggtctcttgtaaatgcaacacctgttccacagtcatctcccatgttaccgaatgccatcatctgtacgttaacagctgttccccatgaatatgggatatcgttgtcacgacggtatacattcgctcttgggttgtcccatgaacggaatacagcttttacagctcccatcaactgctcttttgcgtctgaagggaaatctgtaccgattttttctttatattcagctttgaactgtcctgctaaagtctttaagtcttctgctgtcagttcaacgtcaaggcttacacctttttcttctttcatcttgtcgatgagctcttcgaagtattttttacctacttccataactacgtcagaatacatctgaatgaatcttctgtagcagtcccaagcccagcgtgcatttccagatgcctctgccagagtctcaacaacttcttcgtttaatccaaggttgaggattgtatccatcataccaggcatagaagctcttgctccggaacgtacggaaacgagcagcggattttctttatctccgaatttctttcctgtgatttcttccagttttacgattgcatccatgatctgcgccataatctcatcattgatctttctgccatcttcgtaatactgtgtacaagcttctgttgtaactgtgaatccctgtggtaccgggagtcccagacttgtcatttctgcaaggtttgcgccttttccaccgagaaggtttctcattgttgcgttaccttcggtgaacatatacacccattttgttgccatttttcaacgacctcctataatttttttcaaataaatttgcactaagtcgcatataatattttaatggttttgccgaaatacgtcaagacttttgtacataattatgtacaatttttacatctgttttttagttacttttatcattccagctttcatttttcagcatttacaagggtaaatattgaaattcccacctcatttttatacactttgcataataccagtaaacttcattcatgccactctatcaggaacacatgtttctttcgtgccactacaaaagggagatgtcccacacgaacatctccctttttatatcttatttcatatcttttaagaatgcacagtatccgcggtaagcttcatatacatctgccttgcttgaaacttcccaaggggagtgcatgctcagcactgcaacaccgccgtcgatcacttccattccgaagtttgcaagaatataagcgatcgttccgccgccgccggcatcaatcttgcccatctctgtcagctggaacgcaaccttattttcatcaaatacatgtctcaattttgcgatgtattctgcattcgcatcattggaaccaccttttcctctggcacctgtgtgtttgttgagcaccataccttttccaaagaacggattggatctcttgtcataaacgtctgcgtgcatcggatcaaatgcagctcctacgtctgatgagatcattgtagaatttgccatcgcacggcgaagttttaattcagaaaactctccgcacttgtccagaatctctgcaactgcattttcaaagaagcgggactgcattccagttgctccaacgcttccgatctcttctttatccaccaggatgcagcaggatgttcttttcttattctctgtgtgcagcattgccatcagggaagtgaatgcgcagactctgtcatcctgaccgtatccgatcaccatactcttatccagaccgcagtcacgtgcttttcctgccggaacaatctccagctctgcagacatgagatcttctttttccatactatatgtctcttttaacaatttcagaacattcgctgcaactgcatctttttcttcgccgcaaagcggagcacttccaaccaggatatccagagcctctccttcgatcactgtggctgctgttttctccatctgcttagatccgagatgtggcagaagatctgtaattgcaaataccggatcttcttctttttcaccaatcacaacattgacctttgttccatcttttttcactacaactccgtgaattgcaagcggaagtgtcacccactgatattttttgattccgccataatagtgtgtatcaaagtatgcgaatccactttcttcatataatggattctgtttgagatccaaacgaggagagtcaacatgtgctccaagaatgttcattcctttttccagagaatcctctccaatctggaataacacgatggatttccccatccaatccatatatactttatctcctgcctgcagtgtatccttcttatttaagtctacataaccttctttttctgcaatgcggatcacttctgtcacacattctctctctgtttttcctgcatccagaaattttttgtaatctgctgtcagagtatcaagctctgcaagctgtgcatcatcatatatctgccataatgttttttccatagctgttttgattcctttctgttgtctttttccctagtatactatttcctgttccgaaatacaagagactgcctgctttatacataatcaaaatcatccggtccctcaaaccaggatttccgtccctgatgaaggatgatagccagtaccgccacgatcagatatccaattgcaaacggtgaagcaggattgaatccaagtcctgcactgtgaataaatccaaaacacgcaagcacatatcctactactgccgtgattgccactttatgaagctgcttgtcaataatgaacactgtcattgttcctaacagaattccaatgatgattgcgcctgatttcaccgcaggtactccgttccacataacccccgcatccttgatcatctgcgttacttctgcattgtattctgccagtcctgacggcattacctctgtcatataccctgccagtcccacacttcctgtgatctgtgtatacagataatcagcaaccggcggaaccatcgcgattccaactgccgcataatgctttttgtcacagtctttaaaagcctgtgcaaccatgacgatcgcacaccataaaaatgtcactgcacatactgccggcggaaccatgttgcttaagaacgtaaacagaccgaagattcctgccgctcccagtaccagacctgacaccagtgcatatccaacacctgctttggcttttttcaggcctgcatgtccaagccatactgtatttggcacgacacctccgcaaattgcggaaagcatcgtacagattccgtccgcaaactgtgtttctctgacactgtaattatctcccgctgcatttgccgcctctacattgtccatggtctcgataaaattgtagatttccaccggaatcacgatcgtcagataaggagcaacaactgccacaccattgatcagatgctggattccgttaacaggattcggaatatagaaaccgattccgctgaaatctacggttgttcttcccaggcagaatgcataaatgatcccacctacaatcgcaacgacaagcggaggaatctgctttggaaataaatagcctccaaaaataccgaccattgccacaaacaaaatcggaagtccgatcagcggatcgccgaatacatcaaacacaccctgtgttgccatccagataaatccgattcccgccacagttccaaggagcgctgctctcggcagttttttcttcatccatggtccgataaatccacccaaaaactcgactgctccgccgataaagcaggctgccacagcagctgaccatgcaagttctgcatcattcaatgcataatgaagcggcatgatcacgccgtatagcatcacaaacattgccggtgtggaaactccggaaggaagtgccgtaacatccgcacgaccttcttttttggataatcttcttcccatataagcatagtaaactccactacagagcagtccgatagacattcccgggatcacatacccgtatacaattttgtccggccactccagtactcccgaaagtgttgcaatcacgatcaggtaatttacaatattattggtgatggaatatgtcattccaccaatgtcaccgcgctgaaaccacggcactaatgtcttttgttttcccattttcccattcctttatcttctttgtttctctatctggagatttctaccggaataaatgaaaacgttgtgacatcgaacaagcccatatctgtcagtttgatctccggaatcactgccagggacataaaacataatgtcatcaccggttccacatctccacagatgccaagctctgtatatgctttttcatgaatacttgtaagcttttcatctacccactcgccgctttgatcgctcatcagtcctgcgatcggcatcggcatctgttcgatcacctttccttcttttacaaggacaatcccgccttcctgcgcaatcaggctgtttactgcaaattccatctcttcgtcattgactccgaccacgataatattgtgagaatcatgcgcaacagacagtgccacagcaccctctttgattccatatccttttaagaatccgcaagctacattgccggttccctgatgccgttctacaaccgctacttttacaagatcttctttgggatttcttacaaattcaccgttttcatccaactgaatgtgcgctgctgcctttttcgtcacaactcctcccggaagaatctcgatcacattcacttcatcacttgtcaaatgcattttaaacttttctgctgaaaaatcttttacgatcacgcttcctttcacagaagaaatatcgtatggtgcaacctccggcagatactttccgttatctgcagtcagctctcctgcgatccataccttctccacccggaagtctttcaagtcatccagaagcacgacatcggcacggtatcccggtgcgatcgcacctctgtcatgaagccggaagcattccgccgcattcaatgttgccatccggattgctgtcactgcgtccagcccttcttccacacagatcttcaagtgattgtccagatgtccgtcttttaagatcgtctttggctgtctgtcgtctgaacagagcagacatcttctgctgttctccggtgtcactccttttaacagcggtctcaaattatggcaggcagatccctgtctgagcagaatatacataccacgttccagacgcgcttccatctcctccaccgtagaacactcgtggtctgccagaatacctgctgcagaatatgcattcagatcctttccatcaattccaggtccgtgaccatcgatcagtttcccttcctcttttgcagtcatcaacttgtccagtacactctcatctgcctgaataactcccgggaaattcataaattctccaagtccaagaatgccctctctttgaatcggctcttccatctccggcgcattgatctctgctcctgcgtgttcaaacggagttgcaggcacacaggatggcagcatatatttgatatcaagtgctgttccttttgccgcctccatcatataatcgagtcctctgatcccgcagacattgacgatctcgtgaggatctgcgatgatcgtggcagctccatgaggtactaacagtcttccaagctcttccgggctgacataggcagattcaatatgaatatggctgtcaataaatcccggaaccgcatatcttccctgcgcatcaatttctttcacaccctgatactctccgattcctgcgattttatctccgcaaagagcgatatcgcccttctggatctttccggaaaaaacattcactacctgacagttcttgatcaccgtgtctgctgggattcttcccgctgctgtgtcgatcagtttttttaattcttctttcttcataccaatgtcctccttggatttatttttcgtttacttccaaaaccggatcaaatgttgtgagtgcaagatagtcaaccggtcctacatccgtgatcgcgtaatccgggattgccgtgattggcaaaaagaacatgtacatcattggatccggcagatcagatcctaacattctcgctgcctgatcgatcttcttctcctgtgcggcaatgacctctggttcttcatcactgacaattcctccgactggaagaggaaggaattccaaaatttctccgtcggccacaacaacctgaccgccgccctgctcaatcagatagttggctgcgatcgacatatcctctgcgctgactcccatcacgaccagattgttgtcatccggtgctgcagaagatgccatggcacctttctttaatttccatccggaacaaaatgcaagtgatttatttccgtttcttccaaatctctccagaacagataccattgccacgtcctgctccacatccggaagtacgattccgttttcaacttttaaaacaacatcttttctctttctcacaaacggtccttttacatccatggaaagtacttttgcttctccgttctgaacagatgtcttgtattcaaaatcttcttttgttgtcagtttacattttaactcgccttttaacacagagcttctctccggtgctttcagatcatacgtaagcttatggtcttttgccaccatctttccgtttgtcatgacttctttgattccaaatgcttccagatcgtctacaaacaggatatccgcaattcttcccgggcagatggatcctaccatgtgatcaatgcggtatgcttccgcactgttgatcgttgccatctggatcgcagtcatcggtttgactcctgcctggatcgccagacgtaccacattgtccagatgtcctttttccagaacatcacttgctgtcacatcatctgtacagaagctgactcttcttgcaaatgccggatttacctctgtcactgctctgatattctctgccaggaaatgtgttacggaagactcgcggatcagcatgtgcattccttttctcatcttctctacaacttcctcgtggtcgtagctttcatgatccaggcgcactcctgcacacaggtatccgttcagatcattgcctcttgccatcggtgcacatccaaataccggcagacggttcttgaatgcttctgcgattgctcccagtgtgttttcatcctcttcctggataaactctcttactgtctcccatactccgtaacactgcggccatttctgtacctcttcatgtacctcttttgtaaagttaaatgctacagtagactgaggaattgtatatggtgtcttatacggtgctccccagaacactttcagaggactcgcctgtacctccttttgtacttcctgcagtccttccagacctgatacggaaatatattcgtccagaccggaaatcatgcttgtagtccctcttggcacaactgcttttgcatagcttgtaatgctcagcttgctgcactcactgtgaatatgaccatcaatcatacccggcaccagatatctgccctttgcatcgatcacttctgtctcttccccgatatactctttcacatctcccactgctacaatcgtgtctttgtaaactgcgatatctgccggatagatctcctcagacataacattgaccagagttcctcccatgatcacttttgttgcaggtgtctttgcacgtcctgcacgaatcagttccttcagattttctactgttgttctttccattcttttaaatcctcctgttgttttgagtaacaaaaaagatacaccggccagaggctaaacaggtttcccgtcctgcaaatgtatcttgaagaattttcaatattctgttgtcttcaacatatgttcatcatagcacattgttttcaaaatgaaaatataagctgttatgaatatttcctatcattattaagaagcacatcttatatatatatttttttttttttgccagagtagctggagaagtacttctgccaaaaaaactgccgcacaacatgtgcggcagcctcatactaaaactcaaactttttctcaaagtatgctttcagatcttcaatttttacacgttcctgttccattgtatctctgtcacgaacagtcactgcaccatcttcttctgaatcgaaatcataagttacacagaacggtgtaccgatctcatcctgacggcgatagcgttttccgatatttcctctgtcatcaaattcacagttgtaagtcttgctcagttctgcaaacaccttctcagcgccttcattgagctttttagacagcggaagcacaccaatcttgacaggagccagtgccggatggaaatgcagaaccgtacgtgtatctccgccttccagttcttcctcgtcgtatgcgctgcaaaggaatgccagtaccatacggtctgcaccaagagacggctcgatcacgtatgggatatatttttctttcttctcatcatcaaaataagtaagatcctgtttggatacttcctgatgctgtgtcagatcgtagtctgttctgtcagcgattccccacagctctccccatccgaacgggaacaaaaattccacgtcagtagtcgctttgctgtagaatgacaattcttctgcatcatggtcacgataacggacttcgtcgtccttgagtcccagagaactcagccagttcaggcagaagctcttccagtagttaaaccattccagatctgtaccaggttcacagaagaactccagctccatctgctcaaactctcttgtacggaatgtaaagttacccggtgtgatctcattacggaaagattttccgatctgcgcaatcccaaatggaatcttctttcttgatgtacgctgtacattcttaaagtttacaaagattccctgtgctgtctcaggtcttaaatatacgacattctttgcgtcctctgtaacaccctgaaatgtcttgaacatcaggttgaactcacggatctctgtaaagttgtgttttccacaggaaggacatttgatatcatgctcttcaatataagcagacatctgctccttgctccatgcatccacgcttccttccagttcgattccattctcctgtgcgtaatcttcgatcagcttatctgcacggaatctttcattacattctttacaatccatcaacggatcgctgaatccgcccagatgtccggatgcgatccatgtctgtggattcatcaggatcgcgcagtccacacctacattgtacggactttcctgtacgaattttttccaccacgcttttttcacgttgttcttcagttctactccgagatttccataatcccatgtatttgcaagccccccgtaaatttcagaccccgggtaaacaaaacctcttgattttgccagagctacaattttatccattgtcttttctaccataattctttgttcctcacattctttttcatcaactggtaactattataacggcttcatcccgttttttcaagccattcctggattccctgccattttcactcgatttgctacaccaatgtctcaagaatctccagggacttgaaccttttttccacataaagcagacaatatcgttccatgatcccggacagcttttccagtacttccctgctgactgtaaatgtatacagcttctcgatcgtactgatctctatgtactgcatcgtataaagcgtggaattgtccaacgaaatcccgtctgaaatattcctggcacaatctgtacagaccagtccgccttctctggcactgaacaccatctgtccgtcttttttctgacaccggacacactgaaagacctgaggtccctctccattgatacagaacgctttgagttcaaaaatgcggcggatcagcagattcggaatatgcgggctggtcagtgctttcatggtctgatacaaaagctttaacatctcccgttcatcattctgctcttttgtataataattcgcaaactccagaaaataaaacccgtaataagcaccgatcatatcttcccgaagctccgaaaaataatttgtgatcttcacagactggatcgtatgagaggaacgcccctcatacatcgtaaactccccgaaagaaaacggattgactgcacctaccagcggactgtttggtcttctcgcccctctggcaaatgcagaaatctttccctgttcctttgtcagtatcacaacccgtctgtcatactctccaaccggtgccgttgaaagcaccatccctgtcaaaacaatctgattcacctgatctaactcctgcctgttccttctgttcttccaaacagcgactctcgctgctgccactttctgctttgtaagaaagataatctgcaatgcgtcctgttgtcataaactgttcccagtattcttctttcatcggttcacctctttaattgctttctcatctgttccttgttgagtatacaattagggtgtccgattctctcccggatatactatataaaatctgccaaatactacatctcgtcctcgtggtatccgaaattcttcattagaaaatcactgtctctccagtttttctgtacttttacccagagcttcagattcactttacagtccagcatccgctcgatttcatagcgcgccgtacttccgatcttttttagcatactgccctgttttccgatgatgattcctttgtgggaatcccgctcgcagatgatcgtagcatcaatatgcatgactttgttctgcattttcatgcgatcaatcgccactgcgattccatgcgggatttcttcctgcagacaatgaagtgccttttcccggatcagttctgccacaatctgacgctccggctggtctgtcacagtgtcttcatcatagaactgcggaccatacggaagatattttaaaatcactttcaccagttcatccgtgttgtccccgtttctcgcagataccggaacaatctccacaaaatcatactctttgcggtatgcatcgataaacagcagaacttcctctctctttaccatatcaatcttgttgattacaaggatcaccggtgtttttacacgtttcagctgttctatgatgtgcttctccccggctccgataaaggtggacggctctaccagccacagtaccacatctacttcattcaacgcgcgttctgccacatttaccatatattctcccagcttatttttcgccttatgaattcccggcgtgtccacaaatacaatctgcccttcttccgttgtcagaactgtctgaatacggtttctcgtcgtctgcggcttgttggacgtgatcgcgatcttctgcccgatcagctggttcatcaatgtcgattttcccacattgggtcttccgatcagcgtcacaaatcctgatttaaaatcatctctcatcaattttaagttctccttatcctgtgtttcctaaaacaacgtcttcacttccagaaacatctctttttcttcctcgattttttcttcgcttccgatcacacagatctgctctgccttcagcattgcctccactactgctgcaagcgcacggatatcctcctgtgctgcatgcaggatctgactgcgctctgtacggatcatctcctgggatacatgattcatatacagattcatcgagcgatccccttttgcagccggattcatcgggcggtcaatattactgatcgttccaatgatatattttgtcatatcccgttcatcgactgtgaaattcttcagatagtctacaacgccttcgtacacttccattgtctttttcaggttcggatcccgataggagatcagatatccctctccgatccggttaaagttgctcatacatccgtatgcaccgcctttgacacggacattctgccagagataatcataacttaagatcaccttcaaaatctgcaacgcgccatgatactgtgctccatgatcgataaagtttccaactcttgccacatactgcactttggaagacgttttaaagccttcgttgcgttttctgcagtgtaatacacacggcgtctcttccccgtccagttccggatacagtgtatccttgatctcacgaaatgctgcttctataggagtaagtccgtcctctgaggaggtataactgatcatcacattgtccacacggaaaatctgacgggagagctgttttaagttttggatcagctctgcttttttctcttcaaaatgctcttcgatgccacggactacctcatagaatccgatgccgtcggtatcatccttgaatttggacagcggagatccataagacaatgcgcgcagtgcggatgtcgtatgtccggaagactggaaggacatctgcagtctggatttgagcattgccagaatctcttttaaccgtttttcatcatccagtctggattccatcagaatctcacgcatcatcgcaaacagaatcttcatctgcggatacaatgcctttcctttgatctcaaatgttgcacgaaaatccttctcttttgcctttgtcacatccggatataattccagagaagttccgatccctcctgtatgcacattgatctcgttgaacaattctccatacccatagttgttcgtatcaataatcccaagcacgctctgcagaattccggtatatggaagcagctcttccgacacgccggaaagatcaaacatcagagtggcataaccgattccgttcgactcgatttcatgatgcaccagtttgatgccgtcgatttccttttctgtattataaacaggagcgatctcttctgtgatatcttctctgtttaataccggaatctttgccatatcttccggagcatcttctgactcctgatacgcttccagctcttttgtagctgccaccagtctgttaagttcttcctcactcagccccgctttataagctgccagtttttcttccagctctttgtccatccgagctgtccgccctttttccggctttacgatcacgatggagccatgctgattatcaagcagataagtctggatcagtttttcaaaatatccggtagaaatctgttctttcaaatattcaaaggtcgggattgcctgcatatgcataaatggctcgttctcatcatacagccagctgtccatgatctgcaggccgtacatcagtccctttggataatttccaaaatctgcctctctgaagcggaactcgtgatagttgatccctgcctccagagattttttatccattccgtttttcacgatcgactggagtgtctcttcgatcacacggataaatgcctctttctgatcacgactcgcatttttagagacaatagaaaagatcggctgatagattccattgtcataagaacccatgatatcttttccgattcctgcatccaaaagcgcttttttcagcggtgcacccggtgcagagagcagtgcatagtccagaatctgaaacgccagatacagcttttcatccagacttgtcccgatgactttattataagaaagatacgtattatcctcctcagactcctcactggagatcgaatactccatctccagttctctgatctcttcaaacggtttctgatatttgatctcggaatccacttcgatcgcatcaaatgctgacagataattttcatccagccatcttaacttttcttccatgtccatatctccgtaaagatagatatagctgttagacggatgataatatgtcctgtggaaattcaaaaactgctcgtacgtcagctccgggatcacatccggatcaccgccggattcattggcgtaagaagtgtccgggaacagagaattctggatcacacggtccagcacaccttccggagacgaaaacgctcccttcatctcattgtataccacgccattgtactccagctttccatctgccgtatccagtttgtagctccacccttcctgacggaagatttcatcatgctcatagatgttcggataaaatactgcatccatgtatacatgcattaaattctgaaaatccttcgaattacagcttgcaaccggatataatgtcttgtccggataggtcatagcattcaaaaacgtattcagtgatccctttaccagttccacaaacgggtctttcaccggaaaatttttcgagccgcacagcacggaatgttccataatatgaggaactccggtactgtccggagccggtgtgcggaatccgatcgtaaataccttattctcgtcatcattggcaaacagtaagatctttgcctggctttttttatgttttaacaggatcccttttgatttcaggtcagataaatcttcttcccgaattacttcatatgcattcaaatcataaatactcatcttcattcgctcctctgtattctgtaattgcatacaggcattataccattatctgcacaactttaaaaggggcgaactgatttcacgcttgcattcacacttgcagctttacacttgcagtcgctacgatgtctgcacctgttcccgccacattttcaagaagaacatctccgatttctaccggtgcatctgcatgcacatcctttaactgccgaatacagtccatgatcttctcttttgggatttctttctttgtttttaccgaaacacgaggctgcgttcccccggtcacaggcaccgtcgtcgttacgatccgaaccggatgcaaaatctctgcttcggcatattttgcccctctcggacaatgattgccggaaacactgaccacggttttattttctgtcactgctgtgatctgacatcccagagggcagcagatgcatgtcaactctctctctttcatatcacaattcctccatctgcagtctgatttcctttatttccgccactttttcaaacacattctccgggatcaggatttgttccatctctcccggcgctgctgattttttctttttctccaacaccagctctccattgagatatacctgaactttacatgccccgaagactttgttcacccggaatcgaatattcaatcctttctcctgttttctgtgaatctgagacggtactgtgtaacgcacacctccctctgactgaatccggatgaacgtttctgtgccggaatgttctgtcttttgaactgctctctgcgcatactctgcagctgcctttcctgcctgcatggcttcctctgacacaaaatccaccagatcatgtacatgtagcacattgccacaggcaaaaatcccctccacatctgtttccagattttcatccaccaacggaccgtttgtcacaggattcaaactgacctgcgcctgtctggaaagctcattttccggcagcagacccacggacaaaagcaaggtatcacaggcatagaattcttctgttcccggaatcggtcttgcctgtgcatccacctgtgccagtgtaactccctccactcgcttttttccgtgtatttttacaaccgtatggctcaatttcagcggaattccataatcatcaagacactgcacgatatttcgtttcaaacctcccgcatatggcattaattctgcaacgacattgacgtgcgcgccttccagcgtcatcctccgcgccatgatcaggccgatatcaccggaacctaagatcaccacttctcttcccggcagatatccttccatattgaccagacgctgtgccgttcctgctgtataaatgcctgccggacgatatcccggaatatttaaggcgcctcttggacgttctctgcatcccatggcaagtacgatagcatctgcctgtatctgacagattccccgcttgctactcatcgttgtcacaacccgctcttttgtgatatccataaccatggtgtttaatcgatattcaatgtcaagcgcttccacctgttcgataaatctcgccgcatactccggacctgtcagttcttctttgaatgtatgcagcccaaacccattatggatacactgattcaaaataccgccaagtctctcatccctctccaggatcacaatctttttggctcccgcagctctggctgccactgccgctgccagtcctgccggtcctccgccgataatcacaatctcatatcttaccatctttattcctccccacgatcatctcggaacctgctccgtttttcgtaatctcttcctgtctgatcttcaattcccgttccagaatctccattgtcttcggtgtacaaaagcctgcctgacacctgcccattccagctctcgttctgcgcttgattccatccatagtcgttgctcccagaggtctgtgaatggaatctaaaatttcgccctcggaaatcatctcacagcggcagacaattcttccataagccggattttttctgatcagctcatttctctcttttgctgtcaattctgccggatttaaaattcccttcctggttttgcaaaatgcaggattttctttcagatctaatatttttttcgcaagctctgccaccatccttccaattgcaggagcgctggtcagccccggtgattcaattcccgcacagtcaataaatcccggcgcatcttccacttctttgatgataaattcatgtccctcttcatgagcccgaagccccgcaaaccctgtgatcacctgacgaaacggaatctctttgacgctgcgctgcgcttttttgcgaatttcctccattccctgctcagttgtgtctgttccttctttttcttctatatccattgcggtaggtcccaccagcaagtttccatgcacggtcggtgtaacaagcactccttttccaagttttccgggcaaagtaaacaccgtgtggctgacatgccctcctgcagtcttatccaacaggaaatactctccttttcgagccgtaatgtgtatcttcttttcactcaccatattgtggaatacatctgcatacactccggcagcattgacgatcacctttgtctcatacatcgtatcctgtgtacagatccgatatccacctgcaatccgtccctcaatctttttcacttcctgatccaaacaaaactccacaccattttgcgccgcattttctgcaaatgcgatcgttagtccgaaggggcagacaatcccgcctgtcggtgcatacagcgcagcaactgcctcatcagaaatattcggttccaatgcttttaattcctctctgtccaggatctgaagaccttcaaccccgtttcgttttcctctctccagcaattcatttaacttctccacttcgctttcattggtacagactacaagggaaccattcttcttatatgaaaaatccagctcttttgaaagattttccatcatcttattcccttttacgttcaatttcgccattaaagaaccttcttttgcatcaaatcctgcatgaacaatcccactgtttgctttggatgtcccgcagcagatatccgcctctttttccagtacacaaaatcgtccctgataacgagacaattctcttgcaattgccgcaccgcttgctcctgctccgattatgatcacatcatacatgttatttcctcccatacaacacaaaagagcctgacaaacaacacacccttcgatgtgttatccgccagactctcttctctttggcttttctattctgttactattactatatacctttttttccggtattgacaagtgttttttgaaattacagacaattttctatgataactcttcttttgcccatccatgtgcgtactgcacagcttttttccatcctttgagcattttctgctgtttttcgatttcaatgtctggctggaacaccctgtcaatgtcccagttctgttttacatcttccttatccttccagtatcccactgccagacctgccagataagcagctcccatggcagtcgtctccacacacttcggcctgtgcaccggcgcccggctgatatctgcctgtgtctgcatcaggaaattattggcacttgcaccgccatccactttcagcgcagaaagagcgattccggaatctgctcccattgcttccagcacatcatttacctgataagcgagtgattccagtgtggcgcgaataatgtgatctttgttcacgcccctggtcagtcccacgatcgttcctctggcatactgatcccaataaggtgctccaagcccggtaaatgcaggaaccacatagcagccattggtatcctccactttctgtgcaagatattctgtatctgacgctgaatcaatcagacgcagctcatcccgcagccactgaatcgcagcacctgccacaaacacggagccttccagtgcataattaacttttccttccatcccccaggcaatggtagtgaccagaccattctcggaaaagaccggtttttcgccggtgttcatcagcaggaaacatccggttccgtacgtgttcttcgcctctccctcttcgaaacaggtctgtccaaacagcgctgcctgctgatctcctgccgctcctgcaattggaatccttcctacgaaaaatccgggatctgcttctccgtaaacagcactgctcggctttgcctggggcagcatgcattttggaatatccagctcttccaaaatctcatcatcccactccagcgtattgatattaaacaacatcgtccgggatgcattggaataatctgtgacatgcaccgccccctttgtcagcttccagatcagccaggtctccactgtaccaaacagtaattctccccgttttgcccgttctcttgcaccttccacatggtctaagatccacttcactttcgttccggaaaaataagcgtcgatcacaagcccggtcttcttctgaaacatctctgtcagccctttatctttcaggctgtcacagtactccgaagttcttctgcactgccagacaatcgcattatacaccggttttcctgtattcttgtcccacacgattgctgtctctctctggttcgtaattccgatcgccgcaatatctgctgccgatgcattaatctgattcattgcctgtctcgctacagaaagctgtgtagaccagatttccctcggatcatgctccacccagcccggttttggaaaatactgcgtaaactctttctgtgccatactgcagatttcccctttttcattgaacaaaatgcaccggttgctggttgttcccgcatccagtgccattacatattttgccatttttatgccctccattataatttccagacatcctgattggtcgaagaaaccgcgatcgcccctactgacagtgctgcgatcacatcctctttttctgtgatgagcccgccggcgatcatgggaatcctgctcacttttgcgattcttccaagtacttttggcatcactcccggaagcacctcaataaaatccggtctcgatgtcccacactgcatttccagattttcgatatttttgagtgccagtgaatcaatcacaaaaaagcgaagtaccgcaaaaatccccagttcttttgcccgccgcaccagtgccggttttgtcgtgatgatcccgtcagctcttgtctgcctggcgataaattccacggatatctcttttgcactgagtcccgcgatcagatcgatatgtaccattgccttttttcccgcagctttgattctctccagaatctccggaatcgtacagacatctccataaagcacaaagatcacctgaatttcttccatctctactgccgcctgtaatccggcatcactttttactgcggcaatgaccggatttgcttctactgcatcataaaactcctgattcatcgctcacctctgtatgtctttcgtttttccttattttaacactctggctgtaggaaagcaacagaatgtctatttttcatccactcatatcctgtgttaacttttacaagaaaagcctggaaatcatttacacattttgttgctgattcctgtagtatatcttataattattttagtaagttttctatacaagaatacacgcaatacttttagtagatagggaataccatgaaaaaattgttaccattattacttttcatttttttattaatcataacaggggcttcgctactgagtaaagaaaatagcggaacatcaaagaaaaatagagttttcttattttaatagtaccccaactgatcagtcgactttagaagtatatttaattgacaaactggaaaaataaattatataccgttttgcaattataggttacagaatttttattactctgtaaacaaatctctatcaataagataaaaaatgctgctccctttctgttcaagggatacagcattttttctttttctgtgatcttttatgaatttttatgcttcacttttcttttctgcagattccacaaccggcgcatacacataattctttttgaatctgcgctttcttgtgatccacatcaccagggaaagtacaaacaatgctccaaatacgatcagcagtgtccttacaacatctaccactaaaaggccggtatctttgatctctgtatcttttccgataccgttcattccgctggaatttgcaattgcatacaggtttctgtgacatgcctctctcattgcgttgacaatgactgcatcatttttatagtctgggagctgctttgtaacatatggaagcatcgcgtcaaatgtagatacacctgctaatactccatccacaccatttacatacgttgtaagtacgttatctgtaatgatcagtccgtcacatccccattcttctctgagaattcctgttacaagcggcttgcttccacctgaccaggtacatccccagcgtgtgtaggcaatcatgacaccgttcgcatttcctttttccacaggagcctggaatgccttaagataaatttctctggctgcctgctcattcacccagactccaagaccgattcgatcctgctcactgtcattgagtgcaaagtgtttcataacaacaccaacacctttttcttcgattgctgccacttcatatgctgacatttctccagaaaggaatccgtcttcactgtaatactcaaagttacgtccaccataaggtgtcctgtgaatattatttcccggtccgtaaaggattgaaacgcctgctttcagacagttgtttccaattacctttccaatttctgtcatcagatcgcggttgaatgttgctgccattacgtcctccgatgtaaatgcagttgcatccatctctgtcttatccgatgcgatcagagaagctgtcagaccctgcggaccattctcatctcttgttcccggtgcctgtacagattccaaaggcattgtccagtggaaggaatctccgatcagagaaaccatatctttaaagctcagctgatctaacagctcgtcccatgcttcatcgtcataggaaagcccgatcatatcaaccagttttttgccgtttttcgctttcattgtcggcatctttgcttcttcataatcatctggatcatactgtacatcctgcagatcttcgatcatctgctctgtcagcttcattttcaggatggactgcggaagtgttccttcccagtcatttctggatacatatgtaatctcatcttctgttcctccatacagattgatatctgcatcagaaagctgatttttgatttctgttccgtttgcggaaactgcatatgttgtgctgtcaaatttcggattgttgtatttgtatgtcagactggaatttccgtctgtatccatacgtccgtctgtgttgtctactgtgtatccctttgctgcaagaatattgttcactgcattatgggcatctgttgcaactgtcagataatagtccccttcatccagaatataagttcctgctccatatgtatcataagaagccagttctcttctatctactgtcatattcagcgtctcagatgctcccggtgcaaggatttctgtttttccaaatccacacaatgcaacggaagatttttctacaccattctcaatgtcatatgctgtatatggagactggaagtaaacctgaacagtttcttttccagaatactcttttcctgtatttgttacttttacagagacttcaaatacatctttttctttgttgtaagaaactttcaaatcactgtatttaaaatcggtataactcataccatatccgaatggatatgccacgtcatcatgatattcgtacgctcctgagtttccagactgcatcacataatcttcataacgtgtctcataatatttgtatcctacgtaaataccttcctgatagatcatgtatgtttttgcatgttccggaatgattccttcttcatatccttcatacactgtcggcacaaagttcatcattgccggtgcagagaagttgtcatacagataggtatccaccaggcttcctgaaggtgtcacatttcctgcaagaatctctgccactgcattgattcctgaaattccaacatccccgatccacatacatgcatccacgtcatattcattatttttcagaaaatctacctgaagtgtatttgccgagttgatcagaacaacaatcttcttcacttgaccggcttttttcatttctgcaacgttctgaagcatttctttttcattgtcatcaagtgccagataatttgtctctttgaaatccagatctgcaccctctccaccaatacgggacaataccacaattgctgcatctccataggatgcgacagaatcttttacatcatctgtatacacattccacggaacctctgttgtcttttccccttcttctgcaaccatacctgcagtttttctggcgtacttgcttccttctcctttactatagaagttccagagttttttattgacctcaaatccacttttttcaagtgctgtcttcaatgtatctgccgaagatgcatcgatattaccggaaccggtacctccgtaaaccaggtttacagaagagtttgaaaagcagcttaccttcgcgcctttctccagcggaagtgcgttattttcattcatcagaagtgctgcaccctcttcttctactgtttcacagagctccagaccatactgattcatttctgaatattcctgtgcggcaacaccgcaaatccg

SEQ ID NO: 7007 - DNA, 11376 bp, Unknown
  gut microbiota DNA sequence
gggaatcgctttttaaagcaatccgcacgggaatggattggctttttcagggaaatatggattggatcacacttatggcaatctttctgttttttttccttgcatggacctgtgtgatcgcaaccggatttctggcagttattgtatccagaacggtgttgatcaattccagatttgcgggcattgtttcattcattttgttctttgcgatcaatgcaattgtggaatatatttacgatctgtttgccaaatacggacttatgggaatccatagcggactctatataggaattggagaatgcgcattttatattgttgcatgcattatactatttgtgatttccagtgttctggctgaaaagaaattaagtgtataaaatatggaaggtacagtctgttaaatcggattgtatcttcttttttaatttcacaactgtcttgtcacatgtaaagtcttgtgctataattgtcagcaattaacgataaaaatttaacaattcaagataagtgagggaatacaatatgacagttgtggaagaaatccagaaattaaaacaggaaaaaaatgcagttattctggcacattattatgtgagaccggagattcaggacattgcggactacatcggagattctttttatctgagtaaggttgcagttggattgaaagagcagaccatcgtattctgtggcgtgtctttcatgggagagagtgcgaaggtactgaacccggagaaaacagttctgatgccggatatgcatgcagactgtgcaatggcacatatggcagatgccaaaaccattcagaaaatgcgggatacatatgaagatctggcggttgtatgctacatcaattctacagcagagctgaaaacacattctgatgtgtgcgttacatcagcaaatgcggtgaagatcgtaaaagcacttccgaacaagaacattttctttattccggacaagaacctggcacattttattgcagagcaggtaccggaaaagaattttgtatacaacgagggatactgtccgattcacgaacacatgcagattgaggagatcaaagcagcgaaagcacagcacccggcagcagaggtactggcgcatccggaatgtccaaaggcagtgcttgcaatttccgattatgtaggaagtacttccggaatcatcgactacgcaacgaaaagtgagaaacaagagtttatcatctgtaccgaaaacggcgtccgctacaagctggaaaaagacaatccggataagaaattttattttacagagacagagcctgtctgtatggatatgaagctgatcacactggaaaaggttcttcacgtcttaaaaacaggagagaatgaagttcatttgagtgaggaattgagaactgactccagaaaaccattggaaaaaatgctggagctggcaaaatagagtgtctttcataaaaagagaggcctgccgaaaggaaagagagtattatgaataaaaaagcagatgttgttatcgttggaacaggtgttgcagggctgttttctgcattgaatcttccggatgacaaagaaatcatcatgatcacgaaatcagatgccgagagcagtgactcatttctggcacagggcggaatctgtgtactccgggatgaacaggattatgacagttattttgaagatacgatgagagccggtcattatgaaaaccggaaagaatctgtcgatattatgatccgcagttctggaaaaatcattgaagatctggtaggatatggagtagaatttgaaaaggacggagaagcgtttgcctacacaagagagggggcacactccagaccgagaattctgtttcatgcagatgtgacaggaaaagagatcaccagtaagctgttggcgcgggtaagggaaaagaataacgtaacaatttacgaatatacgaccatgacagacattcttgaggaaaacggaaaatgtgcgggaatcaccgtgaagacgaaaagtggtgaagagtcctctatttatgcagattataccattctggcaagtggaggaatcggcgggctgtaccagcattccacaaatttccctcatctgacaggagatgcactggaagtagcgaaaaaacatcacattcgtctggagcatctggattatgtacagatccatccgactacattgtattcggaaaagccgggcagacgattcctgatctccgaatccgtccgtggggaaggcgcacttctctataataaaaacatggagcgtttcgtagatgaactgcttccgcgagacgtggtgacaaaggcaatccgggaacagatggaaaaggatgaaacgaattttgtgtggctgtccatggcgccgatcgagaaagagacgatattgagtcattttccgaatatttacgagcattgcctggaggaaggctatgatgttacaaaagagtgcattccggtcgttccggcgcagcactattttatgggcggtatctgggtagacaagaacagccacacgtccatgccgcagctgtttgcagtgggagagacaagctgcaacggtgtgcacggagcgaaccgtctggcaagcaactctcttctggagagtcttgtatttgcaaaaagggcggcaaatcttatcaaagagcaatggtgtctggaaaaagaacaggctgtataaaatgaaagaatagatgaaaaataaaggagaaaccagatgaatcagattacaatgaagcttcaggcagatcacctgatcttagaagcgttaaaagaagacatttccagtgaagatgtgacaaccaattcagtgatgaaagaggcagtggcaggtgaagtagacctgatctgcaaacaggatggaattattgccggactggaagtgttcgagagagtgtttacccttctggatcccgacacgaaggtagagttatattacaaagacggagaagaagtgaaaaacgggcagctgatgggaaaagtcaaaggagacatccgtgtccttctttccggagaacgagttgcgctcaactatcttcagagaatgagcggaattgcgacctataccaattctgttgcaaaacttctggaaagaagcaagatcaaactcctcgatacaagaaaaacaacaccgaatatgcgtatttttgagaaatatgcagttcgtgcaggcggcggatacaaccaccgttacaacctttctgacggtgtgctgttaaaagataaccacatcggagcagcaggaagtgtgaccaaagcggtgcagatggcaaaagagtatgcaccgtttgtaagaaaaattgaagtagaagtagaaaatctggacatggtaaaagaagcggtggaagccggcgcagatatcatcatgctggataatatgtcaccggaggatatgaaaaaagcagtggagttgatcgacggaagagcccagacagagtgctccggaaatgtgacaaaagaaaatatcgcgcgtctgacagagatcggagttgactatatttccagcggtgcgttgacacactccgctccgatcctggatatttctttaaagaatctgcatgcagtggaataaagatgcagaaaaagaaagagaggaacagtatttatgacaggttctgaacgcagagatcaaatcataaatcagattaaaaaaagcagtattccggtatctggggcgcagcttgcaaaagaatttgatgtcagccggcaggtgatcgtgcaggatatcgcactgatccgggcagcgggacatgagatcatatccacaaacaggggatatcttctgaatactccacattccgtgaaccggatcttcaaagtgaatcacacggatgaagagttggaagacgagctgtgtacggtagtggatctgggcggaaaagtggtgaacgtgatggtcaatcacagggtgtacggtcacatggaggcagagattaacatcacatccagacgaaaagtgatggaatttgtagaggatattaagcggggaaaatcaagtcctctgaaaaatattacctccaattatcactatcatctgatcgaggcagattccgaagagacactggatctgatcgaagaggcattacggcagaaaaaatttctggtcgaagtggccgctggatcgtaataagacaaatttttaaaaggtgcaatcttgacttatcattccggctgtgatacgattttcaacgagaaagtgtgtattttatacacatatctggtagaaaaatcatacggaaaatgcaaagacggagagagtaggttatccgaaattttacagagaattcccggaagatccgagaaaggatccgatgctgagagggatgaacggaagatgatcgaacatggctcccgagcggcgcagcaagcatgatgtgaactgcgatgggttcgccctttacagcgagagagtgtttttggcagcactcacagaggtttcagccgtgaggctgagataaatcagaagtggtaacacggtattcacccgtcttcttggcagcaggaagacgggattttttatgaaggagagaagagagatggcagacaagaaaccatattatatcacaacagcgattgcctacacatcaggcaaaccgcatattggaaacacttatgagattattctggctgacgcgatcgcaagatacaagagaagtcagggatatgatgtatttttccagacaggaaccgatgagcatggtcagaagatcgagctcaaagcagaagaggcgggagtaacaccaaaagaattcgtagacaatgtttccggagaaatcaagaaaatctgggatctgatggatacttcttatgacaaatttatccgtacaacagacgaagatcatgaaaaacaggtacagaagatctttaaaaaactgtacgatcagggagatatttacaaagggcactatgaaggaatgtactgtactccatgtgaatctttcttcacagaatcacagcttgtagacggcaaatgtccggactgcggacgtgaagtacagcctgcgaaagaagaagcatacttctttaaaatgagcaaatatgcagacagactgatcgagcatatcaacacacatccggaattcattcagccggtatcccgtaaaaacgagatgatgaacaacttcctgcttccgggactgcaggatctgtgtgtttccagaacatcattcaaatggggaatcccggtagacttcgatccgaaacatgtaacttacgtatggctggatgcgcttacaaactatatcacaggaatcggatacgactgcgatggaaacagcacggagcagtttcacaaattatggccggcagatctgcatctgatcggaaaagatatcattcgcttccatacaatttactggccaatctttttgatggcactggatcttccgcttccaaaacaggtattcggacatccatggctgcttcagggagacggaaaaatgagtaaatccaaaggaaacgtcctttacgcagatgaactggtagatttcttcggcgttgatgcagttcgttactttgttcttcatgagatgccatttgaaaatgatggagttatcacatgggaactgatggtagagcgcatgaattctgatcttgccaacacactgggaaatctggtcaacagaactgtttccatgacaaataaatatttcagcggaactgtaacagacaaaggtgtggcagaagaggttgatgcagatctgaaggcagtgacagaaagcacaccaaaagcagtcgaagacaagatggaagagctgcgtgtggcagatgcaatgacagaaattttcaatctcttcaaacgctgcaacaaatacattgacgagacaatgccatgggtactggcaaaagatgaagcgaaaaaagaccgtctggaaacagttctctggaacctcattcagagcatttcccgcggtgcagaacttctggaatccttcatgccatccaccagcaaaaagattctggagcagctcggaaatggtcatgtaacagaaaaaccggaaatcctcttcgcaagactggatctggaagaagttctgaaaaaagtagaagagctgcatccaccggttgaagaagaaaaagaagaggaagatgtgatcgatatcgaagcaaaaccagagatcacatttgacgattttggaaaaatgcagttccaggtcggagagatcattgcctgcgaagaagtgaaaaaatccagaaaactcctttgctcacaggtgaagatcgggagccaggtaaaacagatcgtatccggaatcaaaggtcattacacagccgaagaaatggttggaaagaaagtcatggttctcgtgaatctgaaacctgcaaaactggcaggcgtattatcagaaggaatgctgttatgcgcagaagatgcagaaggcaaccttgcactgatgacaccggaaaaatcaatgccggcaggagctgaaatctgttaagaaaatagagaaaatgaatagatcccccggatttcaggagaaagaagcctgagatccgggggatatgcttttgtaaaagttatttagctttttcaatccattgttttacaacttcaatatcaatcccggtcagttgagtaatttcctccggggagttgccggaatgaagcatatggagaacaatttctttttgtccaagattaatgccctcctcaataccctctttatactggttttttaagtcttcttcataagccttttgattaaacgatgtcagaaccatactgattacctccgctttatgtttcaccagtacatcccgaagaattcccttttcaatacagatgtccaccgctttcgtgacagcgtgcttcggatcactcgttttcttacattggatccttaccgtatctacaaaaatagaatactctttcagccgctggcatttttccataagcgcaaggttatgtccgtaattgatattcagcatcactgcggtacactgcagacaaggctgccgattatcggatacagattcaaatgcatctgtcaatcgaagaatcgtctcatccggttgttcttttgtgccgttatagaacacaaagtattgaggaatcggcaacttttttagagtgctgctgtataaattgatgttttccgtctcgacgtatccatcatacaacctggcgagatagatcagtccgcgcaatggcatatttggattatacgtgctctgatgctcatagagattcagtgtcccgccgatcaggaatgaaatatcatttttcatagagagataaacagcgtcctccagtgtattaacttcaagatcattcggattttcatagcaggtattattcaatgcattgtatagatccaaaagatccttcttgttattgaaaaccagacgaaaaagccgatccttatatttgtgattcgggacagggtgtttctggtgatttctttttttattttttctcatgtactttcctccattataaaaaacttatcctgtagatgcaatcttcttattcttgtgttcggttaaaaataactgaaaatctggcgaaacgccgaaaaacagacagcttctaaaagaaagaagccaatgctgtacagacgacagctaaaaagtaaattcattatatccggttcggattataataacaatacgcagattatacaaaataaatattcagaaaattctgataaaaagtaataatttaaaaatcatttcgataaaatataaaaaagtgtgttgacaactaaaagggatagtgttattattaagtcaatccaaaagagatacaacaatcacacatctcaaaaggatatttaactaaagagcgattcttaatttagtaagtagtcgttctgttagattaaaaataaacgaactaaggaggcagaggtccaatggacagtatatcatcagttacatttcaatatgtcagtggtacggtagatgcaggttcctgtaaaagagacctttaccacgaaagataagatccagtaaaagtgaatgaaaagatcaaatcgaagagattgtaaagctggatgaaaatgaaaagattcgacatctacagacgtattgaatatagataccacatgtagccaaagttcccgaacatgtgtaaagaaacatggataaggaatatcagttttatatgaagtaccgccagttatagaaagaataatcaaataggatgttggaatatcgtcagatgatactgcagtagccgaaaggttatagagagaataactgaagagaggactttcatgataggatgataccgataccgagtcggatttaggttatagatattgttaaattgaagaacaggaggtttcatataagccagtcttagtggacagactgctatatcaattaacataggtagaggtcttgcaggaacagaatcgagatagttccttcgatttataaaataaaatatgaaaaatttgaataaaaagtaaaatgcatcttcaatgtcaattgagggtgcatttttttgacattacgggagtcatatggtaaactagaacaaactaggcaatgaagagaaagatacctgtaaggtacagactaagtataatgaggtgagcatagtggacaagtatgaatataagttgaagacagaacagatgctaaaacttatggaaaacggtgcatacaacagagccgctgagattgctgacagcattgattggaagcgtgtcagaaatgtaaatatgctgttaaacgtcagcaatatatatgaaaagatcagagattaccgtaagagttttggagttctgagagctgcctatcatagaacagaggggagcagaaagatattatatcgcttgtgcactcttgcgataaaggttggaaatctggaagaggcaatcgactattatgatgaatacgtacaggctgcgccaaaagatccgaatcagtacatcctaagataccgcctgttgagagcacgaagagctccgatcgagcagcagatccgtgcattggagcagttcaaaaaagcagagtatgtcgaagagtgggcatacgagctggccaagagatatgaagaagccgggatgacagccgaatgtctggaagagtgtgatgatctgattctgtggttcagcgaaggcaagtatgtatacaaggccatggaactgaagatgcgatacaagccattgactccactgcagcaggaaaagtatgacagaaggctggaagaagcagaaaaatcttcagaaagagaagcggaaaaactgatcgatctgggcagaataaaagctgagaaagaagaaaagcggagaagagagcaggaagaagctgcccgctatacagaggatatgctggagcgttcagaacagatcgcagagccggagaatgccgaactcagtgaggaggaagtggcagagcagctgaaaaaagcggagccgccgaagaagaagctgggtgatacgatgaagcttggcgaggcgcttcagaatctgttccatacagaaaaagaagaagcgcaggagcaggaagagctggaactttcagaagaggatgcggaagagtacgaagaagacatcgaggaattgacagaagaggacgcagaaccggtggaaggtgatgacgaggagagtacaggggaagatgattgctcagatctggcagaagcactggaagagattgagtcattatcagatctggaattgctggatcaagtggcagaggaagaagtgatcgaagaacctgtagaagagatcgttgaggagacgatcgagacgaaagttaaggaagttgatctgaaagaattagaagagctggcagaaccggaagcggcagatgcagcagatgtggaagtaatcgaggaacctgaagtagcagaagaggctgagaaggaagatatggaaaaagaatctattaaattagaagaaacagaaatcaaagaggatgagagaatagacgagccggttgacgatatacttgatattgatgatattcttgctgagtgggaagccgcagagggcggtgttgaaccggaggaagttccagaagtgaatgaagaggatgtagagcagatcgagcgcaagccaaagagcccgatcttatccccggatattcagaggatgatcgatgagatcgaaggtgtgatcccggaagaagagagtgaggagattccggtacacacgagtactcctgttgaacctcttgaaaacaaggaggaatcaacagaagagcttagaatggaatcagaagagctgactttggaggttgacaacgcagaagattatgaagaccttctgacggaagacgcggcagaggagctggaagaggaattcgaagaagaactggattacgatgatgattatgaggacgattacgaatcgattgcagcagggctgcaggaagagttcaagccgacgctgagtgatgaaccggacgatcgtgagatcccggatgaagagcctgttgaatcggatattctgagttctacgacaccgctgagcagaaaagagactgcgaagctgattgcgacaggaaagactgcaccgcttccgatggatgagattgcagatgcattatcgatttccgatacaggatttttggtacacagccgctatgatctgtccggacagggtgcaaaaagagcagggctgacagaagagcagaagaagctgttctcctactttgttccggtgcgcggcatgagcgagcagctggtggatgttctggagcaggaccgcaattgtacgaacagaagaggtacatccaatacaggtaacttgctgatcgttggaaacaaaggcaacggaaagacggttcttgcggttgatgtggtcaaagcgatccagaagcagagaaagatccgtcagggaagagttgcgatcatcaccggagaagcactgaataagaagaagatcagtgatatcattgctaagctgtacggcggagcactgatcattgaaaaagcaggaaaattaagcgaaagaacggttgcgaagctgaacaaagcgatggaaaaagataccggagagatgctgatcgtgctggaagagcagagaaagccgcttgaccgtatactttcctcaaacagagagttcagaaagaaatttacgagcagactggaagtgccgatctttgtaaatgatgagctggttacatttggtcagacttacgcacaggagaatggatatcgtatcgatgagatgggaatcctggcgctgtacagccggatcgatgcgatgcagagagaagatcacgcagtgacagttgcggaagtaaaagacattatggacgaggcgatgtcgcattcccagaaggtatctgcaaagaaacttgtaaaacgggtacttggaaagaatacagacgatgcagacagaattattctgacagaaaaagattttaatatttagaattaggagatattgtgaagtagaagaatctacggaagcaaaagggatccacgtacattg

SEQ ID NO: 7008 - DNA, 17429 bp, Unknown
  gut microbiota DNA sequence
ccatcgctcaacggataaaagctaccctggggataacaggcttatcactcccaagagttcacatcgacggagtggtttggcacctcgatgtcggctcatcgcatcctggggctgaagtaggtcccaagggttgggctgttcgcccattaaagcggtacgcgagctgggttcagaacgtcgtgagacagttcggtccctatccggcgtgggcgtaggatatttgagaggagctgcccttagtacgagaggaccggggtggactggccgctggtggatctgttgtattaccaaatgcatagcagagtagccaagccgggacgggataaacgctgaaggcatctaagcgtgaagcccccctcaagatgagatatcccataacgtcaagttagtaagaccccttgaagacgacgaggtagatagggcagaggtggaagtgcggtaacgcatggagctgactgttactaataggtcgagggcataaccaagcaaggtgataggaaatggatgattctttgtatgcagttttgaaggtacaggaaatacagatggaatgagaggcagcaccggttggtgttgtttttttctatatgtaaatctacggaagcacaaaaggagtattacagaagatgagagaaaaaggaaaccgtctggttcaatatgtaccggattatacggtatttgatctggaaacgacaggtatcagtgcaaatatggatgatattatagaaatatcggcagtaaaggtgaaaggtggaattgtgcaggatacattttctacattggtgaatcctgggagacacattccggcacaggctacgaaagtaaatggaattacagatcaaatggtgtcagaagcgccattgatccgcgaagcaatgacggagtttttgcgttttgtaggagaggatattctggtgggacataatatccagtcatttgatatgaaatttatttatcgggaagtggaagaattatttcaggagacagtctcgaatgactttattgacaccttgtatatggcaagaaaatgtcttcctgaattgaaacatcatcgattgacagatctcgctgagcattttggaatcagttctaaaggggcgcaccgggctttgaatgactgtgtgatgaatcagaagtgttttgaggaaatggcaaagcttcagaaaaaatcagtagtgtttgtttgcccgaaatgtggtggagagatgattcgaagaaatggaagatatggggaattctggggatgtggaaattttccgaagtgcagatatacacagaatatataagtaaaatcctgctgggagtcattatgaaactctcagcaggattttcttagatggaatgttattcttcaaatacaatttcaacttgttttacaatgcggtctttgatcatatcgtaggaataaccactctcccggaaagattgttgaaattcttcatattcgggttgattgttaacatcctggtccgggttcacaggaagtttaaaatagcaaatttgaattttagaaacatcatgatcttgaattgcaataagtccggttttatctgtcatatgatttccatttgcatcgtaaacagcatagccatattgttcaaatggtgataacagtgtgtcagtactactttgttccacttcttcgttatctttggattcttcattacctttggattccagagaaattgtagtcagtgtttttgtggcggagatcaaagtagttccatttggcagtttttcgttcagtaatttttttacagtaccgtctgattggacaggagtttcaatctgaaattcaagtggttcggaaaaatagatatacatatttccgtttttagcttcctcgggactatattgaattccagaaattttccattctgcgttatacgtatcttttgaggtgttttctccaagtatctgatgaaacgaaccgataaatgtgtgatcgtcagaaaatgttccagagagggaaactccttgtgtgtaagaattctcaggaaagctggaatcggtccattttcccatcagataaagggaagaaataccatctggatccacttgtgctcgttggctttctggaaaaccttcttcagatgtaatctggacactgacataaaagttctgtgtatcacaatatgtctcggataatgtgaatgtgtatccgtcagatttctgtgagttattattggccagaggcgtagcgtgagtgtgcaggtctccggaaaagatttgtttgttttctatcttttcaaataggtgtaaaaggtctgctgcaagtgatggattagagtgtaaaaatatagcgctcaagcagaagaaaaaagcagcagcacaaaataatcctgcggtatggcgaatcatttgtttacgatgaataccgtgtactttttttatgttgttttgaattgttcgattgagtttttcttccgggatttcaatggtatcaaaatcaagattcatagagatagtcctcctttaatttttgttttaattcatttcttccacgactcaggtatgctttgacagaaccagatggaatactgagtgtccaggcaatctcatcgactgtcataccactgaagtattttagtaaaataggaatgcggtatttatcaggaagtgtttcgatagcggtttgcaggtcaaaatgttcgacagatggaatctgttgatttgctgtggaagcatgtgcagaatctatagcggaatcctcctgtgaaagtgtgcttagggcttttctacgatgatcatgagctgtgttgatcagcactcgtgtaatccatgtctgaaacagagacgcgtttttcagcgtttttatctgcagataccctttgagtactgtgtcacctacaacatctaaagcatcctgttcattttttgtatatagaaaagccattttgtacagataggtacggtgtttttcaatcaagtatccataggcagtggaattgccacggattgcttttttaattagttttatatcatctgtgtctttactcatcatataaacagtatcctttctaatacagaagcgccggcagcttttgtatttgtttacataggttagacagaaattgagagaaaatggttacaaaaaaacagaaactgccgtaaattgacaacagtttctgctttagaggatcaacccttacaattcaataaatccgcttttatcttctccgtatgtaaaatatgcttttttgtcctccggttttaagtagatcgagattgtattcagctcatcagaagaagcaccgtttaagagacaagactctttgactctggagataatttctgtttccagatattcctgatcctgatattgaataaaaaagtttatggtttctttggatgcagatgtctcagcaataggggattcaattgctgtggtctgccttttcagttttttcttatccagacgtttactcatatgacaaagccctcttctcatttagtttctatattgaattatagtactttcgaagatagaagtcaaaaggggattgggatttacggttactgtgaacagcaacgagttatgaattcagctgccgcaacatttccagaagttcgatatcatctgattttaacttcaggttggaagaatagtgcttgccgtccggagaagttacattgatttctatgatcgtatcttcctttaatgcgtctgcagaaactgcattcagaaagagtggaaatttagggtgattgtttcgaaatgtctggacactgctgcgaagcttctgaagcattgccagttgattaaaatttaatgccatgttagtactcctttagtttttcttatcatagcctagtttatgcagaatggcaagagtgatgctaaaaatgagaaatattatatataattaaaaaaattaaaaaaatttgaaaaaaggggttgcattttatgaagccgtgtgatattataattcttgtcttgagggacacaaaaaaacaaagaaacatgcgggtgtagttcaatggtagaacaccagccttccaagctggatacgtgggttcgattcccatcacccgcttttttcatgcaaacaggacgaaaacaaaaatggagttgtttttgtcctgtttttttgtatagaaatatataacaagggcagagaagatggcagttactttcgcttcccggaggtttttctacatttttcggaaagaagtgtttcatgccatagaatggcatgttataatagtagaaaaataatagaaaagagagcagaaaaatgaactggatagacaatggggtaacacgttttttagggaaagtagcagattttatgtttttaaatcttttgtggatcgtatgttccattcccatcattacgattggagcttccacgacagcaatgtattcggtcatgctgaagctggtaaagaatgaagagggctacatagtaaaagggttcttaaaagcatttaaggagaatttcagacaaagcacactgatgtggcttttgtatcttgtgtttgggatcgtgattgtagtcgactttatgctgcttcgtatgatgagtccgtccatcaggactgtgatgcaggtatttttgatcttcatgactatcctgctgatcagcatggggatctatggatttgcgttgcaggcaagatatgaaaatcggatcaagaacacattgaaaaatgcattgatccttacggttgcaaaaatgccatatacacttttgatgctggtcattacagtagtaccggtagttgtgacatttctgacagtgcgcacgttgatgttaggttttctggtctggctgttacttggtgtttctttgatagtgtggcttaattcgctgcttttaagaagggtatttctggtttttgaggatatcgagacatcggaaaaagcggagaagatataagccatataaaacttgttgtttttcagagaaaaaacaggtataatggggaacaaaatcaaaaagtgattgggagaagcagaagatgaattttttagaagaacgaattttaaaagacgggattatcaaagaggggaatgtactgaaggtggacagctttttgaaccatcagatggacattgatctgttcaatgagatcggacgcgaattcaagaagcgttttgaaggaaaagagattaacaaaatcctgacaatcgaagcatccggaatcgggatcgcatgtattgcggcgcagcattttcatgtgccggtcgtatttgcaaaaaaatctcagagcatcaatctggaaggggagatgcttgtggcagaggtagaatcgttcacacataagtgtaaaaacaatgtgatcgttgcaaagaaattccttaacccggaagacaaggttctgatcattgatgatttccttgccaacggatgtgcgctgcagggactgattcagattgtacagtcagccggagcttctgtagaaggaatcgggattgtgattgagaagggatttcagtcaggtggacggatcatccgtaaccttggattccagctggagtctctggcaatcattgaaaagatgaatgctgcagacggaagtgttgtgttcagagaacagtagggaacagaaaggacggcaggacagtcagatgagtgagcagccgattaaaggactagtatttgatatggacgggcttctctttgattccgagagagtcgtacagaaatcgtggaatgaagtcggaaggcagatgggattcggagaacggttcggtgaccatatttatcataccattggtttcaatgtagtgagaagagagcagtattttaaggagcatgtatcgccggattttccgatggaagagttcacggagaatacgcgtcggatctatcatcggatcatggaagaagacggggtagacagaaagcccggggcagaggagtttttaaagtatgcaaaagagcatggctatcggctggcactggcgacttcttccagagagcttcatgcacagctgctgttaaagaaatatggactgtttgattatttcgacggcgctgtttatggaaatatggtatcggcggggaagccggatcccgagatttacctgaaagcctgtgcttccattcaggttttgcccgagtttgcaatcgcactggaagatgcaccgtccgggattcgctcggcagcagctgcagggatgcgtccggtgatgattccggatctggtagagccggatgaagcggttttagaattagtatggcgcaggtttgacactttatatgatgtgatagatcttctggaatcggatttccaaaattcttaaacatccttaagaaattcttttgaatcttataacggtctcctttatttttgtattttaagataaatacaaaagtaagggaggccgttttctatgagtatccagacattgacaaattattttcttgaatatggagcatttttcatctttctgatcgtgcttttggaatatctgaatcttccgggatttccggcgggggtgatcatgccgctttccgggatctgggcatctcagggtgaaatcagttttccactggttatggtactgacggtggcggccggactgacaggaagctgggcgctgtattggctgggaagagcaggcggagataaggtgctgggcttttacttcaggaaatttccgaaacaaaaggaagcagtggagagtaagatcgacatgcttcgggaaaagggaagtgtgggagtgtttgtgagtaaactgcttccgatggtgcgtacgatcatttcgattccggcagggatggtaaaaatggattttgtgaaatataccatcagttcctgtctggggattctgatctggaatctggtgtttgtaggagccggatatttctttggagaagcagccattcgtgttttggcatagaagagggggaaacgtcatgaagattgcgatgcttacaaataactataagccgtttgtcggcggagttccaatttccgtggagcggctggcaaaagaattgagaaaacagggacacaaggtgacggtcttcgcaccagattatggatttgatccacgctacgggcaggtggaagaggacgatgtcatccggtttcaggtgacgcgtcagaagatggaaaacggcatggtatatccgaagctggtcagcagagaaatctggaaaggatttaaggaacacgagtttgactgcattcatgtgcatcagccgatgtttgtgggaacgcaggcattgtatcttggacggaagtatcagatcccggttatttatacgtatcacacacggtatgaagactacctgcattatattccgtttttcagagaagagcaggcagggatgtggagaaaaaagctgatctggtttgccaaagagactgtgatcccgggatatatgaaatggtttacgaataaatgtgatctgatctttgcgccgacacctggaatgcagaaccggatccgggaaaacggtacggaggtttccatggcagtgctgccgaccgggttggatgacagtttttatattgaggatgaagagaagacaaaaacgatccgcagacaatatcttggggaagagaaaaacggacatttattctgttccgtctcaaggctggaggaagaaaaaaatccgatatttctcctgaatggaatccggtgtttgaaagagaagctgccattttcgtttcgtgtgctgcttctgggtgagggaagtatgaggaaggaactggaagtactggcagaacagatgggattgtccgataccgtggtctttctgggaaatatatcgaatgaggatgtaaagcagtatctgtatgcaagtgagctgtttttgttcgcatcgaaatcagagacacaggggattgttctggaggaagcaatggcagcaggcaatccgattgtggcagttcgggcgagtggcgtggaagatgttgtaaaaaatggaatcaacgggtatatgacagaagaggatgtagaaatctggagtgataaggcggcagagttgattcagagtccagattacagacaagtttgcatggaggcactaaagaccgcagaaagctatcgggcgtcacgtctggctgcacatgcagaaacattatatcgtcagtgtatggaaagaaaagaggaaatgagatatgaggagcatacaaaaagtgggaaagaacattctgcagcatctgttttccggttatttaaaacttcttaaaaagacggttgcgatcgaatggcaggaaatccaatttgtgacaggaaatcaggtgtttggattctggcatgaggacagttttttgatgaatctggtgctggaggagttatccgggaaaaccagtccggtagatgtcattgtgacagcagacacaagaggggattatattgaacatatgctgcaggcatgcggcggtcatgccctgcgtgttcccgacggatttgcggcgtttggagcactgaaaaaaattctacaggattcttatgagcagacgcgttccattgcggtggcgctggacggaccgctgggaccaaggcatgagccgaaaaaactggcattttatctggcagagcaggcgcaggaatcctttgtgggaatttcagtttcttatcatggatgtcttcggctgttctggagatgggaccactatgcgattccacttccgttttcgaaagtcatcgtcgcagttcacgattatggagaagtcaataaaaaacaaattcctgaccttccgacaagagcagaagtctcagaatgtggtatactgttaaaaggtgcgtgaccgcataaaatgacgagaaaaggagaaggatgagagatggaaatgaatcacattttggttgtggaagatgataaagaaatcagagaaggtgttaagatctatttgcagagtcagggctacgaagtatttttggctgcagatgggattgaaggactggaagtcatggaaaaagaggatatccatctggcgatcgtggatattatgatgccgagaatggatggaatccggatgactatgaagctgagagaaaaatatgattttccggtgattatgttatcggcaaaatccgaggaagtagataagatcatgggattgaacatcggtgcagatgattatgtcacaaaaccgtttacgccgatggaactgatggcgagagtcaattcccagcttcgcagatacagaagatttatggaaaagctggaagttcgtgaaaacgtgcatgtgattggcggtctggagatcaatgaggacactgtggaagtgtcgattgacggaaagccggtgaagctgacaccgattgaatataaaattctgcttcttcttgcaaagaatccgggaagggtattttctgcagaggaaatttacgagcgggtctggcaggaaaaggcgatcaatacggatacgatcatggtgcatgtgcggaatatccgggaaaaaattgaactggatccgaaaaatccaaaatacttaaaggtggtgtggggcgttggatacaaaattgaaaaacaacaataaaagaggaaatcttctgacggtcattgtactgttgatctcatctgtcggaatgctgcttttttatccggcgttttcttcctatataacggatcaggatcaaaaagagatgcgaaaagaagagcagatgctggatatgctggatccgattctggacggaaattatctgttatataatgaaatctcgaatgagacggagtcttccgaggtgatagaagagtatggaaacagtcgtttcggattgatgaaaaagtacatgaaatatggaatttttgatgaatccggaacggcaatgctgacctctgatgaatctgccaagaaattgccggaagagtttgacggtgatacgtatgcactgtgtgttcgcttttcgtttgatgttgacggagatatttccgatatccaggtgggcggaacagcatatgataaaaacctccagtttacggcagagcaatggctgtatgacaacagcgtttattcagcggcggcgtcttatatttcgactccgtcggaggtagagatcatgtatgcgatgacagaacagaatctggaggcttatctggagcagtatgagacatcgaatgatatgtatgcatatatgtatgtagatgaactgatgcagcagccgtcctttaactggtctgttctgatttttacagtattcagtgcagcagcagcgtttttgattcctcagtataagaagcgggcgctggaaaaggacgctatagtggatcccagaagatgtccgctggaaattgcatttatcattggactttgtctgatggcgtgtgtccgtgcactggcgatcatgatatggaatacatgcagtcacaagtttattcagatcttttctgcaagctatggagaaaatctgaatgatgccatttctctggcagcgaatgcagtgatctggtttgtgtattttacagtggtgtactggctggcgggatgtgtcagagagatttttgtactgaagaaatcgtacttaagagaaaggtccttgtgtgtgaagtttttattgtggctgaagaatggagggaacagcatgacagaggaaatcaaaaaacttgttcttggatgctggagaacattcaaagcattctgccgccatcaatatgaagcgttgctgcatatcgacttccgggataataccaacaaaactattttacggatcgtcttgcttaactttgcggtgatctttgtgatcagtatgttctggatgtatggaatctgggtgttgatcatttattccgtcggattgtttattttcctgagaaagtacctcaacaaggtgcaggaacagtaccagggtattttaaaatcgaccaatcagctggcggaagggaatctggatttcccgattacaggagatgtgggaattttcgcaccggttcagaatgaactgaaacgcattcagacgggatttaaaaaagcagtcagtgaggaagtcaagagtgaacggatgaagacagatctgatcaccaatgtttcccatgatttaaagacaccactgacagcgatcatcacgtatgtggatttggtaaaaaatgagacagatgaggaaaagagaaaagaatacatcggagttctggagagaaagtctttgcgcctgaaagtgctgattgaggatctgtttgagatcagtaaggcaaccagcagaacggtaacacttcattatatgaaaattgacattgtagatttgctaaaacaggtaggtttggagtatgatagtaatatcagaaaagcaaatctggaaatgaagtggaatctgccggaacataagatcgtattatggctggacagccagaaaacatatcgtattttcgagaatatgatcgtaaatatcacgaagtatgcaatgccgcatacgcgtgtgtatattgatatgaaagagacagaacaggatgtgcggatctcaatgaagaatgtgtcttctgcggaactgaatttcaatacagatgaaattacagaccgttttgtaagaggggatgtttcgagaaataccgagggaagcggacttggtctggcgattgtaaagagctttgtagaattacagcacggcactctgcagatctccacggaagcagatttgtttaaagcagaaattgtgtttccaaagagacaggaggtaccggatggagaaaatgaaacaggaatgtaaagtgaaaaaaccgctgaagatctggcagggtgtactcaccctgctggtctctgcggttattttgtttgtggcagcgccgatattgctgtccccgtttggcatgtatggaagtttgctcggagagcttcttctgtttggggtggcagtgggggctgtccttttgttccagggggatctgcgggaggtgtttccgcttaagaaacctcatttttcagggattgcaggcacaattctgatctgggtagggacgtttttgtgtgaaatggtactgcttttgatcttgagtctgtttttccccgagcagattctggaggtcaatgacgggctgtcatcgtccattgccgcaggtccgtttctgctgtcctttgttacagtagcaatttcaccggcaatctgtgaagaggttctgtttcggggaacatttgtcagcagtctgagaggaaggcttggaaaatgggcagtactgttgatcagtggctgcatttttgggatgttccacggagatgtttttcgattttttccgacagcgatcggtggggtgatgatgggatatctgttgtgggaaaccggaaatatgtgttataacatgctgtttcattttattaacaatgcacttcctgtcattttactttatgccatgcagggagtgtattccaggatggagctgtatatggaggcacagacacttgcgcaggggactcaggatatgcttccggcagtggggatgtacctgatgatggcttctgcggctcccggggcaatctatatcggaaattatcttcttcatgcaaaaacgccggggtatcgcacgaaattattcccgtcaggaaaaccggggctggtgatcggtctgattcttggatctttgtttttatttgcagcgggattgcttgtttttttcatttcagtcgcgagaatgttataaatcacagattgacagggcaaagaaaaatgtttataattgtaccaacaagataatacaattctacaaggagaatgcgtatgagatatgaaatagtaggagaaacattaccggcagtgatctgtacgttagaagaaggagaaacgatgatcacagagaagggagccatgagctggatgtccccgaatatgaagatggagacgagtaccaacggcgggattggcaaagcattcggaaggatgttttccggagagtcgattttccagaacacgtatactgcaaagggcggtcacggaatgattgcatttgcatccagctttccgggaaagatcgttgcacatgaggttgcgcctggacgggaaattgtagtacagaagtctggttttctggcagcagaagctggcgtggatctgtcgatcttcttccagaagcggatcggttccggaattttcggcggagagggatttatcatgcagaagctttccggacgcggtatggcatttctggaatttgacggtcatgtggtagagtatgagctgcagccggggcagcagatcgtggtggataccggatatctggctgcaatggatgcgacctgcagcatggagattcagagcgtgccgggtgtgaagaatatgctgttcggcggagaaggcgtgttcaatacggtcatcagtggaccgggacatatctggctgcagacgatgccgatttcgaatgtggcaggagtgctggcaccatttttgccggtggcgaagtaaggtggcaatatggaatatttgggtgtgttggcatttgttatagtgctgtgttatatgtcatatcctgataaagtgaaaaagcttgaaaggaaagtaaaaaagttagaaaaagaaaggtgcagagaaagtatcatgtcaaaactgattgaagaattagtgggaagagattgtaaaatttcaagcgaaaaaggaatcaattttgttggaaaaacagagtttgaatgtcatgtgatggactgtgatgaagagtggttgaaaatttctctgaaagataaaaagaatcaggaaattgtaaaaatgatacgagtggaagatgtggatgaaatcgaagtcaaagtagatcaaagcttatgagttaaataagaaaataaatgaacttttcataacggagaacaaagaacaatataaaaactgccggcagctgtggtgccggcagtttttatattgtatggaaatgtcaggtggtatgtagatttttacgaaattttttgggtgtaattccatgaaattcctgaaatacccgtataaaatgactgcagtcgcaaaagccggtttcctggctgatgtaggaaaggtcaaaatcagtgaaacgaagaagatcttctgctttttggattcgtaccattttgataaaatgcccgcaggtctgtccgtagtattctttaaattttgcggaaaagtgagaataactcatgtgaaaattccgtgctagagtttcgatacaaatgggttcttgatagtgttgaaaaatatattctgccactgcggaaaatgtttcgttctgagagtgctgcaatgcattacttgtaattgaaaatccctgtttttcccaaagtttgagcaactctgtgataaggatacaataatatgagtgtgcgagaatgtcgtaactaaagtttttttctgtaacgatttggatcattgtatcaaacagggaatgtaagggaatatgctccagctcggatttttgaaaaaaacaggaaaagcgcttgtcagtatcgatcatatgaagcagcgtggaaatggaagggagactgcttcccggaatatttagatgtacgggatcaaatttcagcacctgatattggaggggaaaaggacctgcagcataaatggcatgaggtgtctgcgggtggaaaacaatcaaatctccgggttccagaacataattgtctgtatcggtttcgatataggcagttcctttcaaaatatacagaatttccataaaataatgccagtgcggagaaaccgggaagttgtttttttgagcgtcaaaaaagaaagcttcataaggattgtttaacgtatcagagtattcgaaaatggggttcatgtcctcctcctttgtgaaaaaacagtaagatgcaaatgttgggtaatcatagatttatacaattttttgcgagaatcattatatcatgcataaagggaatatgctatactttcggggaatttaaaggaaggggattgcgcatatgaagtttataaaaggaattacatttgctccgttttacaggaaaaatacattgaatacagagcaggcaagagaaagctttgattatatgatagagaatacgggagcagattttgtgatactggcaccgggagggctgcaggatacagcacattcagaagagatttgttatagttccaatgctactttttcggatgaggaactggcagatatgatctgttatgcaaagaaaaaaggagtcagagtcggattaaagcctaccgtgaattgtaaaaacggagaatggagagcatatatcagcttttttgaacatgatgtaccgtgtgagcaaaaatggggaaactggttttcgtcctacacgaaatttcagacgcattatgcggagattgcacaaaaagaagaatgcgatatgttaatcgcagggtgtgaaatggtgatgtcagaacatcgagagaaggagtggcgggaagtgattgctgcaatcagagagtgttacgatgggacagtatcatacaatacggataagtatcaggaagaccgggttaaatggtgggattgtgtagatgtgatttcatccagcggctattatccgattcaggactgggagcaggaactggatcggatcgaggctgtagtaaaagcttatcataaaccgtttttctttgcagaagcaggatgtatgtccagaacaggatcaaaacacgttccgaataactgggggattgaaggaaagttacggttagaggaacaggtggagtggtatacaactatgtttgagtcatgcagaaaaagagagtggatgcaagggtatgggttgtgggaatgggcgcctgcagtaccatcagcaaaacaggcatataaggatgacagttatcaaatctgccagaagccggtacaggagattataaagaagtattataaggaatagacggggaaaagcaatgggaagagaaaatgaaaaaagtaatataacacaaatgtttcgagaaaacaaaggtcacagtttaaagacattgttgcttttgtttcgcgggcggtatctggcgctgtttggatcagttttcttttttgtaatcaagcattctcctacgtgggtgctgccaatcgtcacagcaaatattatcaatgcagtgacagataaagagggggatattgtgcggattttgactgtgaatacgattttaatgctcgtatttcttgtccagaatgtagcaacaaattatattcatacctggctctatgcgaaaagtgtaagaggtgtggaaaaggagttaagagaggctttgattgtaaagctgcagcagctttcgatcacgtatcataaagaaatgcagtccggaaggcttcagtccaaaattatgagggatgtggaacaggttcagacactggcgtctcagatttttatctctttgattacgattattttgaatattgtagtgtcatttggggtggttatttataaaagcaagattgtatttctgttttttgtatgtacgattccggtggcggttttaatcattgtaggatttaaggggaaaataaaaagtcacaacagggaatttagagaggaaatggaagaaacatctgcgaaagtgatggagatggtggaaatgatccctgttacaaaagcgcatgcaatggaagataaagaaacagaaaaaatggaacggcagttgaaaagaattgctcaaaaagggttaaagctggacatggtccagacctatttttcatcgatcagctgggtggcatttcagatttttcaggtgttctgtctggtgtttactgcttacatggcgtggaaagagttgattcaaatcggagatattatgctgtatcagacctatttttcatctattgttgcacagattgcaaatgtgatggcattgcttccgattatttccaaagggttggaatcagttgagtcgataggagaagtgctgtgtgcaaatgatattgaagataactggaaaaaagagaaggtaaaagaagtagaaggtgaaattgaatttgatgaagtttcgttttcttacagaggggaagaaaagaaaatactaaatgatttaaacttgaagatacgaaaaggagaaacagttgcatttgtaggaggttctggatcaggaaagacgacgattttgaatctggcaattggttttctgaaagcagacagtggtcaggtacggattgatggaaaaaatctaatggaagtgaatctgcagagctatagagaacacatcgcggttgtgcctcagcagtccattttattttcgggaacgattcgagacaacataacatatggaacagaagggattccggatgaaaaactctgggagatcgtccgggcagcaaatttggaggatgtgattaagaaaatgccggatggattggatacgatgataacagagcatggggataatttatccggaggccagaaacagagaatttcaattgcccgggcatttgtgcgaaatccgaaaattttgattctggatgaagcgacttctgctctggacagtgtttcagaaaggaagattcaggattccattcaaagactggtgagagatcgaaccacgttaattgtcgcacatcgattgtctacgataaaaaatgcagataagattgcagtgattggaaatggtggagtgttagagtatggaaattacgaag

SEQ ID NO: 7009 - DNA, 12827 bp, Unknown
  gut microbiota DNA sequence
tttgtagatgtttccttcatttgcaggatccattgtgaccgttcccatctgcggatccggtgactctacatagatcaggtaggaatgctctacttctttaaagtttgcagtcaggtccatattttcctggatctggaatacgtacggattgtccttgctgacaatctcctgagttcctttctttgtgaagcctacgaattcataatcctcggatgccggcactgcactgaccttgatctcagttcctgcctcgtagatatcctgctgcggctctactgcaacgcttcccatcttctcatcatttgctgcaacagaaaatgtatatttttctgccgggatcttttcaaagtttgcaatcaggtccagatcctttgtcacctcaaatacatacgggttggagtcactgactgccacaccttctgcatcggtccagtttacaaaacggaatccttcgtttgctactgcgatgacttctgctttttccccttttttgtagcttccgtctgctgaatcaatggttacggttcccattgtattgtcatttgctttgagcgttacacggaagatttcttctggcacttcttctttcacaaagtttgcagtcagatctgtattttctgtgattgcaaacttgtacgctgcttctgtgctgacttcttcctctgttccggtctttgtccagtttacaaagcggaatccttccttcgcttctgctttgactgttacctcagttcctgcttcataggaatcctgctgtggttctacactcacggttcccatttcttctgcattcgctgctgccttcaatgtgaaggtctctgctactgccttaaagttcgcagtcaattcagcgtcctttgtcacttcaaatgagtatatattctctttactcacttcttttccggctgcatcggtccagtttacaaacgcaaatccttcctttgcagttgctgtaagctgtgcattttctcctgctttgtaaattccattttctttatccatggaaaccgttcccatgttctcatcattggatcttgctgtcacaaaatattcaccggatgttacaaaaccttttttgagttttgcatctgcccagtcaccatgcgcactccatgtattcgcaacgccttccatcaccagtttcaattttgaagcattctggatatccacgcttaccgctttcatctccgtattaaacttcatctctccgctgtcaaatttctcctgatcatccacaaatactttgaaacggatgtttggttcgtttggtttcgctctggtttcacggtctactccaacatatgcttcaaatgtctgatatccaagatctgcaatgttatacacaatttcagattttgcatggcttccgattccttttgcaaatgtctgctcctcttccccattccacaatgtaattgtgttctgtccgcagctcttatcttttgttgtcggatttttgctatctcctgatgtctgtgattcccagtcaagatctgacaaatacacatctccacttgcttttaatgcaatttcatatgtctttgtttccttttcatccggtgaaacaaccttcacacgaatctggttttcgccttcctgtacatgaaactctttttcgatacttcccacaccgcttgtcagcacctgatctcccagagaaacctgaagatctgcatctttctcttctgcttttacaataagatttactgtttctgctgaagttgttcctgtatatttcactgtatccggagtaaatcgttcattcagacgaacattgtctccaaattccagaacttccaggtttgcattatccgttttcggcactttcaggttcaatatataacggcacggcattgcactcgtctccggatatacgaggatattgacgatattctttcccggtttaagtgatacctttccatcctgtgcagaacttccattgcaggaaatgtccacacgcgaagagccgctggctgcttctgcttttacaactgcttctttgacatctcccatttcctgtgtatactcatacttgccttcttccagcgtaatcggagtgtcattgactgtcaatgcctttaactgtgtattgttatcacctactcggctaatcgtaaaccgatagttcctggttgtgatctgatctgctgctgtcacattcacttcaatcagatttcttccacttgtaagtactgctgttccttcatttgattcagccggctttccatttacataaatctgcagatctgcattttcatcttctgctgcaaatctgaactgtacttccttttcagatgttgcagctgttgtatgatagaaatatgttccgctttcaaatgtaaatccattctgcaaccctgtgatctctgctgtttttaagcttgcattggacgacggcagtttatccatctctgcatcaatgccttctcctgtcacatgaaccgggtctgtccatttcatctccccagccatacctgctgcatttttcggaattacgacagcttttacatatttatccttcattgcccttgtcgcatatgtcggattctctgctgtgccctcttttacagaataatttccattttctgtatcagaaactgcccattttaccattgcagatgcattctcatcagacagtttataatctgcagtcagcttatgttcttttgcatcatatttcagtgatgcactttccaccgttgccggctgtgccttctgtgtgatcggctttgtttcatcatttactttcagttctgaaaatacgaacggtgtgctgctgttctggcttccgcttcctgcaacaaatccaatcttgaagtcttttccaattttatcgtttgtcacctttcctacttctgtccaggttgcaccatctgtactgtagaatccggtaatgtcatttccctttttctccagtttgtagtaaacttccgtttcatttatatccgcttttttatgactttcatctggctttctgtctttttctgtcaccaaatgaatctgtggcgttccattcccatgttttctttcaaccgccacataattgtcattatctttataaaagatcagacctgcctcatcgtaattgttcgctgtcttaccatctactttgactgttgcagttacattctccaaatccttgccaaactctccaactacaacgttatgtggattctgtgtatcccacaatccaccattttgtacggtaattttcacctttccttcttccggaatggaaaggtgctctgcatctttattgaccactgtaaagttgcccggaagctcatatcccgtctctgtgattgtcagaagtttatgggcttcgattccattgacagatcttgcggaaacttctaccagacctgctttttttgctgtcagcattcccttatcatcgattgttgccagatcagactctgcacctgtatccggagtcagcaccttccacgtaacctgctgatttacgccttctttacccagtgcttttgcggtaaatgctaaagtctcacctaccgaaatctgttctttttctgcatcaatctccaatcctgtcggaagcacaccttccacacttccgctgactgtaaattcaatggtatttccttcgtattttctgccgcctgatactgcaaaagtacgaatagatgcagttccttctccgactgccgtcacaattcctgtatctgaaactttcagaatattctcatcgctggaaacataatagatatctcctgctgtctctgtcatatttccgccgccgttgatggcaatatgatcccctttgagcttgatttcagatgcatccatattctgaatctctgctttcagattcataccgccgtcataactattattttcaagtacgacatttttacatccgttgaacttatacaaattcttatcctgtttcgttccatttgtctccacagaaattttttcagattctcccacagcaagctgtgtattctcggcacttgcagtcaatgtcactaatggatcctgacgatagatcttattgtttttaaaggtcagatccttgacactttttgcatccagtacactctggttttccagatagaatgtatttccttcaatcgtcatattttcatgtaccgtctgcgttgtcgatacattcggatttgtcggatccacataaattgcctgtgcttttcctctggtaaatgtattgtttcggatcgtcacatctcttgtcggacctgactcataccagccttgtgcatcattggaaatatagattcctgccattcccattccatcgaatgtattattttcaatcacgatcggttttctggtcgtcacaagaattcctcttgtcggagtctctttgaaaatattatcatgaatcgatacttccggtgtataggtgatattttccaccacatgctgattaacctttacttcctccggaatcggcttgtccagcgtcagaatgatatccgtcagacttccagatccgtctcccatatttccgccttttccgtccggtccgtccactttagttactgtggcaacagaatcctctaccgggatcatattccctttcgtcataaattcaatctgatccccctcgaaaaagttcgggaaacctgctgtctcacggtgctgatatgtcaccttgattttattttcacctaaaatttctgtaacctgtaaaaaggtaccatgtacgttgatcggatcgtcatgtggattggaaaaagtacagtcactgacttctacttttcctttacatccagatacctgaagaaaatctgcataacctgctgttgtccttccgctttctttcggagcttccagatctacgtcatgcagtgtcagattctcactggactgtcctaccattccaaagccatgcaggaaatgaacatctaaatcctctaacacaacatccttacttttccagaaaaacattcccgcatgatcgcggacggtccgtctgatctggaaacacattcctggtctgacttcgtcactcttattattatatgtaaacttaatacgatgatttcccaaatcttctattgaagctgctccatcaaatacaggattatttcctgtacttccacgatatgtcagtcctgttgtggtatcaaatctctgcgtataatccatcttattcgtatccgtccagtatggctgccctgtatatggactggaatcactgatccactttacagtattcccctctacactgtagttatagcactccggcacatatacgattgcagaatttccgtccacagactccaccgtaatatctacaaccgtcggagtctggaaatccacctgaaattcttcaaactttacgtttttgcagtcaatcgctgccactgttgtcatctttccatgaaacataaacagggaatcatttccatccactgtcacattgtccatgtcctccaacaggattccgatttttttcatcttgtgatcctgatttgccccaactgtatttgaaatatacagctctcgctcttctgcccgatccggatagatatcatatcttcctgtcggaaaatccagtactacatttttgccttcatcagacaatttctttgcctcatccaatgctgcctgaattccttctgcgcagtcctgaccactgtccggtgttacaccgtactctgtcacgtcaattacggcagagtcagattctttggcgctgctttcaaatggagtcattcccccagataccatacaccccgctaaaagcatcgccaggattcgttttctttgtttcatagcttctcctttcaataacatatttgacttcagtataacatgcggctctctcctttctcctttcacatttttccttttttatttcattattttccaacaggctgaaacacaaaacgagcagaaagaaagttatccactttcctctgctcgttttatgcttttattcacatgattctctctgtttttaccacagactttcataaatcttcatgacatctgccttgcttggcactctcggattcgttgctgtacatccatccgccagcgctgcttctgccatacgctcaatctctgcaaaatattcttctttggaaatcttgcccatctgcgaaacagacaacggaatatccatttccttcaacataaactgtacccagttcacaaggtttctgactgtcataatcgtgttataactgctcagccctaaaattctggctactgttttatatcgttccacagcaggcagatattttgcctgactcttgctatgcttgttgatatcactgttgaactcaatgatatgcggcagcagcatcgcatttgcgcgtccgtgcggaatatggaatgttgctccaagctggtgtgccattccgtggttcagtcccagagacgcagaattgaatgcaagacctgccagacaggatgcagaatgcatcttttgtcttgcatgagtatcacttccgtccagatatgctctcagcaggaaaactccgcagatttcaattgctttttctgccagtgccgttgcaaaatcatttctgtctgtacttacacatgcctcaagcgcatgggtaaatacatccattccggtatctgctgtaaccgcaggcggtacactctttacaagttctgcatccaggattgcctcatccggtgtcagatctctggataccagcggatattttctctgctctgccggatccgatacaactgcaaaggaagtcacctctgaaccagtaccgcttgtcgtcggaatcgcgatcagccctacatcgccgtagtgctcgatccgcactgcaaattcccggattgatttggaagaatcaatggcagaccccccacccactgcgataattgcttccggtttatacgccagtaatttttttacgccttcactgatcttttcaatcggcggatccggcacaacatcctgaaaaatgtcatactcaatatgcccttttttcaatggatctgtgatcagattgatcatactgctctgtgccagaaacgggtctgtaataaccagtacttttttatatgggatctctgaaagacggtctaatgcattgtccccaaagtatacttttgtttttatatcaaagctcttcatagcgtccttcctctattctggatagatacactctatccccaactttttgaattctttcagccacttcatctcgggcttttcatccgttacgatcattgtaatatctttcaatcttccgaccgtcataaaggctgttgccccaaacttactgctgtcaattgcaaggatgcgctccttggcattttccagcattgttcgtttgttatctgcaagaagttcatcagaatctgtaagtcctgctgccatatccaggcctttgcacgaaataattgctttgtctgcatgatacgactgaagcatccggttcgtctgggttcccacaagggcaaacgatccctctcttgatactccgccggtagataataccctccaatctgacatatccaaaagctcgatcacaatttccattgaattggtgatcagcgtcagattctttttatctttcagtccttttgcaatataaactgcggtagaactcgcatccagcataatgctgtctccatcctgtacgatctttgccaccagctctgcaatccgttgttttccgatcacattgcggttctttctgatattgaaaggcagatctatattcatattctcattgatcacagcaccgccgtagctcttgattgcgtagccatcattcacaagcttatccagatctcttcgaatcgtctcttctgacacttcataaatctggcttaactcactcacgactacccttcggtcggtctgtagtttttccagaatttcattacgtctttcaattgccagcatcgtgttgcctcctgataaattctgtctcaaaacctttgttattgccgtatacaaatatcagaaaacaggatcctctaatctggacgtcctctgttttctgatacttgtcatggctgaattcttaattataaaattgcgtcgcgaatctgtgcatccggatgtgcgatcactgcagaatccagatacataccatcgtcagatactgcttcttttgctctgtcgatcgcagcttctacagcagcaacctcacctgtcagcatcagataagattttccgcacatacctcttgcaaggcgtacttcgatcagatcaacgattgctgtttttgcagcttcatccgctgccacgatgatcgaagatgcatcataggactcaatgatacccagtgctgatacatccttgatttctgcagctccataaattgcagggaaaatggattcatgcggattaccaagtacaaaactgttgatcagatgttttccatgcattgtttttgcattgtcaacagcagaagttactgcacttaaatctcctgtaataattacaatgtattttcccggacatacggtctgcgcttcgataatgcttacttcagaagtttttaccatagaatctgccgctacgacacctgctgaagtagtcttatattctaccattccaattgccttactcattatctgcacgtccttcctgtgtctctatgactacatatttctcatttacttcgcttaccagaccattgacagaagcgtggattccaacacttaagccctttgccggttctgcgatcatctgtcctttgactaccatatctcccggttttacaacacaggaagcaggcgctccgatatgctgactcaacatgatcttcactcgttttacagggatcacggattcatccagcggagcttctttgttatattttgtcaagtccagtcttgacatcagacgttccatcggaactcttctgtaagatctttcttctcctaccggtactgctgtcacttccggcgcacgaagtccgttcgcacgaagtccgtttttgtattccagcatcagtgttctaggagaaagctcctgcggacaggaatataactcacagacaccacatgaacagcagaagaatgtattgataaagatattcggctgctgaacgtctttgcatgttgccgcacgcataaacaagtgtggctgaatcgggtgtccaagcagatgtcttggacataaatctgtacacattgaacactgacagcagcatgcagccgcacgtttcatgtcaatggaagatttgcttctttttctctttacgagataatgatcctgcggcaataccagtaccgcattggttgttttcgtaaccggctgcgaaccgcttccgatgaatcccatcatcggtcctccgataaaatataccggatcttttacagttgttccgcctgcaagtgccacgacttcctcgattgtagttccaatcggtacacgaactgtcaccggatgctctacctcggcaacaacggataccagtttatctacaacaggagtctgctgattcatagcgcgccatacgttgtagatcgtctcaacgttgaataccgcaacgccgctctcgatcggaagtcctcccggacgtacgacctttcctgtcacttcgtaaatcagaacaacctcatcacctgctggatatacttcatccagcagtcccagtctgacttccggatattctccgattacactctcgactgcctcaattgtctgcttatatgcttttttgattccgataatgacttcttttgcgcctacagcctggcctaccaggtgaaatgtatccacaatctcacgcgcatatttttccaataactgtctatgtaatctcagtagtggctcacattctgcacagttcaggataattgtttctgcacgctgatccagtttcgcataagtcgggaatcctgcaccacctgcaccaacaattccgttttgctgcaatatgctgcttaattctttcatatccataatttcactactccagtcctgttccatcgtcaataattccaacgatcgctgcatcaataggagcatcgctcatgccgcagccaatccgtgccgcactgccctgtgccaccagcacatactctcctattcccgctccgatcttgtcaatcgcaatgagttgttttccagatgtctgcatatgatccagcacatccactatcatgaatttattgccgaccaaattttcacatttccgtgtcgagataacacttcctactacttttcctgctatcatactttcctcacttcctcttgcgattttctaatgtaagtatctattttataattcttacagtctgtccagtcgcaatcttcgctgcattcgcttcatcagtatcgatatgcatctccagcgtaaagctgtcatccacacggatctgtacatgattgaaaacagtgcctctttcattctccgcctgcacggataccacatccccgtcatgcactccggctgccattgcgtctttcggcggcatatgaatatgtcgttttgcaatgatacatccttcattcagataaatcgcaccttttggtccgacaactgcgatcggtgcacttcctgcaacattaccggattcccgaatcggagccttcactccaagtttaattgcatctgtagcagaaacctcaacctgagatttgcttcttacaggtcccagaattcttacattttcgattgctctgagcttcagaccgacaattgtaactgtctcattggaggcaaactgtccgcccatcagttcttttttcttcgtcagctgatatcctggtccgaataatgcttccacatgctcctgtgtcagatgaatgtgtcttgcagatacccctaccggaaccagatatcccggttctttttcggaagatttctgtttttctacagcttccagaaccatctttgtaatcaaagctacattattattgtccatattaattctcctcatcaatgcatgcccgcccttaaatccggctgtagcacaagaacatatgcgagctgatccgctcgcatatgctctcatttacaaccgttaccgctgactgaaatgattcgggcatttttttgaaaccaaaacttatttgattgccggaagaattttttctacgtctgtgtgtggtcttgggattacgtgtgttgccactaattcaccaagtcttcctgctgcttctgcacctgattctactgcagattttacagctccaacgtctccacgaaccattactgttaccagtccggaaccgattttttctgttccgactaaaactacgtttgcagcttttaacattgtatctgctgcttcaatagatgctacaagacctctagtttcaaccattcctaatgcttcctgtgccattcttcgttcctccttcaattctacttttgtttccgcctgctctgccttcttagcgctcttccttactctctgtacggttttggccggcgctttggctgcagttgttttctttcttgcggcaggctttgcagttgtctttgcactttcctgctctgccggtttcttttcctctgccataagggctgcctcctaacgtatccgattgacgctcttattaatcaatttgatgatctcttcatggggactcggaatcaccgtataacataccggctctttgattccattcgctgcggcagcttcaatggcttgtgttacagcggatacatcgccacggataatgatcgtcacaagacgtccgccgagttttttctcccaggtgatcatctcaacatctgcggttttacacataatatcgacagcatcgatagccgctgttacactcgggatttcaaaaaatccataacactgtcccatgagacttctcctttactttctgtagtccttaattatacagttggaaggattttttctacgtcgttgtgtggtcttgggattacgtgtgttgctactaattctccaagtcttcctgctgcatctgctcctgtctcaacagctgctttcacagctccaacatctccgcgaaccataactgttacaagtccggatccgattttctctgttccaactaatgttacctcagctgcttttgtcattgcatctgctgcttcgattgctgctgtaagtcctcttgtttctaccattcctaatgcctgctgtgccattgccatttttaaatcctcctaaatctcttcaatctcttctttgtttattttgtgtggtgttcctttgtcgaacgcgctgatcttcaacatcttttccgtatcctctgtcggtcttgcgatctcatattcattcacaacacctgccagctgctctgctttggcttttgccgcctccagcgctgcctgcacatcagagacacttcctcgaaacttgatcatcacgatcagcggtaccggtaattcatctgcattacccggtttgtttttatcaaaattctccagccagacgtttcctgccttgcatcctgcatccgctgctgcaaaggcggtcgccagaccgaaaacttcaagcatgcctactgcttctgccatatccattctccttctctggaatggccgtcactatttgttgataatagcgatcttcaggccttccattgcaagatttgttctgtgagcttcgttgatctcctccaatgggtattcatgtgtgatcagctcatcgattggaagtccgattccttttgctctctttaagaaatcaaatgttgttgcataatctcttaaagtatatacccaggatcctaccaatgtgatctcttttgaacacaggtcgaagtgtgggttgattgttgcatctccaccattgatgaagaatccaagttcacaaagccctccaccatttctgatgaatttatagatatttgcgtgtgcgatcggtgatcctgtacactggaatgcgaagtctgccggatatcctccaaatgcatcttc

SEQ ID NO: 7010 - DNA, 854 bp, Unknown
  gut microbiota DNA sequence
taattcatctgaatatttcgttttttcttcttcaggaatcttcaggctttccattgcctgttctactgaccaccccattgtttccataaggtttctaattgaaagaagaattcctttctgaattcctttttcttcaacgcctttactcagattacacataataggcacctctttctaatgtctttgcgtttcagacaaaccatgcgataaggtgaacaacaataatactgctcacctctattttcaaaatttatatattttgtacttttacatttttttcaattcatctaaatacttgctcttttcttcttcaggaattttcaggacttccattgcctgttctaccgaccaccccattgtttccataaggtttctaattgaaagaagaattcccttctcaattccttgttcaattccttgttcaatacccttctgaattccttgttcaatacccttctgaattcctttttcttcaacgcctttactcagattacacatagtagacacctctctttctaatgtctttgtcatttcaattgaaaaatcattctgtaatatctctttcttttcctttacttcacgatccgaagaaagcaaaacttccagtaactttaagatacctgaagcattttcatcatcagagtcccctaaacatatcataattgccgttagtaaatcataattttcttttctttccgaacaactaccaattaactgttcttctgtaatagaatatctgtttatactattttcccgatatttcggtggattcatacaaatccaaatgctatagactttctttatcttctcataatgtgcatctgaaaattcaacaccatactgcgaagatatca

SEQ ID NO: 7011 - DNA, 2066 bp, Unknown
  gut microbiota DNA sequence
cttatactattttcccgatatttcggtggattcatacaaatccaaatgctatagactttctttatcttctcataatgtgcatctgaaaattcaacaccatactgcgaagatatcaatctgctgcaatagtaaattcctctgcttataatcgggtagcctggataaaaatcattttgcgcttcaatatttatgatcaatcgaattttttctttcgacaccggagccttcgcacaaaagcgaatatcgtatgtaaccaccccttcataaatagaagcgtcttcggttgctccattttgtatttgttcttctgatacctgttcatctatatttacgggtacgtctgcaacatctgcctctccttctatatagttctctacaatttcctgaatctcacaatctctatattcctctatacaacttttcataatccatgccaagatcaccttatttgccagaaggcgtttgcatgctgcatcataggaggctttctctcctgcagaactaatattctttgccagtatattttcaactttcaacctatattcacctgcctattcctctttttcttattttatcacacacgaaaaaaagatgccacttatttttctcaccagattatcctccttccgtatgataaggaagaattgtttatgttcttttcgcattaaaactctttctgcttttataagcagtttaccactattttcttatgccgcttcattcttatccaaaacctccgtaaatgctttttttaaccgataagataacaacgtatttctttttttggatcttcccgcccgtattgcctgggaaaatgcctgtttgcttcccacaagaatgacttttctttttgcccttgtaattgccgtataatatagatttcgctttaaggtatgccgccgaaaacatgacaaaatcggaatgatgactaccggatactcggagccttgtcctttatgtgcagtaattgcatacgcatgaacaaggttccaagattctccttcctgatatcgcataacccgctcttctccaaaatctacttccatatatttcttaccgctcacctttcctatttttcgtacaatcccgatatctccgttggaaatttcatcttcatttttcgtctgcattactttatcctgtatacgaaaaattttgtttccatttttgatttcctgttgtcctatctggtaaggattgattctgtctttgatttttagattcaaagcatttgcgcttaccttcgtatcttcccttaaaggtgttaatacctgcactgcatttacatttttcctttgcaacttccactccatatcaaaaagtttcataatctttttcgcggcttcttcatcatcatgtgctgctacaaaggaaaaactgttatcatataccaaattttgtttgccacagttgatttttatcgcattctccaaaatagtagggttttcctgccggaaacattgatctaaaacagtaactggaatgactctggagtcaatgagttctttaaatacatttccaggacctactgattccagctggtctttatctcccacaaaaacaatccgacttccagtctttattttcatcatcagactggtaaatagatgcatatctaccatgctacactcatcaatgatgatcaagtcatcgcaaagcatttctccagcattccatgcttcttcaccgtctgctcctgtaagtccgatacttttatgtatcgtcaacgccggatatcccgttgcttcatacattctctgtcgcgctcttccggtaggtgctgccaataaaatcatactatctatattcaatttttcctgtatcataacaataaaacgcagcagggttgttttaccacttccaggtcctcctgttataatggaaactggattttgaaaaaccatttcaatcccttttctttgcttttccgctaattgtatgttttctttcgattccaaaccggaaatccatttttctacatcatatctttttatcggatatcggctgagcgccgcaagttgtataacagctttttgttccgactcataatttttcttagaataaat

SEQ ID NO: 7012 - DNA, 2564 bp, Unknown
  gut microbiota DNA sequence
acggaaacagaattcggggtcaggtatcgcgaaatggcgaagcacactcttttttaggagagatagtatgtggtatgtaatccaagtagtgacgggaaaagaagaagagacaaagaatgtgatcgacaaagaactgagcagacagttttttgaagattgtttctatataagacgagaacgggtatggagacgagatgggcagtgtattgttcatctggaaacgatgttcccggggtatctcttcatcagtactgaccagccagaggaggtatacacaaaattaaaagcaattcctcagattacaaaacttctccggtcagaagaagatatctttttaactgtctctcaggaagaaagagaatttcttgagaatcttctggatgaagatccggaggacgttgtgagattgtcaaaagtgacggtgaatgaagaaaaagagattcttactgcagaaggtccgctcagacattatgtggattggattgtcaagaaaaagttgaggctgcgatatgtgatgatcgaaatggagttatttgaaaagaaacgagaaatattgatagggataaagttgtaggatttccgatggagggagtcctttttctatggagggatgagattatgtttaatgaaaaaaatcagtttgaagtatttgtattaaaggttgggcatgggggattagaggggaagaaagtgatggtgatataaaagggacaacaaagcagaagttcttagtttatgtggatttcgaggttatagaaatatactaaactatgccaaaagtcaatggtaataatatttcaacttatgatatggattctatagatataaagattttaaagttataaggagtaaaaaagatgtccaatattgatacaaaaaatgaaattttaaaaagaaatattccctttagccctccggatattagcgaattagagattgctgaagttgcagaggcgcttcgctctggttggattacaactggaccgagaacaaaagaattggaaagaagacttgcagagtattgtcatacttcaagagcagtttgcttaaattctgcaacagcagcggaagaattaaactttagaatttgtggtatcggggatggagatgaagtaatagtaccttcatatacatatactgccagtgcttcagcagcaattcattgtggggcaaaagtaatctttgtagatagtcaaaaagatagcactgaaatggattacgataaagttgcagaggtaattactgaaaaaaccaaagcagttgtagcggtagatttgggcggtatcatttgtgattacgataaattgtatgctgctgttgagagcaagaaacatttgtttagagctaaagaaggtgatagccttggggcaagaattcagcagtctatcggtagggtaattgtgttcgctgattgtgctcatgcgttgggggcaagcagaaatggaaagatggctggtgagattgctgacttcagtgatttctcattccatgctgtgaaaaactttactacagcagaggggggagcaagtacttggagagatatcaaaggaattgatactgaggagatttataaacagttccaattatacagtttacatggacaaagtaaagatgctcttgtgaaaactcagcttggtgcttgggaatatgacatcgtaggtccttggtataaatgcaatatgacagatatcatggctgccattggacttcgacagttagacagatatccgggaatgcttgcaagacgtagtgatattataaaaaaatacgatgcaatgtgtgatgaacttggggtaaaacatttagttcatagtggagaagattttcaatcctcaaatcatttatatttgactcgcattccggggattaatgatgaagttagaagagagattatcattaagctagctgagcgaggggtaagtacaaatgttcattacaaaccactcccaatgatgactgcatataaggaaatgggatgggatattaaagattttccaaattcttatgattactatgcgaacctaattacacttcctcttcatacaaaacttaatgatgaagatgttgactacattatcaaaaatttcagggatgtagtgaaagaatacatctaaagcaggagagtttgtgatgctaaaaaaatgggatgaattgcctgattttatgagaagtgacgaagttaggccgtattatgatattttaaaaagaaaaaaagtaagtcttgttctaaaaagattaatggatttaataggtggcttaattttacttgtcttattggctattcctatggctgttattgctgtatggataaagtttgactccaaaggtcctgttttttatcgacaggaacgagttactatatatggaaaacactttaagattcacaaatttcgtacaatggtgaataatgcagatagaataggagccactgtgacagttggtaatgatagccgtattacaaaggtcggagccaaattaagaggttgtcgtttggatgaattacctcaagtattagatctgattagtggagatagcggtataataggaacaaccaagaaaaacct

SEQ ID NO: 7013 - DNA, 5012 bp, Unknown
  gut microbiota DNA sequence
ccaggaagatctgtccgtctgtaatagaaattacgttggtcgggatgtatgcagatacatctcctgcctgtgtctcgatgatcggaagtgctgtgatagaacctccgccctgctcttcacttaaacggctggaacgctccaacaatctggaatgcaggtagaatacgtctccaggatatgcctcacgtcccggagaacgtccaagaagcagagacagtgcacggtaggctaccgcatgtttggacagatcatcgtatacgatcagcacatcttttccctgatacataaaatgctctgccattgctgttcctgcatacggcgcaatatactgaagcggcgcacagtcacttgctgtggaagataccacgatcgtataatccagtgcatcattgttcttcaatgtatttacgacttttgcaacagtagaagccttctgtccaatcgccacataaatacagatcacatcttttcccttctgattcaagattgtatccagggcaatggatgtctttcctgtctgacgatctccgatgatcagctctctctgtccgcgtccgatcgggaacatcgcatcaatagaaaggattcctgtctccatcggcacactgaccgattttctgtcaatgattcccggcgcctcctgctcgatcgggcggtaatcatctgcttcgatctcaccctttccgtcgatcggagcccccagtgcattgacaacccttcctacatatttatttccaaccggtacaccggccttttttcctgtacgagttacttttgttccttctttgatatctgtgtcccgtccaaaaagaatgactccgatttcatttttctgaatatcctgtaccattcctttcaaacccgtatcgaaggtaacaatctctccatacattgcgtgatcaatcccataaatagtcgcaattccgtcacctacagcaacgactgttcccacttcgctgtctttgctcacactgtcaaaattttctatctcttcttttaaaatagaaataatttcatctgaattgattgaactcaccttgttcacctccaggttaatttttgtcctagtctgtccagacgtcctttcagactccagtcatattcatcgcttcctgtgcgcagaacaaatccgccaagcagcgtactgtctgtctgaatctcaatcctggccttgctcgcttcatattttttacaaaggaacgcttccatatttttgagctgctcgtcactgggcagctctacacatgtcaatacggcacttaagatccgatcctgctcgtcacaatatctgtcatatgcagcaaatatctccggaatcaaatccattctctcatatttacatgccactttcaggaaatttctcatttcctgcggaaataccttgtcgatcacacgttctttcttctgtgccggaattgtcggattcacaaacacatcatgaagctgcggtacctcctcaaatatctctcttgctttctgtatggcttccttcggaacattcagctcatacaacacctgtgcataccgcattgctgcagatgaacagtacatctgactagttgttgtctgtgtcttcatgagcttcacctacttcttccagaaacttatcatatatttcctgattattgcctgtctgttctgccacgatcttcgctgcagctgtcattgcaagtcctgcgatttcagactggagtgcactcattgtctgctctcgttctacacggatatccgccttggcagactcgatgatactgcctgccctggcatccgcctcctctacaatacgttcatactctgatttggcgtccttacgtgctttctctacgatccgcacagattcttcttttgccccgccaagtgcctgcgcatattcttccttcatcttcatcgcatcttcctgtgcattctgggcatttttcaatccgtcttcgatcagctgacggcgcttttccataatgtcggtcacaggcttgatcaaaaacttctttaataagaaagccaggacgatcaggttaatcatggtatatagaaagttcatatcaaatctcagcacttcccacacccgcctttcctgttaattctatttgcttattttaagaagaatacgatcagaataccaatgataaatccataaattgcagttgcctctgcaagtgcacaaccaaggatcaggttcttgctgatcttgctttcagcctctggctgtcttgcgattgcatccactgcttttcctgttgcgataccaattcccactcctgctccaatacctgttaatactgcgattcctgctccaattgcaatcagtgttcccataattctaatctccttttttattcttttatttgttcaaaaattccgtttctattcctgttcttctgtcataaacagtgctgtcagaaatacaaatacatatgcctgaatcagaccgtcaaaaatatcgaaatagaaattcatcggaagtggtataatcagcggaacaaatgcttttaaaagttccattaccacaaatcctgccagcatgttaccaaacagtcgcatacagagcgacaatgggcggataaaaatttccagaatcataatcggtgcaaccaccggcaccggtttggcaaaatgcttgacccaatgtttcataccgtttttatgtattcctgaatattcgatcaggcacatactcatcacggcaagtgctgctgttacattcagatcttttgtcggcggcttaaagccaagcagaccaatcatgttggcgcacgccagataaagaagaactgtgatcagatacggtatatatcttttgttccctttaccgaggatcccttcaaagaaatccgttgcccagtcaattgcagcttccaatgccaactgaacttttcccgggttttctaccttcagatttctcaccagaatcaatgataatccaaccagaaccgccataatgatccatgtaacaaccacggactccgaaattccgccgagaaccggaagttcaaatactgttttacagttcagctcttccatcaattctgttgctaaattttccgtatcgctccctccctttcctgtctctttttttaattactgccctttgggggtcttcccttttctcttccaggtggaggcctcttacgagcataaaaaaggaaatttcatgcttcgaaatctccgtactgtaatcccttttcagacagcgtgcctaaaaagttatctaaatcctactcccagcaagtgggtttgtcaacaaaaaaaatttagagttttatttttccgatcgtactctttttttgtcgaaattcccagtgttttaaaatacgtttttttctttttttaggaatatttcaaccttattttactgacttttcgtcatttttattttataccattcctttttcactaatatacagtaattcatttgcacttttttcatcaaacttccataatattgtgaaatacctgtcattctgtttgtggaaatactctctgaaaccataaaaaaagaggactttctgcacatagaagcacaattctgtgtacaaaaagtcccatttccaccttattctctcttttgagactgcattttctccttattttcagactcttccagagattgttcccttgcaattttaaggaaatctctctctgctctttttcttctcggaataaatctgcctgcaacgccctttccacggcttctcacatagaaaaatccaatcactgaaaaaactactgcaccgataaaattcacaaacaagtcttccattgtgtcgatcagtccgatgtccagatatccgcccacccccaatggctgtccattgatcagcacttccctgatctgatcgatcgtcaccggaacatttcttccgtccggattcagcatgaccgatgtgattgcaaaaagaaccgtatccttctgcatatcaaatcccagaatctgatccatgccaaattcaaaaaactcccacacaactccaattgtcatagaaaaacaaaatgccacaatcgcagtaaacaccggtgacagatgaaagactgtacgctcactccgattgagtaaatcaaccagtgaaaatccgattgccgctgccagaaatccattcagcgtatgcagcaccgtatcccagaacggaaacagcagataaaattcattgatctcacctaatatctccgctgcaaatataaaaaacaatacgatgatctccagcgttgtaggcagctctattttaaacgttacctgcacaaaacttggaacaatcagaagcaaaagtgtcagaatgcataaaaatacgttttcataattctgatttaaaacctggagcaccagcatcacgatcacaagaatccgcaaaataagatacaccataaatgagcttttatgttccctgagttccatttttatcgcttccgccatatggcggaaatagccgttttgttttttctctttcttttctttcattccccgctccctttctgctcttctgtatcatttcaaacgatacttccatttcctttacacttaagaatattatagaaagataacatcgggattgcaagattgttctgttggggtgccttccttgagagaccttctcttttttctatagttctataaacttatacttccctgcacccagtcctgtgactttttttatgactttcgctgccttcattgcattcataacatttgttgctttggattttgaacatcctaaccattccataatatttgcctgtccaaatggtttgtctactccactttccagaaatactctgccactattctcaataaatttctccgtaatctctgcttccttgaataatggcaaatacttttcaaaagtgttgcttactttttcattgtcattgcttactttttcattagcgttgcttactttttcattagcgttgcttactttttcattggcgttgcttactttcctaaacattgtaaccttaaatccatttccaaactcttcaaatgtcggttcaggtaaatcatactctctacatctgtttat

SEQ ID NO: 7014 - DNA, 5636 bp, Unknown
  gut microbiota DNA sequence
actacaaaaacctgtaatatctacacgtctttttcctcgcctgtccataccccaagtccgctcccaagcttctccccggatagcagatattttctggctgctctctgcaagctggtgtcctctgcatagcttcggggatccgtctccaattctccgaaaatcctctcttctgcctctctcccctcaaaatcaaccgcaacaatatgaaacaatgtctggaactgcaaaatattagatcccggcttcataatttctttgagccccggatataaaagccaggaatgacaaagatatacctgcttctccttccagaattgttctgcctgacgaaatgaatccagacaggcatcaagctccagcttctctcccttcgggatatgcacgctgatcacgggatctcctttgtgaaccgatatcccgtctgtctgtatctcccataaagacgggatcctctcaaattccagacgcccaagccgaaacagactcatatccagatgtctgcaaaaccagtcgtactgcgcaatcccatattctccatacgctttataacaattttcacaccacaatgtcagatcataaaacgtatcccggtaaacccgtctggaaatcccctgttcacaataccgatcataaacctcacaggccatttttgaaaaacaatataaaaataccagccggaaatcttctctttttttcactgcttcataaaacaaattcacatctctgagaaataactcccgcagcttctcatattccccttctgtgatctccagcttttcaagctgccgcacagcgtccggcatcagggatatttcctcccaaaattccaataatttcattgtgcacctccgttttttgttttcctctgttgattctatctgtcagcatacttcattcttgtggtatttgcaattcgttttacgtcttccctttctcaatcagatatatatacaacattttgcacataatcatagaaaaatctactaaaaaattgtataatatataaaagtttatgaaagagaggattcactatgaagcaaaataatatgttagcaatgatcctggcgggcggacgaggcacccgcctgcatgacctgacaaataaagtggcaaaacccgcggtttcatacggcggaaaataccgtatcatcgattttccactctccaactgcgccaacagtggaattgatattgtcggtgtgctcacgcagtatgaatcgatcttgctgaacagctacgttgcggcaggcagacgctggggactggatgccaaagacagtggagtctatgtactgcctccacgtgagaaagcagattccaatctggatgtatatcgggggactgcagatgcgatttcccagaacatcgattttattgacacctacgctccggaatatattctgatcctgtccggtgatcatatttataagatgaattatgatgccatgctaaattatcacaaaacctgcggtgcagatgccacgattgctgtgatcgaagtaccgatcaaagaagcaagccggttcgggattatgaataccgattctacaggacgtatcgtagagttcgaagaaaaaccggaacacccaaaaagtaatctggcatccatggggatttacatttttaactggaagctgcttcgcaaaatgctgctgacagatatgaaaaatccggattccaaccacgatttcggaaaagatatcattcctacgctgttaaatgatgggaaagatctttatgcctataaatttgagggctactggaaagatgttggaacaatcgactctctctgggaagcaaatatggatcttctggacaaaaataatgctttggatctcaacgatcccgcatggaagatctatacggaagatccgacaacacctcctcattatatcggaccaaacgccgatattaaacgctctttcattacccagggctgcatgatcgacggtgaagtcaaaaactccgtgttatttaccagtgccaagatcgataccggcgccagagtcattgacagtgtactcatgccgggagtgattgtcgaagcaggagctgtcgtacagcgcgccctggtcgctgacggagtgcggatcgggaaaaatgccgtagtaggcagtccggacagcgaacatatcgaacttgttgcaaaacgtgtgaaaggagcagaataatatgagcaaggcattaggaatcatcaacttttccggaaaccacatctgggtaaaaggactgcagtcttaccgtccgatcggtgccatgtccttcctcggaagataccgtgtcatcgattttccgctttccaatatgagcaacagcggcattgaccagattcaggtgtatattaatcaaaagccccgttctcttaccgaacatatcggaaccggaagacattacaatatcaactccaaacgtggaaaagtccgaatcctcttttctgaaaacgggattgaaaacagcatttatgacaacgaaattgcagcttacatagaaaacatagagtgtattgaaaatacaccttgcccgtacgtgatcattgccccgagttacatggtatactccatgaactttgattcactgttacagagccatatcgactccgaagcggatattacgctgctgtatcattctgttgacaatgcaaaggatcacttcttaaactgtgatcttctgaatctgaaccgccagaaaggtgttctctcgattgaaaaaaacagaggaaatgcaaaaaacagaaatatcttcatggatacttatgtaatgaaaaaagaactgtttatcgacctgatcaaaaaagggcatgatatgtcctctatgtacacactgccccaagtcatcaatatagaatgcagcgaactggatatccgcggagtttcccaccgtggcttctttgccgccattacagatttgaaaagctattacgaagcgaatctttccctgctcgattttaaatccgccttcagtctgtttgatgataactggccgatctatacaaaaacgacagattcctgtccgactcaatattttgagactgcaaatgtaaaaacctctttcgtatccaacggatgcctgatcgaaggcactgtggaaaactctgtgatcggacgtggatgcatgattaaaaaaggtgctgttgtaaggaataccgttctccttccgggcgcttatgtaggagaagacgttcatgtggaaaatcaggtggtagacaagcgtgcaaagctcttacacgccaaagaaattattgcaaatgtagacaatccgggatatatcaagaggaatgataccgtataaagtaaagcaggatgcttaaggatttattccttgtcatcctgccttattttttcttttatcaaaaaataatctgaattccattcggttgtaaaattaaatctgcaagtttttcgctgtccagagaaatatgcagaaaatttctgccgggaacttttatgtgattatctcactccaaactgatatattgtcgtggtgtcgtatttttctccttttttcagtaccggtgacgggaagctttcctcattcgccgcattcggataatactgtgtctccagacagaagcctgagttatcgtggtagatcatgttgcgttttcctctgactccctccaggaagtttccggtatagaactgcacacccggaagatccgtatatactttcatggtaattccggactgctctccttccacctctgcaatcttgcgcagtgtctgatcccatccatcgatgacaaagttgtgatcatatcccttgaccagacgcatctgatgatagtcggatgccagctcttctccgatcacttttccttttgtgaaatccatcggtgtaccttccaccggccaaatctctcctgtcggaatcgaaccggtctcttttaccggtgtaaacgaagatgcctgcagtcttatccagtgacgtcttacgctgccgcagttatgtccattcaggttaaagtaagtgtggttcgtcatattcacgatcgttgtctgatcagattctccttcatagtggatcttcaactcattttgatctgtcagggtataggccacggtaatcgagaagttccccggatatccctggtctccatccgggctgtccagatgaaaagaaacactgtcttcctcctctttcacacaatcccagaggcggaacgcataactgtccggtccactgtgcaggttattctctccctcatttttcggaaggtgatactctgtcccatccagcacaaatccggcgccttctgtccggtttgccccccgtccgactgctgccccgaagaaagttccgttctcttcataatccgatactttgtcatatccaagcacaatatccttgcgctctcccgcaaaatctttcatctccacggatacgattgccgctccgagactgctgatcttcacacgcattccccgaatgttgcgcagcgtataggcagttacttctcttccatcttttgtggttccaaatattgttttttcgatactcataagctctcctgtccggcatcttttctcttccccaatgcctgtcctgtttacttcatattgtagctctgttttgcctgctccgcaaacactttttcaggaaagtggaatcaggatccgcagttcaaaccagttctttttcaaatctgttgtcacagaaccaccgtatttcgccgccgtacttttgatactcttcatgccaaacccatgaaagcggcgatctttctttgttgtgacaggcattccgttttcaaactttaactgctcttcacaataattctcacaccggattctgagaaactgtttctgctttgcaacggacagatggatcagccgtttttcctgttcattcagcttttgcacactttcaatagcattatccagaatattcccaaacaatgcactgatgtccatatcttccataaaattcaacgcacttccgtctgccacacacgtcagtccgatcccattattctgacaatacagacttttacttgtcagaacagcatccaacactttgttccccgtcttattctgggcttcataaatcttgatttctttttccatcttctccagatactctaccgattttcggctgcccgcttccgatttcaaaagtgcgatctgatgcttcaaatcatgatacttctgattgacaatctcgatgctctcctgagaaagctgataatttttgtactgcatctgtaaaatattctgcagcgtgtccacctcaaatttcatctgcagctcccgcacctgaatgtggtacgcatagagaaccgccattccactcatatctaccagggtccggataataaacatttccgctgcaaactgactgctgaacggactgtccttatcaatataactaaggttactgactgcaaacaccgcagctgtaataatcagaaccgtaaacagctcccgacgattgatatgcatttctttgccgcctttttgcaaatacttttccagcagatataaaattccaaatatgaccgcatacacgatcacaaggagcacccactggacactttttgcatgattgacctgaaacgttttcaccgtataataatagatctgccagccgaaagatgcagcaaattctccgctgataaacgccctcgcacagtaatatcc

SEQ ID NO: 7015 - DNA, 15435 bp, Unknown
  gut microbiota DNA sequence
atcagggcgaagattcagttggcagaacaagagaaagacagctttggagaggcagaagaatcttatgaaaactggatagagaaatttatcaagtatggaacattatccgaagtgacaagagaaattgtgacagaattgattgaaaaaattgttgtgaatggagataagagcattgatattgtatttaagtatcagtcgccttatccggtagaaaaacaggcagtgtaaagactgcaaatttttttacagtaattttcccctagttataatgaacacatgagggaacatcgcttctggagcggtatctggatgatatgtcgaattactggaaaagtgtgatctgtgttgggagcggaaacgagggaacatccgcagggcatacttccggcatgttaaaagagcgggaagagcaaagagtagagttgggagtgcagcagagagaacctgctctgaatgtacagctctggaaatcttatgtagatgaggtggatatttcggtgatcgggccgtcaggggttcgtgtagggccaatttccgaaaggctcggaacgcagagatttcgaatcgggggaacagaaatcctgctttactatggcaaaccaagtccatatcagaccaatcaggagatttattttgatttcatcccaacgggttcttatattgacagtggagtctggcagattgtgttgactccgagaaaagttgtgacgggaatttatcagatgtggcttccgagtcagagtgttttgaatcagggcacagcttttttaaaccctgtgagcagtgatacacttaccattccgtcaactgcatccagagtagtaacagtgggagcttacgatgcaagaagtttttcctatgcagatttttccggacgcggcgcactggagaagaatgcagagatgtgggtgcaaaagcccgatcttgcagcacccggagtgcgggtaacgacagccaaggcgggaggcggttacggagaatattcaggtacctcatttgcagtgccgtttgtgacaggaagtgcggcattgttgatggagtggggaattatccgcgggaatgatccatatctgtatggggagaaggtgaaagcgtatctgagaagaggggcaagacatctgccggggtatgagcagtggccgaataatcagctggggtatggggtgctgtgtgtggaggagagcctgccattttaaaaatgacattgacatgtgtaagggaaaatgcaataatgtgtgtaataagaaatgcattggagaaaatatgagagagaatacatatataaaaattgaaacattatatagaaaatacagaggttatgtagagacaaaaaatcttttggcagaaggattttccaatcgtcagatttccactttagtaaatgaaggttatttacaaaaggtgtgctatggacattattggctttcaggtaaacaatgtaagaagccgtttgattataaatgtatcgaagtgagtctaagcaatcctgatgcagttatttgtatgaatagtgcactttactatcagggagtattgtctgctgaaccagattatttatctgtagctacagaaagaacagatcgaagtatgatgaaaatggactttatgatacaaaggcattatttttcaaatagaaattttaatattggaataagaaaacaagaaacggagtttggaacatataatatttatgatattgaacgttcagtttgtgacttgtatcgcttagaaggagaaacagaaatagaagtagggatcgtaaagaacataaaggaaaataaatatttgtataatcgtttattaaaatatgcagaagtactacagataaaacgaggattgtaagagaggatatgacgcatgaagaacagaattatagatgttcaaaatgtaaaaattactatttcaaaagaagaattagatgattatatctgcattacagatattgcaaaggcaaagtcaaattctgccagagcggcagatgtagtgcgaaattggttgagaaatcgtggaacattagaatatctgtctgtatgggaacaaatatataatccggaatttaaagtgttcgaatctgaacactttaaaaagcaagcgggattattgacatttactcccagtgtttctgaatggattaataaaacaaacgctataggattatatgtaaaacgtggaaagtatggaggaacctacgcccataaagatcttgcttttgagtttgcagctgcaattagtccggtgtttaaattatatctaataaaagaattccaacgcttgaaggaagaagaaaacaactcgagacagatagaatggaatgcgaaacgttttctcagcaaaagtaattatttgattcagacagatgcagtgaagaattatttgcttccacagataaattatagggaaaatctacaatggttggcatatgcagaagaagcagacatattaaatgtggcactatttggatttacagcgaaagcatggagagaagctaatccagaattagcaaaaaagagtaatgtcagagattttgcaactattaatgaattgacagtactttctaatctggaatctcataatgcacagatgattaaagaaagaaaagggaaagaagaacgatttaagagtttacaggaaattgctgaatatcaattaaatgttttgaatacagcagagcagataaaaaggatagaaagctgtgacaataacgtaacatcctcgggggtattgtgcgtggaggagagcctgccatgagaaataatagagactgttgaaatatataaatatatgttatgctgacaataataaaagaaaaaaacttggagttcttgagaggaggaaaagaagatgaacctgaaattggatgagctgacaaaagaagagttacagaaaatcatagaaaagatagcgaagcggctgtcgaaagagcagtatgaatatctgcagcatctgattacagaatgtacagagaaagagaatactgccgatatttcgcctcagagtctgatgtcccaaggatttgttgatgaaaaaatgttgcagattgaagaatggaagcagcagatagaggacggtaaattatatttggatacagaagaatatgaggactacggggacgattactgggatagagaatggatagtagagtactatgataatcagcagattggggataagatcatgtttatgatgcgatttgcaaatgattgtatcaatgacaggcgttatcaggaagcaaattctatttatgagtggctgtgggaaatggaagtgggtacggattatgaagatggggaatttgtggatttggatacactggcggagaatggtattattgccacagatatgaaacagctggcattacaaaccttatatgcgaattatcaggtgttgaaaaaggaaaaaagggcagagatgctttatctgtatttcaatcattctgcttttaaaaacctgcatatggaagagatattccatgttggaagggaagcgctgaaggatcagaaacaattctgggaggattggatcgttcttctgaaaaacaaacagggtgatatcgcagggcggcttttaaaagatgcagtcttgtattctcagggaatagacggacttgtccatattgcagatgaaagtgcagcagtacacccttcgctttatcttgctgctatggatgtgtatggcaaagcacaggattatgaaaagatagaaaaaacaggggaaaaagttcttgagaaggctaacagacaattgaagatcagagcagagatatgtttgaaagcagcatatgcttcattctgtcttgggcatgaagaaaaaatgatgaagttttgctgggagtgtttctgctcagattcaacagagaaaaattttctgcgtctgtttggtacaaaggaaatggcagcgcaatatgggatgcgtggaaaagaagtgcttaaaaacagaatcaggggaaattgtgaaaatgatataaggaatacagaactgcaccggaatatcatagatggttatagttattattttcttagtttttatatgggggattttatatctgtgaaatcagcatctaaaaatccggcgggttctctgggatggagttcttcttttattcgctatggaattcggttgtttttgctctatttatatagtaaatctctgccctctaaagccgcggggagtattgcgaattatgttggattcccagatatgaaagatgctgattgtgtaatgggatttgagcaggaaataatagaagagagccagttgcataaggtaagtgtattctggaattattttcagagatggaaagcgtattacccgatcgaacaggcagaaaagaagagtattctgtcttgggcggaaaaaacggtatatagcagagcggatgcaatcgtgtcaggaaagcatcaaaatcaatacgcagaagttgcggttttgctagcaatggtaggagaaatcaaggaagatatgggaacggcgagagccagagaagaaatttttgcggagtataaaagaaaatatccaagacattcttcgtttcagaaagagatgaaatactattttgatgtaaagtgaaggtgtcggggagtttgtctggaaagatatttcatgaattaaaaatggagaatagagtaaaatgggaatgcttcaaaaaaaagaaaacaagggactgacatattatgaggtaatgcatggaaacaggaaaatagcggagattaacacaagaggagaagctgtgattctggctcttcaattttttccttatgatctttatttggaggaagaaagggattttgacacattgatcaataatatgaataacttctattattggtgtgcttcacgcgtgttgtctttggatcgtaaatatgcaaaagagattttaaacagtatcggaatggcacaggcaacgacggatcgtgatcgtgcaaaaatttctttatcatatcattgcgtgtcattaacggatgtgtattgggtaaaagaaaaaggggaagatatctcctatgagcagttgaacctctatgacaattcattgaatgaagcaattgtagaattatcattgcggggaaaacccatgacagttaccaatcaggagttagcgccggatttgtccacaaaaggctattttccgaaagcctggatcaggagaaaaaatgagtttatccttttgaaagacggtggagataatgcagtaaagaaagaattggttgcgagcagagtgtgccagtgctttgattttaaacaggtagtataccgcgaaggtttttattgtgggcaaagagtaacagagagcagtatcataacctcaaagcgttattccattatttctaaaatggcatttgaaatatatgcacaaaatcatgatctcgatgtattagaagagtgtatcaaaaaggatccaaaaacttattacggaatgaatattcttgattatctggttggcaatatagaccgacatccggagaattggggatttttggtggacaatgagacaaatgattacatttctctgtatccgatcatggattttaaccagagttttggatgttatgataccttagagggagcaaactgtcagactgtttatccggaaagaaaaactcagcgtgaggcggcgattgaagcagttgggtatatcgggcttcctcagatcaaagaaattgatcctgatatttttgaggatgagacacagtggaaggaaatgttttttagaagactggaagagttgaagagatatcagacaggagaaaagcggggagagaaaatatatggttgactggagaaaaattcctaaaatagatgcacatattcacttgactccaaaggatgtcatagatgctaatatagattatgacggaagatttattgtgaatggttctatagatgattatgaaaaaataatgaaaacatataatattgaatgtgcttttattatgccatttaatgatccatatatgctttctatggaaccagcagtggaagcagtgaataagaatatgaaaaatatgataagcggtaagataaatagattttattgttttgctgacgttgacatcaggaaagacatagaggatatgttgtttgaactagaacaagtgttaatgcaaaaagaatttattggcatcaaacttcatccaagtaatacgggatatcctatagatggagattattatgagcaaatcataaaatatgcgaatgatcataaaattctcatagaactccattcttatccaagggagaaattattggatgatgtatgttctcctgccaggattagaaatgtagttggaaaatattcaaaccttagattgtcaattgctcatttgggtggattccaatatgaagaattatatggattaaatgcatactttaatttatcagcggtcttacctgatttggtggatagaatgggcatagaaaatacgaatatagttttgcgttctttaggggttgaaaagttagtattcgcaacagattatcccgatagcagaagcatacgtgcaatagaaatttacgatacatattgtgatattttgggacaaatggattttacacaagaagaagctgaaaatatttgtaaatataatgctttaagaatgtcagggttgcagtaagcagatatgaagaagggactgcctattccgacagtccccctgtttcaagtatcatcctcccgattttttctgtttcattctcttaatgactttcagtcgtgtgaattcttcccgttctttttcttccagtgcattggtgatattgtaaaccagttccgtatacattggaatggtgatattttgcagcgcatttgcccgcttctgtgtctttttaatgttagtggcaaggcgatatgctgcgttttccaccatggaaagttttaccgtcagatcttttacttttcggaatgcatctgcagccaggtctacgctctcgcgggttgtactgaaagcgtaggtcggcgcaggcacggaaggggtgtattttacgtggggaatctcggttcccataatacttctggtctgaatggtgatggagttttcaatcggaacggtataggcaatctgagagaccatgttgataccatgctcgatattggcacgctgcaggcactgatacgcataggtaaaggtgctgtcgatctcatcctggatatctcgtgcctcatcgatcaggtccatcagttcccggatcagaatgtttcgttttttgtccatcagttcatagccttgttttgcaagggtgagggaatttttggcaagcatgagattccctttggtaggaaatgtacgcggatccatagaatccctcctttagttctgatttgcgatggagcccggactggatgtggcagtcgtggtgtcatcgtaaattgttggatgatagtatttatccagaatcttcgtatccacacggtccagctcttcttttggaagacggcccagaagttcccatccgagattcagggtttcttccatggtgcggttttcttccggaccctgcccgatatatttctcttcaaattcttttccgaatgccagatactgtttgtcaatcggggagagttcatcttctccgataacagaagccaggtttcttgcatcgcctactttggcgtaagcagagaataactggtttgccagatcctgatgatcctctcttgtgtatccggctccgattccgtccttcatcagacgggaaagggacggcaggatactgatcggcggatagatggactgtccgtttaaggtgcggtccagaacaatctgtccttcggtaatgtatccggtcaggtcaggaatcgggtgtgtgatatcatcgtttggcatggtcaggatcggaagctgcgtcacggagccgttgacaccctgtacgataccggctctttcataaagtgcagcaagttcactgtacaaatatcccgggaatccttttcgacttggaatttctcccttagaagaggaaacctcacgcatggcttcagcgaaagaagtcatatcagtcaggataaccagaatgtgcatattttgttcaaatgccagatattctgccacggtcagtgcaaccttcggcgtaatcagacgttccacgaccggatcgtttgcgaggttcagaaacatggcaacgtggtcggcaacgccgctttcttcaaaagttctgcggaagaagtcggcaacatcatgtttgacacccatggcggcaaatacaatggcaaattcttcatcggaatcatctccgagagacgcctgctttacgatctgggctgccagctggtcatgaggaagtccgtttccggagaagatcggcagcttttgaccgcggatcagggtggtcagtccgtcgattgcagaaattccggttcggatatagtttcgcgggtattcccgcatgaccgggttgagcggcaggccgttgacatctcgtttcagcttggaaacaatgggacccagatcgtcaatgggttctccgattccgttgaatgtacgacccagcatatccggggaaagtgcgatttccatcggatgtccggtcagtcgtgtgtgtgtatttttcaaagacatgttctcagagccttcaaagacctgaatcacagctttgtcttcatatagttcgataattcgtccaatcttgcgttcggatccacctatgacaaactctacgatttcgtcaaagaaagctccctgtacgccctccagagcaatcagagggccgttaatgctgctgagtcctaaatattcgattgacatgagcaaaatccctccttatgcgttcttttccagtacatgctggtaaaatgcgtcaatgtctcggtgatactgggcaaacaattccagccggtcgttcggtacatcatatttgatggcgatgacgcggtcgaaaatattttccgatttgaggatggacatggggtgtcccatcgttaccagtgcgcgtgcctgcttgtaaagatataaaatcgtatccatcattttgaactgtttttccatggatacgcaggtatcatccttgtggaatgcgttctgctgaaggaatcccaggcggatgactctggcgatttccaggatcagcttctgatcgtccggcagtacgtcgcttccgatcagcttgacgatttccagaagactgctctcctgattcagaagtgccatcaggcggtttcgatagtccacgaatttcggcgatacattgtcctgataccagggcgagaggtcatttagatactcactgtagctggtaagccagtggatggcagggaaatgtcttgcataggcaaggcttttgtccagtccccagaaacaacgcacgaatcgtttggtgttttgtgtgaccggctcggagaaatcaccgccctgtggagagaccgctccgatgatggtgacagatccgtcagtcccgtttaaattgtgcatcatgccggcgcgctcgtaaaatccggacagccgggatgcaagataagccgggaaaccttcctctgccggcatctcctccagacggccggacaactcacgcagagcttctgcccagcgggaggtggagtccgccatgatcgctacatcatatcccatatcccggtagtattctgccagtgtcagaccggtgtagatgctggcttcacgggcagcaaccggcatgttggaagtattagcgatcagtgtagtgcggtccatcagaggatttccggtctttgggtcgatcagttctccaaattcctccagaacctgtgtcatctcgtttccacgttctccgcatccgatatagataatgatatcagcgtcagaccacttggcaatctgatgctgtgtcatggtctttccggttccgaatccgccgggaatggcggcagttccgcctttggcgattgggaacatggtatcaatgatacgctgtccggtgacaagtgggattgaagccggaaaacgatggcttgtcgggcgggcagtacggattggccagcgctgtgccattggaagctgtttttgatctccgctggaaagttccagtgtgatcaaaggctcttcaattgtgtacgctccgtcctccacgatttgaatcacggttccctccagatcaggcggtaccatacatttatgcgtgatcgcgtgagtttcgggtacttctgcgaaaatatctccgccgtggagatagtctcccacagaaacggtgatgtgggcggcccattttttctctttatccagagagtcaacggaaacaccgcgggtgataaacgctcccccggattctgcgatccgctccagagggcgttcgattccgtcaaaaatgttgtttaaaattccgggcgccagtgttacagacaccggatttcccgttgcaatgacttcttcgccggggcgaagtccggttgtttcttcgtagacctgaatggtggtcatgtctttatccagtgcaatgacctcgccgaccagcttttcccgtcctacatataccatttcagacatacaaaatccggtattgcctttcaaatagatgacaggcccgttgattccataaattcttccagtcttaaacaatgctgtcacctcctgagaataagaatttgtcgtattcgttgcgcagtgcggtcttaaaagaatgatcgatcagaatattgcggctgcggatgacggcacggataccgcctgtaaagtcttccgcactgatcgtcaggtggatgccggtggcatcttccagagaagaacgcttttcctcatctgaaggattgagatagatcgtcatctcttctccgtttgcgaatacgatcgcattgtgaatacagcggagcagaaaatcatcgtattctgcggttttcatataatcatttaccagggcgtatgcctcctcaaagatcttgtcttttagttcctgctgaatgcgaccctggcggcgttttaaatccagctgggcgcgcgccattgcctggtttttctgctgtctggcattaacagtttccgctttgatacgagtctgcatctgtcgttttgcttcaattttatggtcttcaaatactttttccagtgcatcacggtaagagtcaataatggcattgctctcggctcttgcttcttccatggaagtcgtgcgcagatggttgatcttttcttctaaagtcaagaggatctcctcctttaaaaatttttgccttacaatttcagtccgatggcttcggtaatatatgaggtgataaagtcttttttgcgtcccgttccgtgccggtccgggatttcgatcagcagagggatttttcgatccagacggaattcatccagaatgtccggaaattcccgtccgaatttttcggtcagaagtacaatgccgatggatttgtcctgcagaaccttttctaattgttcccgcagttcctttcgttcatgtacgacgacaccgtccacacctgcaaggcgcattcccgtgtaagtatcgacattatcactgataagaaacattttcatcttagagtttaccaaggatcatgaaggagatgatcagtccgtacagacaaacaccttccgcaagacctacgaaaatcagagatttaccgagtacactggagtcttcgctgattgcgcctaaagcagcggaggctgcacttgcaacggcaataccaccaccgatacaggaaagtccggtaaccaaagcagctgcgagatagccgagtccggtggacaaagaagaggaagcggctgcggcatcagcggcctgtacctgtgggcctgcaaacatcatgatggaagtaatcacgaatgcgccaaagaagaaaaagacattcgttccgatggcacgtttgtatttttttcggttcctttccccgatcagatagtatccgaatgggatgataatgcttaagatcagtgctgcgatgagaataagttttgttgtaagtgtcataattggaatcctcctttaagaacgtttcttttttgtagtttgagttttggtatatgggtcaaaagctcttccgcttcctttatagaaacggctgaacatctcataatattccagacggagtacctgaattcctacaatcaggccttccataccgcatacgaacaggttgcctaatacgacaacgatccagttcggggagccggattctgcgccggcgagcatcagcacgacttccatcatggcagcgtggctgacggcaaatgcaccgatacgaacgaaagaaagggtgttggaaaagtaactcagcaaggtttcgaaaatctcgaaaaatccctgtacaaagaacattgcctttccttcttccatcttgtctgcgcgtttctggatcttccgcgtcaaaggttccttgaacagaatgagaagcagcggaatgccgaacatcactgcaaggacgattcctgccggtgtcttgtgtcctgtcataaaaagtacgatcgttgccactgcggaagcgtaaaatacaaggcctgccattccatttgcgtcaaaccatgcattttctacatcgtgagaccggagcgcattgacgatgtgcaggatcatggcgaggatgatcagccccataccaaacgctacggacacgataaatacagtgttcagcttaccgatgaacggcagtgtggtcatgtgatcgatcggccttagccagattggttctatgatatcttcaaacccgaaaatacttccgaacataaatccgaagattgtagaaaatacacctgcacatgcaataattccggcaagcggttttttcttaaaatgatagatcagaaaaccaccaatcaacagcagcagtccctgccccacatcaccgaacataactccgaaaataaaggagtaggtgacagcaacaaaaatagtcggatcgatctcgttgtgagcaggaagtccgtacatgccgatgaacatttcaaatggtttgaacagcttcgggttctgcagcttgaccggaggatctccaaaataagtgttccggtcttcttccacgacaacaaataccttgtcatcatccttgacttcttccataaagcgggcaacgtcgtcttctgacatccagccgcataaaatgtagtagtcttctttctgatcttccatccgggctgccattttccggacatcgaaattgtgggcaagctcttccagacgctgctttgcagctacgatctgaggggcttttttgacaagcatgtcggctgcctctttatttagatcctcaatttttcgagaaatatcggcaatctgacggtttagtttctggcaggcatctgccggtgttccggtgtattcatccggaatggtgatcttttcaaaatgcagggaacggaatacagcatccactttctgagattctccgggtgaaacaaaatatgcaccgtagagatagctttcgtcctgttctcctttgacaaaaattgcaccaagatcatcgatcagatatttttccaggcggccgtattgttctaccggaatccgtccaaaccggtagttgatgtatttgtagcgcagaatccggtccagttctccgtccagcggacgaaatggctcaatgagcttttgcttgtttgcaagtgtttctgtttcttttttgagcttttctttctttgcctggatcttgagatacgcctcatttgtagtgcggatcagttcgaaaatatcatccagaccaagagaggtatccggggaaatttcatcggcattctccagatatccggcgaattcttcggctttgccaagtgcatccttgtaaggattgatctccacgaacggccggagattatccacagtttttaattccgacaaagcagattcgagctggatctcatatctggacagatagagatctgtcacccggtcgatatcatttcttgggccggatatattgatgaatttcatttttacaatcattaaatctttcctccaacatatcctaaagtctcgccagaatttaatccgtaacggatacattccatggcggtggtcagttttcgaagttcttcttcttttaaaaagagatacatgttgatcgaagcaatcgaatagggattctgtctccggtcagctgtatatagatggtacaggcagtcctcatacatctgctcgatcgttaagtcctgttcaaaattataatgtcttgcgtatggcgtcttttgaaggacagcaaaaaattcatccatattagatgcttctgccatggcttttatctgctccacagaaatccggtaatgaatcgggatcaaaagggagtaaatatcggcttccttcaaattaaaatgctttttggcccggtagatccactgcatattcagcagatcaatcttggagccacagtctctggtgaaaagctccagttcttttttcttcagaaactttttgcgctctttccacatggcggtaaaataataaaggttcaacgcaagatcgtaatcaaacagggtgacagactgactgtcttttagttttttcagcggttcgtaatactctgtgcctttcagattttctacgagctggtccgttgttctggaggtgatcagcttttcaatggaaatctgcgagtatttgtcaaaaaacggtttcttgtggttcagatcaaatggttcctgataatgattgatgacaatgcgcaggcagtaattgatcagatccacctcataccgctttaagtaaagttttaaaaactttctctgattcggtccgcagaaacggtaaatctttgtgtaatcgtggtacagcgagagaatcagcactttttcgatgttgcctctgtgcagcatggtctcatccatatcctgaagtacatcctgataggaagaatttgcatttaaataggaaaccagttcggtgatacttgtaagagctgatatctcctcaaactgttcatctgtgagcagtctggcttccatggcacgcagcttggtgatgatcccactgtattcgagtaagtttcccatatgttacacctctgtgattcgttttaaaatttcctgtgcataaagtgtgtgcctgctttcgtattctttcttgagtgcaagtacacaactgtcgtttgattctgcctgctgatctaagagagtctgcgtatctgcttccagagcttcccggattttttgcagatgtgcctgtgtctcttgttccagatccagatcaaactgctttcgcttttcttcatattctttatccaggacggatttttgaagttccgcatgttctgcgatcgcagatgcggcagattcgatctccgtcaatttgttaataatagactccataaaaagccccctttttagtcagaatatataatacactatcatacaccttttggctgaaaaaacaatcactttgtcgattattttaacactttttatcaaaaatcatgtgagaataatcaaaaatttaaagagctgttgaatggtaaaaaaatagatttgtacaaaattattaaaaatgaacattaaaaagcaatatattatataaaaatgacaagaaaacgctagaaaatagggggggggg

SEQ ID NO: 7016 - DNA, 4803 bp, Unknown
  gut microbiota DNA sequence
tggaagttacagatagctgcttaatcagcagacactaaataaaaccattaaaaaactccgtaagtctctctcgaccccggagcattatttgccaactgtatattccattatttatctttccactccaacatgcgatacgcatttacatcaccattcatagagagaagtcctgctatgatcgtttctctgttttcctgaaaatattttttcactctgtccatccatgttttcttactctgcttcttctcgacatatgctctgtctttcaatactactgtattgttcatattcctcacctaatccttttttatctctttttctctttacaagtatattatatggtgtattttccaaagatactagagcctttttaacttattttaagtcgatattgactttttcaaagagcacttctgccgattcttcaaaaaatatgggaatttcgtttcttcaatacgtcaatgaaatccgaatttcccatatttattacgatttactgcatacacaccttctgaagttcgcaagcatttactttaatacgctttttacagcgtctttccatccattgtactttcgcactcttatttcttcacacatcttcggcgcatattcctgacgtttcagacgcgtaaacacttcatctccatacagccccagtcctcttccggctgcataagcagctccaatcccggagagctcttctgcatccggcacaagcacctttcgattcaggatatcgctctggaactgcatcagatactgatttctggtcggaccaccgtccactcgtagctcctgaatctcggtttttgcatcctgactcatcgcatttaccacatctgcaatctggtatgcgatacattctactcctgcgcacaccatttccgcctttcttgtcgttcttgtaatgccgattaaagcgcccttcgcttcactgttccagtacggagctccaagtcctgtaaatgccggaacaaaatacagactgtcgtctgcttctgcctttctgcagagttcttccgtctctgccggcgactgaatcagttccatatcatccttgagccatgtaatgactgctcccgtgtagttgatatttccttccagcacatagttgattttcccctgcattccccatgcaagagaagttactacaccgtgcgtgctcagcaccggtgtctccccgatattcatcataatagatgatccggttccatacgtggacttgatcattcctttttccagacacccctgcccaaacaatgctccatgggaatctcccagtacactgtggatcggaactggtttttcaaaaaatccatccagatctgtctctccgaaacagctgtccgaatcacatacttctgccagatcctgtgcatccagtccaaataactgacagatttcttcatcccatctctgctcaaaaatatcaaacaactgggtgcgggatgcgttggagtaatccgttttataagacgttccatgtgtcatccggtatacaagccaggtatcgattgttccgaaacacagcgcatgtttctttgccagtgcttctgcaccttctacattttctttcagccatgccagtttcgaagccggaaaatacggcgaaagcgcaagccctgtctttttccggatcatctctgccgcccctgttttctccacacggcggcagatttcagcggcccttgcacattgccagacaacagcgtgcgcgattgcttttccggtctctttttcccagacaagagaagtttctctctgattgctgattccgattcctttgacgctctcctttgaaatcccggacgcctctaccagatttttcaccacctgtacggcattctggtaaatttcttccggatcatgagaaacccatcctttttcattgatcatctgcttatgcgggagatcttttctctgaagcagcatgccgtcctgatcaaaaagcagcgcttttgttccctgcgtactctgatcaatactgataatatagctctctgccatgtcctctctcctgtcccctatttcaggatttcttttgccttgttcgcaataccttctgcattcaggccgtaataatcaaatacttcttttgaagttcctgtgataaccggtgcatccggaagagacatatttactacttttttcgggcattctcttcctgttacctgtgccaccatagaaccaagtcctccaaacggtgcatgctcttctactgtaaggactgcttttgcatttcctgccatgcgcacgattgcttcctcatccagtggtttgatgcagtacatatccagaacggacgctgaaattccttctgcttttaaaagcctggctgcatctttggctggttttaccatttctccgcaggcgatgatcgctacgtcgtttccatttgtatttccttctgtcacaactgtcgcatgatccatttcaaatggtacattatcttcctcgtaagtcggatctactgcatttcttcccacacggatgtacgccggtttttcatcttttaacaacgcttttgtcagttctctcgtttgcagatgatcacttggaatataaacgcgcatattcggaatcgcactcattgccgcaatatcctgcgcggaatgatgactcatccccagagcaccgtagctgaccccgccactgattccgatcagttttacattcgtgttggaatatgcaacatccactttacactgctcatagcttcttgtagaaaggaagcatgccggtgaaaccgcataagatttctttccacattttgcaagtccggctgcaatactgaccagattctgttctgcaattccggtttccacgaattgttccggatacgtatctgcaaatggtgtaaaagatccacttcctctggaatcactgcagagcgcaacaatatctttatcttcttttgcagcttccatcaatacttcacagattatctgtttatttgctgtttttcccattatgacaacgcctcctctgcagtttttaagtctttcataatgatatcatactcttcctgtgtcggaactttatgatgccagtttgctttattttccataatagaagaaccttttcctttcaccgtattggcgatcagtaccgttggtttccccttcacacgctttgcctcttcgaatgcagcgtgcagttcatcgatatcatttccgtcttttacatcgatcacatgccacccaaagcttctgaaacgttcatgcaaatcatcgtgtcccatcacatcttctgtgtttccggaaatctgaagacgattacggtctaccactgcgcacagattatccaactgatactgatgtgctgccatggcgccttcccagacagacccttccgccagctctccatctcccatgactacatacacgcggcggtctttgtgatccattttggctgcctttgccattcctacgcagaccggaagtccatgtcccagagaaccggaattcatctcgatacccggcagtttattattcggatggccaatatatttagaaccaaatttgctgaaatttttcaggacatcttctttatccagaaatcctttttccgaaagcactgcatagtatgcctccatagaatgacccttactgagtacaaacagatctctgtccggatcttctggattttttgcgtcaatgttcatctgatcaaaatacagctctaccagaacttccatcacgctcatgtcaccgccgatatgccctgcctttccggcacagataatgtctatggtgtctcttctaagctgataagccaatgcttttaaattcatatcttaccttcctttctctcactcaccgcgcagatatgcttttacgtcttcctcgatcggatcatagagatccggtttcacgccgatatatttacatgcctcatacagtaccggaactacatttttgtgaataccgacacagtggtgaatatacggtccttctacaatcttggcttccagacgtttgatgttttccacttctacccagagatatgttcccattcctttcggtccgtccacaccttttgcgtttccaagaagaagtgaatattctccattgtctccatcgaagcggcacagtgtcacttctccgtgttttgcttctgcagtcagacttcccggatgctcgaatgccagcggatacgtcagttccggtttttcctgtgcaaccgacatcggccatggcccgcagtgctgcagcagttctccgttttcaatgtcaggatgacggatcgtccagtctgcgaaaaatcctctcttttcatccattcccgcagcttctgccagaagtgcggtcactgctccgtgaatatcggtttcacagactaccggaatgccctgttcattgagaatcgcatttgctgcacatggcataattccgatttctgtctgaagcgcattccaacactggatcgcagctgcctgacatccatatttctctaccagactcttcattgccagagccagagctgctaccatttctacttcctcttctttgatcttgataaccatggtatccttgatgtaagcgatcatctgctccattttttctttgtcttcacgaactgtttttacttcttctgtcagctctgtcatcggaaccggcgccagctgaatattaaatttttcgagcaattctccttcattgcacattgtcgtccagaagtcaaacggacgtgttgaaatctgaagaatccggatatttttaaatgtttttacgacattacatactgcaagaaaatctttgactccacgttcaaaaaccggatcgtttaatctgcagtttgtca

SEQ ID NO: 7017 - DNA, 13664 bp, Unknown
  gut microbiota DNA sequence
aaaatcaagtgttttcagtttgctcagcagacactaaatagggggcagatgtgactcgcacgagttgcatctgcccccaaaactttcccgttatcccaattctgaatagccggtaaacctgtaaagttaaaaatttttcaaacccacaggaataaactttcacttctctcatatacatgggataaagaggtggacaagatgaatgaagagagaagaaaacagcagatccttcacattctggcggccggaatccgcaaggtgatggaggaagcgcacctggactatggaaagctccaggagatccggctgcgaacagatcagccgcttctgatcctgtatcagggagaagaattatttttgcctgcaggacgggcgaaaaagcatatggtgacaaaagaagagataaaggagacgctggaatacagcagtcattattccctttatgcgtatgaaaatgaaatccggcagggatttctgacagtggaaggaggacatcgtgtgggggtggcaggaaaagcaatattagaacaggaaaaggtgaaaagtctgcagcatatctcgtctgtaaatatccggatgtcacatgaaattcccggatgtgcggacaggctgcttccgatgatcacaaagaacagagaggtatgtcatacactggtcatctctccgccatgtggtggaaagacaacgctgatccgggatttgatccggcagatttcagacgggaatgcgcatgtgaaaggatgcacggtaggggttgtggatgaacgctccgagatcggaggctgttatctgggagtggcacagaatcatctggggagcaggacggacattctggattgctgtccaaaagcagagggtatgatcatgctgatccgatcgatgtccccaagagttctggctgtggatgagatcggggcacaggaggagatccgtgccgtagagtatgctatgcagtgcggttgtaagctgatcgccagtgtacatgggaattcgatggcagagatcgcgtccaagccgggactgggggaactggtgagacagcggcgctttgagcgctatgtggtactggagaacagagaacatccgggagaaatcaaagagattttcgatgagcgggggagtcttttatgcagaaactgatcggctgcattctgattcttttgtcaaccacggcagggggatttttatatggcgtggaacagcagcagtatctggaaaaactgatgtacatccgccatattctggaactgatccagggagaaatcgaatacagcggcgcacctctttttgaggtttttggaaaaactgcaaaccgggtgcaggagccttatcgcagctggatgctggatctcaaaagaagggtggaggcaagaggcgggcagagttttcgggggatctgggaggcgtgcacggaaacaaaattaaaggagcttcatcttaagagcaggcatatgagagaactttcggaggtggggatgtatcttggacagatggatgtgaggacaggcagaacaagtatgcagatgtatcttgagaatctgggggcagaaatcgaagaaacccggcaggagatcacggcaaaaaagagaatcggaaactggctcggcgtgatgagcggattgtttctggtgatcgtattattttaagaagaattttgccgggaaatcagacaggaggaattcatgacgatcggtgttatttttaaaattgccgcagtcggcattctggtttctattttgagccaggtattaaaacacagcggaagggaagaacaggcgtttctgacaagctttgcaggtctgattctggtattgtcctgggtgctcccatatatttatgagttgtttgcgtccatgaagcgcctgttttcactgtgaagagggaggcggatatgagtgtattgcaggtcagtctgatcgcgatggtggcggttcttctggcaattcagctcaaaggaggaagagcggagtacggatttctgataaatctggcggcaggcatctttctttttttctgcattgtgggaaaactggaagtgtttattcgggcagtggaacagattcaaagctttctgactcttgatacggaatatattgccatcatgctcaaaatggtcggcatcacgtacattgcacagttttcttccggaatctgcaaagatgccgggtatcaggcgattgcagcgcagatcgagatatttggcaagctggcgatccttgtggtggggatgccggtccttcttgcccttttggaaacaattcaggagtttctgttatgagaaaatatgggatattcggcattctctttttgagcctgtgcctgtttggggcggtacatacagcgtatgctgcagaagaggaagaaagcctgcagatcacacaggaagagctgttggatgaatttgatttttcagatctcgatgacagtctgaaaaagatgttcccacgggaaaaaatgaccttccgggatgttgtggagacgcttgtgtcaggtgatttgaaaaaagcgggggagcagtttacaggctttcttttcgatcagtttttctatgaactgcagacacaccggaaacttctggtatatctgattttgatcgcagtgattgctgcggtgtttgcaaatttttccggcgccttcggagaacgtcaggcttcagagattgcgttttatattctttatatgctgcttatcgcactttgtctgaacgggtttcgattggcagtatccgagatggaggcttcgttaaacttcctgctggaatttatgaaggtgctttgtccgacgtattttttagcagttacagcagcctctggaagtgtgacatccatgtttttctttgaagtggtactatttctgatctttctggcggaggcagtaatcctgaattttctggtgcctctcgtcaatgtatatatgatgatccaggtgatgggcaatcttaccggagaagaatttttgtcgcagtttgctgagcttctggaaaaactgacgggctggacgctaaagaccatgctggcgtgtgtgatcgggatcaatgtcgtacagggaatcctttctcctgcacttgactccctgaaacgaagttttgttacaaaaacagtggaggcgataccgggacttggaaacatggcaggttccgtgatggatgtcgtacttggaacggcagttctgataaaaaacgggattggaatggcaggcgcggtgatcgcagcgggtatctgcattatcccgatcgtgaagcttcttcttctggcgtttttgtataaaacagtggcggcggtgacacagccgatatcggacaaacgaattacagcatgtatcggaggggtcagtgaggggtatgaaatgcttgtgaaagtaatggcgactacagggattttgtttttgctgaccatcgctgtggtcgcggcttctgccacgtaaaaggagggagaagaccttgaaagaactctatcagtggcttcaggatctggcggtctatctgattcttgtcagcgccattttgcaggcacttccacaggaatcgtaccaaaaatatatccggttcttttccggactggtactgatcattcttctgatgactccactgttaaggctgaccgatatggaggacagttttagaagtcgggtacaggaacagaacatggaacaggagagcgcttcttttttggaagaaatccgggagaagcaggaagaaggaaagggagagatgaccctggagacggaagaaaaagagcagatcgaagtggaggagattcagattggagaataaatggaagcagtggatttccggatttggaaaaaaaggaaaactgccggcaaaacagcagcttttgatcctgcttttggcaggaatcctgctggtggtggtcgtttccccggttccggatcagaaagatccggaaatcgggacaggggcgggacaggaagaaacggaaacagaagggggagaggcgacagaacaacagtatgaaagattgctggaaaaaagggtggaagataccctggaatgcgtggagggagtcgggaaagtaaaggtgatgctcaccttgaaatcttcggaagagaaagtggtggaaaaggacagccagagggaagaaaatgaaatcacagaggaagacagtaaaggagggagcagggtttcagaagatcgttcgctgagtcataccagtatttatgagcagaaatccgatgggacacagacgccttatgtgagtaaggaaatggcgccggagattgagggaatggtgattgcagctgatggaggagatgatccggtcgtggtaaaaaatctgacagaggcagtgcaggcattattcggagtggaggcgcataagattaaaataatgaaacggacaaatgcataaaacagaaggaaaaagaggaggatatgattttgaaacgattatttaagaaaaaccagatcattattacagcgctggcggtgatgatcgcgatcgcaggatatctgaactattcagggcgcctgttcggagcaaaagaagatggggcaaaagaggcgagtgccggaaccgccaatcaggaacttttggatatctcggcagaagatctggagacagacggagagattgcgagcaatgattccgaagtggaggggacaccgggggaggctgttttgaccagcggtgaggcggaaaataccgtagcgcaggcaaaagttgccagagaacagatgcgttcgcagaacaaagaaacgctccaggcgatcattgacaacgcgaatatcagtgaagaagaaaagaaggatgcgatcgcacagatgctgcagatgacacagctctcagagcaggaagtggcggtggagacattgatggcatcgaaaggcttttctgaatccgttgtcagtctgactgctgattctgcggatattgtggtgaatgcagcggaattaacagatgcaaatcgtgcccagatcgaggatatcgtgaccagaaaaacaaacattgctccggaaaagattgtcatcacaccgatccatgagactgcagaagccgaaaaataaagaaatttggattgcggcagagaaatgcttgtgatacactaaaaggacatgtgaagttttatagaacaggagaagaagtaagatgtcagatattacaaaggagatagaaaaacgaaggacatttgccattatatcccatccggatgccggtaagacgacattgacggagaagtttcttttatatggaggagcaatcaatcaggcaggttccgtaaagggaaaggcgaccgcaaagcatgcggtttccgactggatggagattgaaaaggagagaggtatctcagttacatcgtctgtgctgcagtttaattacggcggatattgcatcaatattctggatacaccgggacatcaggatttctcggaggatacctaccgtacactgatggctgcagactctgcggtgatggtcattgatgcctccaagggtgtggaggcccagacgagaaaattatttaaagtctgtgtgatgcgccatattccgatttttacatttatcaacaaaatggaccgggaagccaaggatacattcgatcttcttgacgagatcgaaaaagagctggggattgcaacctgcccggtgaactggccgatcggctcaggaaaagaattcaaaggagtgttcgaccgtcagaaacaggaggttgagctgttctcggatacgaaaaaaggaacttctgtgggagaagtcaaaaaggtagatatcaacaacccggagatcgactggctgatcggcacagaagcaaaagtgacactggaagaagagattgagcttttagacggggcggctgccgagtttgatcaggagctggtgagcaaaggagaactttctccggtatttttcggttctgcactgaccaactttggagtggagacatttttgcagcatttccttgccatgacatcgtctcctcttccgagaatgtcagatcagggaccgatcgacccgatgaaggaaaaagatttttcagcatttgtatttaaaatccaggccaatatgaataaagcacaccgtgacagaatcgcgtttatgcggatctgttccggtgagtttgaggccgggatgaatgtgtatcatatccaggggggcagagaagtacgcctttcccagccgcagcagatgatggcaagtgagagaaaaatgattgacaaagcctatggcggagatatcatcggagtatttgatccgggcatcttttcgattggtgacacgctgacaacttcaaaggagcggtttgtatatgaaggaatcccgacctttgcgccggagcattttgccagagtgcgtcaggtggatacgatgaagagaaaacagttcgtcaagggaatcaaccagatcgcgcaggagggtgcgatccagatcttccaggaatataatacaggtatggaggagattatagtgggagtagtcggtgtccttcagtttgatgtgctcaaataccgcctggaaaatgaatacaaggtggagatccgtctggaaaatctgccgtatgagtacatccgctggattgaaaatgaagagatcgatatgaaccgtctggtcggaacttcggacatgaagaagatcaaggatctcaaagacagaccgctgcttctctttacacatgagtggagcatccggatgacacaggagcggaacgaagggctgatcctgtcagaattcgggcgctcatgacccttgtcaatgcagggcatgtctgatataatatgaaaagaagattagcgcaaacagtagacacaaacaggagggtcttatcatggcaaaggacgaaagaaatatttatacaatacaggatgactccagcatgggagaagtaaaaatagcagatgaagtggttgggattatcgcagcacttgccgctacagaggtagaaggtgtggcatctatggcaggcaatatcaccaacgagctgatcagcagactgggaatgaagaatctttccaaaggtgtgaaagtagacgtgctggaaggcgttgtgacggtatcgttggcgttgaatatgaagtataattacagcatcatggatgtatctgccaaggtacaggaaaaagtaaagagcgctgtggagaatatgacaggactggaagttgcggatgtcaatgtgaaagtggcaggcgtggagatggagagtcaggagtctgcaaaatagaaattcattgcaaaagacaggacagctgtagtataataaaggatgtcgcaggacatcctttttctgttttagaaaaagcaaaagccctgcaaaaagaaatatggacgaaagaagcataagggacggaaggagccgatatggtaagaacagaacttcgggagcacatttttaagatgttgttccagattgaatttaatacattagaagagatgccaaagcatctggaattgtactttgaagagctgacaagcgcaaaagagaaggataaagagtacatacagaaaaagctggaagcagtgatcgaaaagctggaagagatcgatgcgattttgaatgaaaaagcaacaggatggaaaacctccagaatgaacaaggtcgatctggcgatcctcagacttgcggtttatgagatcaagtgggatgatgatgttcctgtaaaagttgcaatcaatgaggcagtggaacttgcgaagaaattcagtggggaagaaggtcctgcattcgtaaacggagtacttgccaagattgcagattaaagatggcggggcggacagatgctgaagaatgtctacacagtaaaacaggtcaatgcctatatcaagaatatgtttacacaggattttatgctgaaccggctgtacgtcaaaggggaagtgtccaactgtaaatatcatccatcagggcatatatatttttcattaaaagatgagtccggcacgatagcctgcgtgatgttcgcaggctcacggtcagggctttcttttcgtatgcaggaaggacagcaggtggttgttctcggctcggtcagtgtctatgagagggatggcagataccagatgtatgccagagagatcattctggacggagcaggagagctgtacttaaagtttgaagcgttaaaaaaagagctggaagagatggggatgttcgcacaggagtacaagcgaccgattccgcagtttgtaaaaaaagtcgggatcgtgactgcatcttcgggagctgcggtgcgggatatcatcaatattgccgccagaagaaatccgtatgtacagctgatcctctgtcctgccaaggtgcagggggaaggcgcagcggaaagtatcgtgcagggaatccggatgctggaagaacaagatgtggacgttatgatcgtgggacgcggaggcggatcaatcgaggatctgtgggcattcaatgaagagatcgttgcgcgtgcgatttttgagagccgggtgcctgtgatttccgcagtagggcatgagacggatacgacgatcgcggattatgtggcggatcttcgggctccgactccttcggcggctgcagagcttgcggtgtacgaatatcaggctgcagagaatctgatgaaggaatatcagatgcgtttgagcagtgcggttttgaaaaaggcggaacagaaccgtcagtatttgaaacaggcggcactgaaactgcggctgtttcacccaaggcagaagctccttgagaacaggcagtatgcctcagatctggagttgcagctgcgcagccggatggaagaaatccttcagcaaaagagacaccagtttgctctttatgtggaaaagatgaagggattatccccgctggaaaagctgaaccagggatatgcttatgtagaagataagaaaggccgcccggtgcggcagattgcagatgtaaaagaaggagatgcgatccgtatttatgtatcggacggaatgatcgaagcgcaggtaaaaggaatgacagaagaaatccaatatcacgcataaaggaggcagacatggaaaatcaggaacagaatacacccggtctggagaaattgtttgcaagactggaagaagtgacagctgacatggaaaagtcagacattactctggaagagtcttttgcattatataatgagggaatgcagctgttaaagcagtgtaatgagaccattgacgcagtagaaaagaaagttcaggttctggacgagaatggagaagttcatgagttttaaggagatacaaaaagaaaaaacagcacagatcgaacagattttaaaagcatatctgcccagggtgcaggggtatcaggaagtgatcatggatgccatgagctacagtatgctggcagggggaaagcgtctgcgcccaatgctgatgcaggagacataccggatgtttggcggaacggacagggtgattgagccgtttatggctgccattgagatgatccatacctattcccttgttcatgatgacctgcctgccatggataatgatgagtatcgcaggggacgaaagacgacccatgtggtatatggggaagatatgggaatcctgacaggggatgcgcttctcaattatgcatttgagacagcggcatcggcatttgagatggcgccagagaagagtcttctgattggaaaagcaatccgtatccttggacaaaaagcagggatctacggaatgatcggcggtcaggtggtggacgtgaaatcttccggtaagaaaattgacggagagaaactggagtttatctaccgtttaaaaacaggagctctgatcgaggcttccatgatgatcggagcagttctggcaggagcggacaatgagagtgtacaggtagtggaagagattgcagcaaaagtgggaatggcttttcagatccaggatgatattctggatgtgatcagtactactgaagtgctcggaaaaccggtgcacagcgatgagaaaaatgaaaaaatgacgtatgttgtgtggaaagggctggatgcagctaaacaggaggtggagcatttgtccagaaaagccatctcagacgtaagagcactgaatccaaaagatgattatctggagattttgctggagtcattgatatacagggaaaaataagggggcataccttatgctattagaaaagattcaaaaagaaaatgatatcaaacagttaaagccggaggagctggaaaagctggcagaagaaatccgtcagtttcttgtggagaaaatcagtgtcacaggcgggcatctggcatcgaatctcggtgtggtggagctgacgatggcgctgcatctggcgtttgaactgccgcaggataagatgatctgggatgtgggacatcagtcctacacacacaagatcctgacaggacggcgcgccggatttgacgatctgagaaaatatggcggcatgagcggatttccaaagcgaaaggaaagtgaatgtgacgcatttgataccggacacagctccacctctatttccgcaggcctcgggtacgtggcggcgagagatatcaagggagaagaacacagcgtgatctctatcatcggagatggagccatgaccggagggatggcatatgaggcactgaacaatgcgtcccgtttaaaaagcaattttatcattgtattaaatgacaacaatatgtcaatttctgaaaatgtgggcgggatgtccagatatttgaacggactgcgcacggcagaggcatatacgggactgaaaaagggtgttgaggataccttgatgaagattccggtacagggtgagaagatcctgtaccagatgaaaaagacgaaaagcggactcaagcaattatttgttccgggtatgtttttcgaagatatgggaatcacctacctgggaccggtggacgggcatgatatccgaaagctgtataagacatttcaggaggcaaaacgggtagatcatgcagttctggttcatgtactcaccaagaaaggaaagggatacgttcccgcggaggagaatccatccagatttcacgggatcgttccgtttgacattgagaccggggaggcaaaagagaagagctctaaggacagctataccgatattttttccaaagtattctgtgatattgcaaagcaaaatgatgcagtagtcggaattacagcagccatggcggatggaaccggacttgccagatttgcaaggatgtttccggaccgattctttgatgtcgggattgcagaagagcatgcgctgacctttgcggcaggactggcagcagggggattaaagccggttgttgcggtgtattcctcgtttttacagcgggcgtttgaccagacgattcatgatgtgtgcctgcagaatctgccggtgatgatcgcagtggacagagccggcctggtgggcagtgatggagagacacatcagggacttttcgatctgtcatttctgaatatgatcccgaatatgacgatcctttcaccgaaaaacagatgggagatggcggatatggtgcggttctgtgcggatttccagtatccggtggcactgcgttatccaagaggcgccgcttacgagggattgtcggcgtttcgtactccgatcgtctatggaaaaagtgagatcctttatgaagaggaggatattgcggtgatctttgtagggcacatggcagagctggcagttcaggtgcgtgacagactgaaagagatcggatatcattgctcactgatcaatgccagatttgtaaagcctctggatacagagatgctggaagctctgacaaaggatcacagactttttgtgacgattgaagaaaatgtattgtccggcggatttggagaacaggtacttcactatgtatcgagagcaaagctggatgtaggtgtcagatgcatcggaattccggatgactatgtagaacacggcaatgtagacttgctgcgcagggaagtcggactggatgcggagacgattgtaaaacagattattgcagattatgtgacgataggaaaagattgacatgaaagaacgattagatgtattgcttgtaaaaagaaatctggcagagtccagagaaaaggcaaaagctgtcattatggcaggaaatgtgtttgtagaaggacaaagggaggacaaagctggaacgacatttccggatacggtacagattgaagtgcgcggtcatgtgcttccttatgtgagcaggggcggattgaagctggaaaaggcgatcgccaactttgacgtcagtgtggatggaaaagtctgtacagatgtgggttcgtccaccggcggatttacggattgtatgcttcaaaacggtgccagaaaggtatttgcgattgatgtgggaagaggacagctggactggaaactcagacaggatgagcgggttgtgtgtatggagaagaccaatatccgttatgtagtgcccgaagatctgggagaaccgattgatttttcttccattgatgtttcctttatttcgctgacaaaagtgctggagccgatccggaattacctgaaggaagacggtgagatcgtggcgctcatcaagccgcagtttgaggcgggcagagaaaaagtcggcaaaaaaggggtagtccgcgagaagagtacccaccatgaagtgattgagaaagtagcgctgtatgcgcagtccatcggatttaagattttgaatattgatttttcaccgatcaaagggccggagggaaatattgaatatctgattcatctgaaaaaatggccgcatccggtggaggatgcactcttggaagatttgagtctggttgtggatagggcatttgagacacttgcaaaataagaggtgtggtatggagcgtttttatattattacaaatctgatgaaagatccggattatgggattacaaaggagattcagaaatatatagaacagcatggcagagagtgtattctggcaaaagaagatgagcagggatttatttttcccggaactgtgccggaaaatgtggactgcgggatcgtgctgggcggtgacggaacactgatccgtgcggcaagagagcttgcagaatatgaatttccgctgatcgggatcaatctggggacgcttggatttctggcagaagtggaacggtcggatttttcatatgcgctggagcgattgtttaaaaatcaagtgggatttgaggagcggatgatgctttccggtgaggtttccggcaacagcagttatcagaatgtagcagtcaacgacatcgtgatcaccagagatggaagtcttcggatcgttcactttgatgtttatgtaaacggaacgttgctcaatagctatatggctgacggtgtgatcatctccactccgacaggaacgacaggctataatctgtcagcaggcggaccggttgtagaaccgacagccagtatgtttgtgattacgccgatctgttctcatgcgctgaataccagcagtatcgtgctttcggcggaagatacgatcgagattgtgatcagccagggacgatatggaaaagacgagcaggcactggtgacgtttgacggggcagatatgctccgccttggtaccggagaccgtgtcacgatcaaaagatcagatcatgtgacaagacttgcaaaactcagtgaagagagctttatgaagacaatgagaaaaaagatgaaaggaaactaatacaatgaaagtaagccgtcatgcaaaaattattgaactgatcgcacaacatgacattgaaac

SEQ ID NO: 7018 - DNA, 239 bp, Unknown
  gut microbiota DNA sequence
accggtacaagcgaggtaggagtgcatcaggcaaatccggtgcacaatctgaagacgtgatgtggggcgtaaagccggaagtatgtgagctggctgccaagaaaagccgctattgtttatgatatacccgtaccgtaaaccgacacaggtggatgaggagagaatcctaaggccgacgggagaagcattgttaaggaactcggcaaaatgactccgtaacttcgggagaaggagtgcca

SEQ ID NO: 7019 - DNA, 3033 bp, Unknown
  gut microbiota DNA sequence
ttttccgaattcattctgttcgctcatgttctcacctcctccgtgcgatgtcgcacaataaaagagagcctgtttccaagctctcttttcattattataagattccgcctccatcaacagattttaaactgttgatattgataatctgataatagccctctccgattggtctcatgtaaaaacgctgcgcatctgaaccatttgtatcataaatatcgatatttgtatggttgtctactccatttccaaacacatccaaacgcttatttgtattgattttcggagcgagttcaaacgcaaaattccctaatattgaatcatttactgggattatcttccatttctgagcatttgttccattccttttataggctacaacattctgtccattctcatctttaccttcatgtacatccaaaaacagaccatttcctttgcactgcatttcatagaatccatctgtgtcctttatcagcttccaccactgattatctcccccgttccattcatataaatgtacattcttaatttcttccgtttctgtgttgcctttatatctcaaaatacaatcccacgggaaattataatacccatgcacactcgcttcttttccactgctgtcccctgaagctccatcgtaatcagaagaaaattcagccagctggttattacctacatataatgccacatgattcacttcatttagaagaatatctcctctgttcaatgaagtaccaactggcagccttgtccatcctctcgcacaaagctctgctgccatattccctgtatatgtagctgatccagtatcaaatccagcatttcgcaatgctgttatgatggagcttgcacaatcgtaatcctttggcccccatcctccgagacgataaccatatgaattgtcattacacatatttaccatattttgaatgaattgttctaaatttgccataaaataatacctccataatctattctttacttatttacgagtttctatatttatacacacattggaaccaccccccattccataaacattcattatttagtattatcgtctttatttaccaacttatctgcaacttctaatcctttgataagaacaactggcacatttaatccagcttctacaaaattttccaagatcgatctaatctcgttaataagcaagcttgcaagtacaaaccatccaagtaatgttgtaacctgtaaatctactccgatagtctttcctatttctatgaatactgcacttgctccaaatgctaccataatcatcaaccagtaccctaatttctttaatacgcctttccatcctttaacagaattttctttcttagccattctgctcttcatccatcctgttagccaatcagcaatatttaaaagcaaaaatgctacaaataaaatccaatgttctccgaggatgtacgagagaacagcaacgaccgttcctacaatcgcattataaacatcaataattggttctgcataattcattttcttcatatcctcactttccttcctgtattcgaattgtaaaataaaatgtgtacagactctctcttattgcacgattacctctccataacactcatacgtaacaggatttttatattcttctgcagacaatgtaacgtttctgtttgttctgaattgtatatttcccgttcctacaatttgctgtgcaacactcattaacatcactaacctttggtctccatctggagtaaatgggcatccacgcataattagtctgtctttgttatcgtgcgatccatttttgtctgtataaatcattcttacctgataccgtttgtatccgcttttccgatattttagttcccagttattttcgttataaatcttccattccgtctctacactcatgtcttcgcttaactctcggcccatatttgcactcagtggtacatcacctgcctgtgacgtcaaattatccacaatatcttttttctctacaaaggatgatagtgcactctttatttcatttattgcatacactaaattctctttcgatgctgtcgcaaggtttcctaagtttccaatgcttttcttaacattctttaactgttcattcagatttccaatgtatttgctgtaaaaatgctgcaatcctgtccaacttaaatatttcatttaaccaccccactttacatggtaaacaacgaatctatctcttcgtttgtaatactttccacgtttgcatccgagcctgccggaccctgtggtcccattggtccaatgtcccctttctcaccctttaatccctgaggtccttgtggtcccgtttctcccttttcgcctttttctcctgcaggtccttgaatcccctgttcaccttttgctcctgccggtcctgctggtccagcagccccctgcaatccctgaggtccctgtggacctgtcataccggtggctcctgataagtctgtgatgtatgtgtaagatgacgcacctttaacatataacttggcgttgtcagcatcctctacatttcctgtgtcaatcatgacaaactgcccagtctttactccatctgtcgcaaacccttcattcatcgcattagcggaagcaaatgtcttagcgattttaaacgcttccccagccggaccttgtggcccctgcaatccctgaggtccctgtggacccgcagctcctgccggtcctgctggtccctgtgctccagctgcgccggtttctcctctgtctcctttatctcccttaaattctccacttttaattgcttcatccagcgattttcccttatacgtaacatcagtagaaactactttgtcagttttctttcgaaatgcaccatttgcccattcctgcattttctctttaaatgttccaagtcctgttaaatctaaaaattttgccatgttcttatctctccttttctttaaaacaatccattaatctcctcttccgtgataacttcgtttccggcgcctgcctccagttccccgatcttctgctctacggatttcccttctgaaagctgtacac

SEQ ID NO: 7020 - DNA, 7244 bp, Unknown
  gut microbiota DNA sequence
tttgtggataaggtgttgacgattacaacgccaccttcaatgctctgtgccatctttcaaacctccttattttactgtgactgctgtagaccccagtcctgcgtttacagacatccatacgtcatagctctgcttatatccggatgcgttggtaaactccaatgtctgcgcttttgtaaatccgccgtcaaatccaccgacattaaaagtcggagttccaaatgatgtagggattgcatacacgatcttctcacctgctccggcatttactgtaaaaccgcgtcctctgccgcctgcaagcgaagaaccctctaacgcaaggatatccgcattttcgagtgatgctttgttagtcttgccccagtatacttttggctggaatgtgattgtcacggttctggatacagacgcatctctttcatctgtgacagtaagaacgatattcgtatttgctttcactgtctttcctgtgtatgatttcttccggatgctcttatccagattttcggcagcttcgcttgcaaactggattttctgggtcttaggttctttatttaaagtccatgttacatcagatgcagttactgtcgcgccgatttcattgctgctgtttgtagctgtcaggctgttaattgcaatcttggtatatgccagatcgtcaatcttctgcttgtactcatctgtaaaatcattggcagataacccttttccctcctcttttcttacgtatcttgcatcgtttttctgtaccaggtgtgcaagtccatcctgatccaggtacttcttttctgcagcgagcactgctgcttttgctactttctttcttggcattttcactctgctcctttcataatctcgtcaatctccggattggtgatcgactctatctccacagtccctccgctgtttggcagatttacggaactgattggatcattacccgacaaaagctgcagttgattcccctctaactgcagcccgtctcctttttgctttaattgctccacgatctgttccagtacatgtttatccgctggagcctcataatcttctggcttttttcgtgcttttacacttaaccgaatttcaaatatggtctttccttctcccggaatagtcttatatacatatgcctggattgttccacttcttttcagtaattcatttggaatgtcgactgtgatgtcaccgtcttccgctttcccaagtactaccaatgcaccattcgtacatttgtcagtgaaatgtacttgtatttgttcttcttctacttccattccgcagatttgtaaaacctgtccgtagtcccattgtgtaagttttccatcgatatccacacgcctggaacattcatcaaatactgcaattatcattcttatgcgcctcctccaagcgaatcgatatccgaattcggaatcccctctatccctgttacttctccggaatcaccccggggaatttcgaaatcaaataccgcctctgtttctgtacccgaattttcaacagacgcctctgttcctgcctccccggtcgtagtagttccgatccgtattgttgctgcttttcctgccggtccttccggaccctgaatacgtcctacatttttccactggccagatacgttgtcccatacatatagatttccatctaccagataggattcgcccgcatttcctgttggatgttctctgttcaattcctcttctgttttataggaacccagtatagtaacacccgttccatctttccctgtatccccctgaatccctttttctcctcttggaccaggatcccctttctctcctttagcccctgttgcaccggataaatctaccatgtactcatatccagttgcgccctttctataaaccttggcattatctgcatcatccgggttaccggtacttatcatcacaatcgcattttccggaagaccatcggtttcaaatcctgcattcatctgtcctacagaggcataaatcttttgcacgtttaaagcaatgcttccactttctatggttcctgactgcagagaatcaatttcaatcgttgtaatttcaatcggatcatacttctccaaacgatttagtatgtctactagtgcctgatattcactggttgactgtatttcggatgcagccactaagttttctctgacctccatcttcactttgaatgatgtgacagcattgctaccatcaatcaaatgcagctggcattccgtatttcccacttctgcaaccatttgcggcgtcaaactgaacaggacgcaataattgcttatcacggttccttctgtgtaagtttctgatccgcttggtttcttacaataaatcctggccttactgattgtctttgccattccggaaatcatacagcgcagaagtctgcccgaatcgtactgtactgcatagattgtttgcataattcccgggtttctcacgtcaatgtataaagttgtcgttgtttccatatcacaccttctttcttatcctggtatccacctaacgaggtaaacgtctcccggcaacacacctccaccgcttttgtatcgcagcacacagtcccacggatagttatagtatccggttgtccaaatttcctctcctgtctgatcaccagtctggccgccggttgttccgccaaattcattttggctggcctgcacaacctgtccatttccaattcccattgcagtatggtttacgatgttcagaaggatatcccctctttgtacaccggatcctgttgccagatttatctgccctgtcacatccgtaaaaccgcaattcaaaaatatttcccgcatattgccggtgtaggttgccccattgctttttaccggaaccccggcattttcccacgcctgaatcaataacgaggagcaatcgtaatctggtccccatcgatttgcctgatcatatccgtggctattatcatttgcaatttgaatcgcccagtttaccgcagcttctattttttcagatcctcctgcatattgactcaggtagttgtaccaatatcttgcctgctgccgcctctcggcttccacttctacgcctgcacgttcaaagtttttcaaaaatgcagatgccagatattccggtgattctccgctgaccttaaactgatcaaacgacagcggatatgcagcggttgcaatccactgaccaaaagaaactgtaacagaatctatccacgtaagctgaccgtttggatccgtaattccatatccgttcgcaccggcccaatttgtataatttgttgccggtgtccactgtaccagtccaaaacctccactatagtttccctcctgcaggctttgccagattccgggattgatgttcgattcactttgcatgttgccgcatatcccagcaatagcattcagcgaccatcctttttgttcaaaaaaacttagtacttctcttgcattcccctgcatctgctctgtggtcagataaaagtttcctatcgtccatgacatcagaaatcaccttctttcgtgattccgcccacaagaaatcctttttcaaaccttagatttgtcccattcgaaaaaactgccgttccagtcttaccataagctccgggtccaacgttttccgcatctaacagaaccgcatccttcgtgatccttagtaagtttttgctgtcttctttgtttccatcggtgaataatagtgcatttccaacatacgtcatacaaagaacgccctcatcctttttgtttgaaaatgatattgttccgtcctttattgtcacacgccgattatcgctcaaagaatcgcagatatatttcccttctgcgtaaattccatttttatccagtctgactatttctttcccgcttgcatccagcacccttgcaacgccactattattgtcaaatcctccgatttccaatgttccacctctgatccgatcagccagcattgttcctgctgtgataaaatcagcaaagaatccctgtcctgttccaaaggtggaccagtcccagtctcttccatctgccgttcttttactggcaatctcgaaccccattgtaccaaggcacattgctccaaacgtttccgactccggattcaaatcttcaaataaaacagcgcgtactttctgtttttgtgcgatgtcggactgcgcccgaaactgtgctttcactccgtttatgatgccgttgacctgtgctcctatcacagtgccatccggtcggattgcactttctatccgatttgacatacttgatacatccgcaatgaaattatattgaaagtctcccaacacaacagatgcaacctcttcattgatgcaatcccattccagttctatgacacgtgcatctgttacaatatccagtttgctgtgacgacaatgtaccgtgtctccgatagaaacttcttccagttcccggatatccgcgtacaattccgtatcatgcagcataaccatatcagcggatatcgtaaccttcggcttgtcaattccagcttcaaactgttcctcgcatttttcttttaacgcattgttcagttcttcctgtgtattgcagatcacgattccgttctcttcgtcatcttccgcagcatcggccttcatcttcacatcttcaaatgtgatcactccgtattttattgttggatatttatcaagcagtggtgagtccacccatggttcattcccctctatcatgtatccgttatatgcctttggtacaatccttgtaatgacctcgctggtatcaatctcttcctgcagcccgttttccgcaatgtttttcccgtataaaacctgcaccccatgatcgattccaactcggtcattgacggtgatcatataattatcaaaaagaacctcaccgccccatctgttcaggaaggagttctcctcttctccgcagattgcttcgatcaggttctttgtctggtaatatgctgttgatattattttgatattagattttccactgtactttttatttggtgcggtcatgatgtccagtgcctgctgcccgtttttttccgttggacgtatatccaacagaaaacaatcatcaatcgcatccataaaaaccggttccagttctgcactcacgccagcatctgattttgctttctttttgatccgaaataactgtgttccattgaatgactccagttttacgactgcgtcctcttctatccacttccaacgtccctcttcatcgatcgggtgctgaatctccgctttccaacttccgtttagtattgcttttacagaagcgctctccggaagtaatggcatatcaccgttatgttcataatccgtattttctggtttataaagttctatccttataagcacctccagttcggaatcactttcagatcaaatcctcttgagatatacacggtattctctcccggtaaaagatgtagttctgcataatctccatacacagatgtgttcatcaattttccatcttttctgtatgccatcagcctgtctgtatcaatcaccagattctggccaacattcgctttcatttgacttccgtttacctgcaggatgcactcaccttcacctgtgatcaaatagactggtcttgatctgtcatatggattgtaaaacacctcttccggtgtatattctgcttttccatctgttcgatatcggtatccctcacacgtaaattctacatcaaactctccgacctcttttacttgccgttctgctgcattgatcttagtatgttttacgtgatagaaatactccagttcatcgcttaaaatcagttctgtatcatcttttctcataagccatcttctcgcagcccgaaatcgttcctgccatctttgaggattttctgcaaatgtaaatggaactgtgattgtaatgtcgctcacagttccatcttctttgaatatgctcccatctcttcccggtatgttcaattccgtatagttatactctgccgaagggatagacggtctttctcgtacaagtattcctatttctgtatttgtatggccgtttctgataatttcatacatttaccgtctcccctttcctctttttgtgtgatgtacttgagatgtaaatccttttttggctgtttctacaatataagaatcaagcttttgatttccaatttgcacaccgacattattgttcaaaacaatgttagtctgtgtagcacttgccagagctggagttcctccgtacatactctcactcatcgtcttggcaactctttttaccgcattggaaaccttgtacacattctcattgattccttttaccattccatcgataaaatccggcatccatgtttcataatctctcaaaggtccttcatccggtcttgaaaagtgtaaaaaggatcgaatcttatctccgattcctttcactgcatccacaatcccgcggactccggataatatcccttctttcaatccattgataaaatccgctccccattcccaggcattatcgatccacccggaaattgtggatccaattttttcgaaaatatcacttacaattttcggaagttcccggattgcatttttaattccatctcgtaatgcttcaaacccactgatcgcagtttcttttaccagagataccaatgtggataccacatttttaatttcattccaaatatttgatgtaatctccttgatggaatcccaaatattcgcaactgcatttttgatattatttaaaatattctccagatccgattttaatttttcaaaatctccagtcaccagatcaatcatcaatagtactggtgcaagtgtagcgtttttgatgaattcccatgcattttgtgcaagttgcttaattccgttccagatcccatttaaattctcttttaatttcgtaaaagaatctgtaatggttgttacgattgttcttatcgttggattggcaagcaatgacgataacatctcattccatgcattgggaatcgtttctgtaaaaaattctacaattccgtcccatgctgcaaaaaatccatctttgattgcctttaaaatcccgttcacaccatctcggaaccatttgcatttattgtataaagcaaccaatatcactatgattgccgttatagccgcaattacaggatgtgctgttatcattccaagcagtccggtcactgccgttttaattccaccgaccaactttgtcacaactcctccgattccggacaacttcgacagcactcccgccactgcagatattccgagtgatatctgccc

SEQ ID NO: 7021 - DNA, 10382 bp, Unknown
  gut microbiota DNA sequence
gccaccagaattccgactactacaatcacctgttgcacgccttccggtagagctgaaaatttattgacaagtgcggtaataagttctgctaccttctggacaattggtgccagtgtatctccgatctgaatcgctgcggtttccagagatccttttaattcctcgattgctcttgatccatcactcatctgagaattggccagcctttgtgctgcttcctgatcatttgccgcattgatatatttctgaatcccttcagtcccgctatccatcatcacagtagcggctcgcattgcatcggatccgaagattgtcgataacgccgcatctctggatgccgaatccaaacctccaagtttattctgcaactcctcagcaatctctgaagctccaaggagatccccattggaatctcttgtctgtattccaagctgttcaatcattgttgcagcgctatctgttggtgccgccagcctctggagcatggtttttaaagatgttcccgcatcgcttccctcaattcccgcatctgcaaaacgagccaaaaccgctgttgtttcctgtatagaccatccagcgttttttgctccagcagaacactgtgccagtgcctgtgtgagaggttctacatccgtagaagatgcagctgctgccccggccaaagcgtttgccgcttctgcagactcatttgcagacagaccaaacgctcccattgcctgtacgacaacatttgctgcctctccaagatccatcccggaagatgccgcaaggtccattgtagtttttaatgcccctgctttaatgtcggcttctgtcaaaccaccttttgccagttctgtgatcgcatttcctgcatcagttgcagaaaagactgtatcctgtccggtctggattgcaagctgtcttagatcttccatttcagacatgggcttatcaagtgctcccgccgcctgactcattgcatcgttgaaattatttgccataacagtggatgcagcccctacaccggtcagtgcccccgttactggcagcaaggattgtccgactcctttggccttatttccaaactctccggataccgcagatacttttgcaagattcgcacttgcacttcctgtagtctcttttagtgatttcagtttctgttctgtctcaacaatctctctttgaagagaatcgaatccttctggactgatcggctgtccaaattcatcatctacttgctttttctgtgctttcagttctttcagtctatcagacgattggtctacctctgtctgtagttttttgtactcttccgtatcaatctgaccactttcttccatagacttcatgctctttttgagcttatccattttttcgttggtctttacaatctcctcttgaatcggagtatacgcttctttccaagcatcataatttccagcggtttttgctgcctgttcgcttgcctgttttaaagtttccagcctgtttttcgtttcactgatcgactgctgcagcaacttctgcttctgattcagcaattccgtattcgtgggatccagcttcagcaatttattgacatcttttaatgactgttctacaccgtatagttttttgtcaacaccggacagtgccttttccaacttggaagtatcgccaccaatctctatggtaattccttttattctgctccctgcccttacatccctcctttacagtgcatcaatatccgcctgtgttgcaattttcggataatcatactcatcattcttcatttcgataaacatatcgttgatcattccaatgcttaacaggtctaaatcagaaatagaaataccgcattgtgcacatcgaagcataaacaatgcggtattgacctcacggtctatttccctctctttttttttggaactgacatctgtttattttctgatttccacatttccatgatttccggcagaatctcatagatatcaaatgtctcgaactgatccaaccactcgttgatatcgtccggctggtcaggatcgccatgtttatgcatcagaaacgcaatgttttcaaacatttccagtgattcgatcgggattccgctttcaaacttactttcatcaaattctgtaccttcttttgcgcattttttctgcatctcgtctttgagtttttcctggatcttgatctgcttttcaattttctgcatatctacaaaaatatctctcccaaatttcagtcgataaatccgggggattgcggcagaacttttgaatttatattctgttccattgattgtgatcgtctttctcatcctgttctccttttatgctgcaacttcctgatctggaatgtacaccttatcaaaccatttttcgtataagtcatctgttgtatctgctgttgtctttgcccgaactgccattttcttagctgttccaagctgtacagcggatgcagaaactgtgacagtgtcagttgtaggttcaatcgtgtcctctgttgtgctggattctgttgtaggacgtgtagaggtacagcaatagaaccagaaccgtgttcccctcacatcgccgtcaatttcaaatcccagcgcaaaccgttttacttttgcagtcgcttcctccagcatgactttgttcttgtcaatgtattcacttaaaatcttttcccggaactcatccgtgatcagcgccatttcccagtctccctcatatccgctattggaagaagaaacataatacttgattccatccgcataaaacggtgtcagttctccctgtgcttccagtgaaagcgatacggagccaggtaccgcaaacggtgtatcaaatgtaatttctcccgtatcactttcctgcaaaagcgcaacatgcgcattatggatattgaatttgactttatccttttttgttgcctgtctttctttccttacttagccctccacttcatataatacttcatacatattttctgatttaatatactgttcacttttctgccagaagagatctgctgcatcaagtgccgcttctacacgttcttccagttcaaagtccttttcatctgtgtacagttcaatatcaactttgtctgatttaaaatataccttcccatctgcggaaaaatttctcgtttccggaatcaaccagcaaataaaaggaggattcaccgcctcacattcttcgaaatgatgataccgatattcaatttccagtacatccagaattgcttctatcctctcccttgtcataaatatcgttctatcctttcctgtaaaatttcctttgcgtgcttttctgcaattttgatatgcgggatcccgtccactcttccaccattcctctttgcgtgtcctttttccagcaaatgtgtaattcggtattccggctttttggaatataccaccatatcatagcggtgccttccactcaaatttttgtctcgtttatagctccagtgctttgcatattcaccggtatctccttccggtgatatggaacgtaattccgcagctgtctgcttcgccgtctctttcactgccttttccacggcttcctgtacatcctcacgatacgcatctaactcctgcatgacttcgattgctaactgatcaatattaattttcggcattgtttctcacatcctcataagtcgttactaccctttccagagaaagcaataaacaaggtggcgtttcatcgtatttattctggatctgtatgatcttgtactgcttttctctgattatgcagatgtccatcgtagaaatgtcttctaccggcaaaattgcaactacttcgtcaatctgattggataatacctttgcctcataaaaccgtttgattccaactgtacgaaatccgaatcgaattccagcttgcctggtctctacaatcttccggccttttacgctgcatatatccagtgatccatcgttaaatgtggtaaactttgtatccttacgtctcggcattgcatccacccgcttttcttcggaaactgcgcatctgcagtgatatgatttctgatttataattttgaataaactcatctacctgaccggctcttgcatacatgcagtaatttaagagcagctctttttcttgtgtttcgctttcaaaatcacaaaatcctattttgccctcaaggtacgcttttcctctctctacgataccagagagctttttacactccctgatatccatatcccatgtaatatccagaaaattcttcacatcttctaacagatcgctcatgattatgcctcattctttgttacagtcacctgatatgtcttggttgtctttccatctgtcacttttgcttttactacatttcctgcgccggaagcccatgtaactctgctgccgtttgcaatcggtttatcattgtaggtcaattccagttctgcagtgctgtctgcgattaccgcctgcaccgtgtttgatgcgtctgttgttgtcaaagtatatgtcaatgttccttctgcgaactccggtgtcagtgtatgtccccctaccttgaaatctgcaagatttgcattttccacattttctacacttggaacaacttccacttcataatgtgctggctgcagatcactgatatccaaaagcatgaaggcattatcatctactgcaaatccatgaccatacgttttgatcaggtaaaccctttcatcttccaggaatctgtaatcatctgaatacaagattcttccgttattttcgattccagctcccatgaggtaaagctttgccataccaaatacagcctttccgactcctaccgccggagactggatcacatcgattgggaatggcagtgtacttacatatccaccgcccggcgccggtctctgtgttgccgacaggactttactgaaataatctgacggatttaccaccagaatcagtgtgtctacggttcttgcctgtcctttttcattgattgccagaacagatgccaattttccaagctgcacatcattaaactttgtaacctttactgcttttttatctggatatactccacccttgatcgtaacagagtctcccacctgttttgtcataccgattggcatgtcttttccagttccattgatgataccgtcttccaatccatttgcaagcgcttcatacagaacctgtctcacataagcatccaaccattctggccccagatccaacattgctttacacaccggaagaaatgctgacagtttgctcagtgtcacatctacctctttaaatccggatgtcagctcctggatgatctctgcgcaaagttttccccatgctgctttctgatatccattcgtattcatcatcattcgtgtcaaccctgttacggatgtaaactggattttggacaacagcggatgatctgttttcaaatcttcgaatactttgtcaattacggtatatggcattaccacatccagattttctactgcctgtttcggattcggtgctttcatggcttctgccagtttctgataatattctttttctttggatgtcagctgtcttacgccgcgctcagacagaattctctgatctgcttcttctacgattccccgtgcctgttctatgacactttcctgaatcttatcgcacagctccacaaacgctgcctggaactgctctgcatctccggctgtgattgcctcattcatcttctgtacgattgctgttttttccatttctaatacatctaaatttttccttaaatcatgcctcctctaaaaagatttaatacattgttttttcttggtttcttgtcttcctgtggtttctgcattgctgcaatctgctgccggaagctctcctgactatttaactgtctttgcatatcggacagcttctccagaatctcttctgtattgaccggttctgctgtctttcccataatctcatcaatgagtccatattccagcgccttttccggagtgaggtaagtctcattttccattaactcaatcaactcactttcctcaatcttcgccctttccagaaaaacttgccggtttgcttccatcatgtcatccagatcatcggcatattttctcagttgtgttgcattgcccgagcaatacatccacatattgtgtatcagtgccgttgtacctaaacacatttttcttgtgtcacacgcctgtagaatcaaaaacgcaacactgtgtgctacgccatccacaatcccgactttctggttttgtttttgcttcagtaaattgtaaatagcaacgccctcttttacggatccaccatttgagttgatatgcagctcaattgtctgtccttctggaatttcactcagtttctctgcaaaatatttcgcggaagtctccgagtccttatattcccatgcgttccagtcaaattctccatattctgtcacatcatcataaatgtacagaagtgttttgttctctgcctgaacaggctgcattctccagtttgttatgtttttccttgtctcacccctttcactctgtggtttctatatccaatcctgcaagcaggtcttgaatcttactataatttttcgtcataaagtgctggtttgcccagtcttcttcaattttcggttttccgagcacttccaaaatgtcattgatcgtaaatgctccgcttgagatcagcttgtctactggagttgcaatatcaaaaatatcaatatgcttgactgccagagtctctatcttcacataatttccagctttaaatcctgtgtatccatttctctttcggttgatctcctgctgcagcatcttaatgagcggatctatcacaaaggtcagaagttcatcaattgctttccctgtatcctgtacatctcctttggccagactcggtgggaaagaaaatgctcttgctgtaaattcaaagatgtcatcagctagagacttgatatctcgtgttgactctgtagaatacgtctttccgttttctgaaatatcctgatattcatatccgtcaaacaatgtcaacaccgcactgtcgctttcaaagaagttcttaaaatgcgtgctcatcaactcctggaatgtttcatcgaaattctcactttcctgtgcaattgctccaatattcaggattcctttttttcctcttgattttttataggcatcctgcgcatatatcagtaattttgaatacgtttcatacatcccatttgtgagattcctcatattttctgaatttaattcgaaaaacatgacttccgacatttcccgtgtttcagacaattcgtaaccgtcaaatgtgatcccgctgaatctgtactccttcaatgccagtacctctttgctgtaactgtctgccacataaatgtgattgtttacttctactacaaggcattcattgttccggtacagcttgccaatcagcttattcatgaatgacgttgcattctggttctgatttggttcgtaattccaaagataatactcctgcccttttacttctttcttcttgatatacgttttaaattcgcatttgctgatggcatttgcaattttattgacacaagtccagaaagccagttctctcagatatacttcgtacatagcactctgtacatctttatctttcataatgtcatccactgtgatccttgtggtactgctgcctccaagttttttgatcaaccagtctttaatacttaatttcctacgttcacccccttaataactgtaaacctgtattttcggtgttggttttgcccgtttctgcggcagcacgttttccacagtcatcgccgctacaaatgccataaatgggtctgtttttctgctttttccttctatttttccatatacataatttcccatatcggcatcatcctcttttcctggttttcttccatgcctgattagttttgcattattggtggcccaccttaattctggagcatctccccaccgcaaccattgatttacaaagcagctatcaatcagaggtgccactttcataatgtctgatggccggatcagcttcagattcttatttactttcatatcaaaacctatttcctgcagatatttcccgatcaatgcgaaacgaaaatcatccaaggccaaagctttgatattgtaggtgcgttttgcttcctgtatataatttgtaagcaatgacggatgtatttccacgtcatctacaagcgtcaatcttccggaatctgcccactctttccatggagccttgatcctcggaatgtctttcgaatttaggcacatccatgaatggctgatgtcaaaccgttcatctccatctcggaaatgcagatctacggaagcccaatctgttaattttgtataatcaattccacaaacacagctccatctttccagatccggcagtaagatattggtcgctttgatattatcccactccgtcacactcatttcttctgcattttctggaatattcattcgctttgtcatgaatgccggaagtcttctcggatttttcttccattcccggtattcttttctgatctcttccataagacttggcaggtatggtaacgatggatttgccatcggccagttttcttcctgatccacatcttcctttttattcagtttacagataaatggtaataacccattatccggttcgccgccccgtaagatctgttcggaagtttccagcagatcatccagcggtccttcccgcacatcaccatttgtcgtgtagtaagaacgtcttggatgtttcttcttaccaagtcctgtcgtaaagacgtttatattcttatagtcttcatattgatggatctcattaaaaatacagattccagaacgaagaccgtcttttcctttcggactgtttgttcttcccttcataatagactttgttttcaagcataaaacctgttctttcgtccatcggaagaatttctttaatttctttatcacagacggtcgttcaaatgcgtttatcacgtcatggactggacgcattgcctggtcctcattattggcgcagatatctacatcgtactctctgattccattatgcggggacattaaacacactgattcgagcgcaattgtaccatcttttcccgctcctctccccaacatacagaataaatccggccatcttggaagcccggattctctccaatatgtgcaatcatgaagtccgatcacaaacttctgccagggaaatatttcttcaaacgggaagtattttgacatcccgatatatttttccagctgatcacaatctatataaatatcttcatgctcaaaacaccattttacatgcgcaacaagcaactcctgctcttcgcatactgcatagatttttttctcaactatatcaatccattcctgaatatatggatgtatgttacagctcatcttcatcatctcccgaatcatcgccaaccggcttaattcctagactgtccagtattttaagcatttgagtattgaccttaattcgctgatctatcgagtcatttttcttttgtcctttttgccctccgccattattatattcaacgatagcacctctctttttgatatctgcgatcagttcattctccaggtcccagaagtccatatatttatcgaccaagtcgatgtaatattttccggtggttccattccgggccagctgatcaagaaggtcctctttaatttccactcgcaataattcttttcttgtttttctcgcccttataccaccccctccgtcacgcgcgcacgagaaatctcttttgtcgggagcacccaccggtctctacgtggcaaattaaaacccgatttttttcgaccgggggtatcctgacaatttgattcttctttaccatttttcctctgtcagcggttcttttttcttttgctttcgatatccatgaacctcttcatgacaatcatgacacagactgatcaggtttctccgtttctcacctctgaagctgtaccagatttccaatgctttatctggatgcttctttacataattcacatgatgaaccgtcgttgcatttgtatactttccacgtttcttacataactgacattcatatttatcaagctttaacacctgttctctcaatgctttccacttgccccatgtatagaatctgtggatattttctcttatacatttctttacaaatgcaatctcatgttctgtcatattctcacctcaattgcaggagaaggaatcgaaccttcgaccttcagctaaggagactgacgagcttccactgctctatcctgctatatttgtgcgatgtcgcacagtgtaggcttttgcccagagccttttatcgtctttgctcaggacgcagaaaagcatccggctttcgccagatgctctctgctattttccattattcacttcttctacaaattgcttcatcagctttgtaagctg

SEQ ID NO: 7022 - DNA, 5265 bp, Unknown
  gut microbiota DNA sequence
atgagagagatcttgtaaaatgattgttgacagtttctctatctaatgttaggataaggttgtattcatttatgtacaagcaaatttgtgcaatgaatttttattctgcatggcagcagaagagttactttggcatagtctgcaataaaatataggaataagtttaagacaaggtatagaaagacaaataccttgtctttttttgcgtgtaggaaggaggaaaatacctaaaaattgcagacagaaaggagagaaaatggcagagataaaattatttgacacatggacatttcaggaagaaatgccggaaccattcagcaggtttttacaaaaagaaggattacgaaaaaccactaccatggtggaatgtctttcccagtataatcagggaagacaggcaacactgcatccccccacattgagggcaatgctcaatattgcagggatttatttgaaacaaacagaaggagctcttgggtttcaaaaaggaaattatgatttgttgaatttctattgcatggaatatgtaaaaggaaaacgacgctacgcattggtttataatccgatcagtgcaaagatacgtggtgtctgtaaaacagaaaaacaaacatataaagctctggattttgttgaaagaaacgtcagtgacggagaggagcttttggcaatgcttatttatgtcagtctggaaaagaaagaagcattatataacctggagtttgctcagaattttattttattcatgcagcagatgaaagaaggatggaaaaatgcaaaacttgcattaaaagcagcttttctttgttgtgataacctgtaccggagagtcgaaaatgtacaggatttcagcaatgaaggaattccgttggagaaaagccagcttggaaagaatggtatggaacaactttccacacttgcaatcgaaagtgaactgtatgcaccaaacgatgcgataaaaggtacatttcagatttttggagaaacgaagaaagtaagagaatggacgttaaaagaattacagaaaatttacagacagcactggcaggtttctaaagattatcaagaccgtattccacagctttcagaggatatgaaagttggggaatatgcgcaggatatcctttctgcaattgtagagtctcctttccggaaatttatgatcaccggaaatgcaggaacaggaaagacaacagacgcacagatgattgcccagattttaggagtgccttattttgctttgaactgtggaccggaaaccgatgaaagtacactggtggcagggatttatccaaattccaggaaaaagaccgaagatagcatgaagtttccttctttacaggaatttgttacagatccgatgcaggtattagaagaagtagcccatacaagaaaagaagggattaccaaaagcgaagcctttcgggaactgttagatgcagtgtatcagtccggttaccagaaagcaaaaaatgaaggggattttgtaatgcaggaatcggaaatcataaaaggctgccgaatgccttcagtgattgaaattatggaggcttcccttattgtagagccagggacacttggaaaacttaaccggttattagatgactccaggaaactggaccttctgtacggggaagtcgtagaacgacatccaaatgcaattatcatcatcactaccaatctgaattatgttgcaaatagggaatttgatttttccgtggtatccagaatgaataaggtacagcatcgcaaagatttaacagaacagcagttggcagaacgtgcaatgtttcggacaggctgcaaagatatggaagttttaaaacagatggcaaaggtaatgaaacgactggatgcagtcgtaaaagaagaatttggaaaagccggactttgcggctaccgggaatatgaaaactgggtatatgaatatatgcgcacccaaaatcttgtaaaggctgcagaagatacggtattatccaagcttgcatccgatgaagaagatagggatatgctccggcaggtatgtatggagatttatgtagagcaagggaagggatctgtatgagaagtaaagaaataggaaatagcaggcagacagagaagcgcttgctgcgggatatggaagtattttcttctcctcagtttttaaggttagtgcaacggattggaaaagaaattacagataagcatgatgcacagatccggttttattccgatgcaacggatcacagggccggttattttgaggggcgctatatttatatcaataccatgaatatgcttacacaaagttttccgactttggatttgagaagcaaaagcctgataggcgtggaaggacatgaatgcgggcatcagaattacagcagtatctatctgagacggaaatatatagatggaattgcaagtgggattttatatccagcctggccgctgccggagacggagcgagaaactggatttttacaaagtatgaaagagggttttcaaaagaaagatgcggttctattaggactctatctgcaaacagccggaaggctgcatggatatctggaagatgcctttatcgaagaacagatgtgcagaagatttccaggaagtatccggcaggggattttgcagaaccgtaaaaggaatatggagcagatttctagtctgaaaagccagattgtacagaagaaatcaaagctgaagattatgttacttctgttggtgcaatatatgtttacccataaggtcaacgtatgggacggagaagttgcagaatatatggaactgcttagaaactgtattccggttcttttgaaaacgactgttgatatgggggaaagcgcaaggtatcttgcaacaaaccagattttattgaagttgtggcctttgcttttagaagaagcggaaggcatggaaagaaaaataaaatcgacaggagaaaacaaagagagcgtattgaaacaggcttttgatgagtggagaaaagatctgccacaatactcggaagaaccttcctgcagggaaatccgcatggagcgaaaggaagcttcggatgttctttggaatggaggagaactgaaacgtactttttcagaagaaatgcaatccattcaaatagaaagagaaagtgtagtaaaagagaaggaaaggctgacagaaggaaagacagagcctttgctttctgaattggagcaagaaactgtaaagacaattgatattggaagagaactgcacaatatttgtctggaattaaaaagagaagcaagggaaaagggatatgaggaatggatgcgggagcgtttgaaagagattttagaaaatacggagtttacacctgtgaaccgggaaattaaaaagcgtgttttccgaaaagaagtcatttcacaaaccgcatatcaaaaatatagaatttttcaaccgcagataaaacatactttaatgaaaatgaagcaggatttactaccggttttaaaaaggaagaaaacccatattttgcgctaccagtatataggaaaaagattggatatggcacatctttggaatcctgaaaaaagaatttttcagaccaaaatcccttctcaaaacatggatacagcgattggatttttattggaccagtctggttccattgacagcaaacggtgggaaacctctgtgctgacagccctttgtgtggtggaatttgcacaggtatttgggataccggtatgtgtgaacggacactgcacagggagagagcatataggaaggaaacgagaggaaattgtgtgtttgcattcctatttagagtttggtgagaaagaggaaggcaagtaccggattttggatatggagacaggcggagccaacagagatggggcggcccttctttacatggcagaaaaaatggtaaaaagaaaggaaaagatgaaaatcctgatttttttctgtgatggacttccaaatgcacaaggctatggcggaaaagtagcaagggaagatttacagaaggtacaaaggcagctgaagcagaaacagattactttgtttgtggcagcgattggaagggatcaggaggatattcaaaatatttacgggaatgcctgtatcaatgcggagaatctggaacagcttccgcatcagattgtaaagaaacttttagaatacatgggatagagaaacaggacaagggactttttcaggtctcttttttgattggaggaattatggagcagaaaaaagaatggattgaggatttctggcgtacagggtatgcaatccgtctgggaaaagaccagtattttcaggaaatcagaaacaaacgtattgtaaccgcaaaaatttggaaagccgctttctttcaaagcttaagagaagctgagatatttgctcaaaaacatctttggtatacggggatggatccgcagatttgctaccgtgcttgggtactggtatctattgaaagtgaagaagaacaggagttgttttggaatggaaagcagtttgtcccggaacttgggaaggcaaaacttttttccagttcgcaggaaatgcagacttatgtaaaacgtttgggactatccagacagacttatccggaattattgccggtagagaaaaaacagatgaaaaatgcagcgtaaggaggaaacaggatggaaattaaaaatttagcacaattaaaacgggttatacaagagaaaagagaatttattatcagagtacaccgacaggaaaaatttttaggacagaagagaatacctaacgtggtacaaagtaatggattttattctgtcatatccggacagccggagcatgaggtcagttgtgcaaattatggaaaaggaagctggattgattttgggaaagcaactcagtgggaatttcaggaggagacatgcagtatgtatttgccagaaatggagcatatacctgaaaacctgatttggacgattggattttgcaaggataaaaagaatatcccacaaaaactttcctgctccattctctgtaatgcttattatcatggggaattattgctgccagaagcaataaaaaccttcccggaggcactggaatacgcgaaggaccatttagatgaaattccattaggagaaatgaattatatagaaaacagtgatgtactcgatcaggagaattgtgagttggtagctgccgattcgaaagaaattccagaagacagcagcaaagaaaacggtttgaaaagttccaaagaggaatggtggaggatcattgaaggaataaaagaacatgaaagtagactggcagaacagggaa

SEQ ID NO: 7023 - DNA, 21514 bp, Unknown
  gut microbiota DNA sequence
taaaatgaggaaggcgaaaaacaggaggatatgaaaatgtatgatgttataatcataggagcaggaccggcaggaatcagtgcaggaatttatgcagtgagcagaggacaaaaagcactaattttagaaaaaaatcaggtcggaggactgattcgaagagtgtccgctgtcacacattatgcggcaattgtagagggggaaaccggggaaagctttgcaaagcgcctgaggaaacaggcggaaaatgcaggggtagaaatcctgaagaccgaggtgaaaaaagtagaattgaccggggtggaaaaaaggatttatacagagaaagaatgttattgtgcgaagaaggtaattttagcgaatggtacatcaccaagaaaactggggattccgggagaaatagaactggcaggacgaggaatcggaatgaatgcagcaaaagatgcaatgaagtatcgtggaaaacatgtatatgtgatcggaggtgcagatggagcggtaaaagaagcactgtatctggcgggggttgcagaaaaagtaacaatcatccattttgaagaaacgttgggatgcattgcacaatttcaggaaaaagtagcacataccccaaacattgaattacggcttcacgccagacttcatgctgtgtacggagtggaaaaagtagagtcattggaaatcttggatgagaaaacaggagcaattgagacaattgaagatccgggatgtggaatttttgtgtatgtaggtacggttccgaatacagaattatataatgagatcaggttggacaatgggtttcttacgacagatgaaaatatgcagacggaaatacccggtgtatatgcagttggtgacattcgtgtaaaacaggtacgacaagtatctacagcagtagcagatggaacgattgcagcaattcatgcagcacgataggaggcaaatatggactttataaagaaaaacgggaagggattacttttttgtctggctttggcagtgccttcagctgttttgggaaaattgtttccggtcgtcggtggaccagtgtttgcgattttaattggaatgatacttgcattggtgattaaaaaacgggattcactggaatgtggcataaaatatacttcgaagaaaatattgcaatatgccgttgtacttcttggattcggactcaatttggaggttgtgatggagacgggaaaacagtctttgccgattattgtgtgcaccattacaacatcattggtgatttcttatattttgcatcgcacaatgaacattccggaaaaaatctctacactggttggggtgggatcttcgatttgtgggggatcagcgatcgcagcaacagctccggttatcgatgcggatgaagaagaagtagcacaggcaatttcggtgatttttttgtttaatattctggcagcattgatttttccggtactgggaacagcgcttggattttcaacaacatccggggaagcatttggaatttttgcaggtactgcggtgaatgatacctcttctgtaactgcagcggcttctacgtgggacagcatgtatcatctgggaagccagacactggataaggcagtgacggttaaattgaccagaacattggcgattattcccatcacattgatacttgcattacgcagggcgcggaaggctgaaacagaaagcggagaaaaagtgtctctgaagaaagtgtttccattttttatcctgttttttatcggagcaagtctgattacgacagcagcaacagcagcaggagtaccgacagaagtttttcagccattaaaagagctctccaagtttttcatcattatggcaatgggagcaattggatttcatacggatgtagtgaaattgatcaaaggtggcggaaagccaattttaatgggaatggcatgttggcttggcattaccgtggtaacgctcagtatgcagcatctgctgaatttatggtaatcgtcaaaacgacaaactaaaaaacccaaaaatacaaaattttatacaaatttcatagaaagcgttgccggattgtgatatagtagcactattgaatgaattttggaggttttattatgggacgttttgatgagaaaattatgctggtaacaggagctacttccggaattggaagagcggttgcaattcgcgcagcaaaagaaggtgcaacagttgttgcggtggggcgcaacgaagagcgtggagcggctgttgtagcagcaatggaagaagctggtggaaaaggagaattcatgaaatgtgacgtcagcaacaaagatgcagtaaaggcactttttgcagaaatccaggaaaaatacggaaaacttgatgttgcagtgaataatgcgggaatcgttggtgcttctaagacggtagaagaactggaggatgatgactggttccaggtaattgatgcaaatttgaattcttgtttcttctgctgcagagaagaagtaaagctgatgcagccatcaggtggagccatcgtgaacgtgtccagtgttgcgggaatgcgtggattcccttccgcagcagcttatgttgcaagtaagcatgcagtcagtggactgacaaaagcagtggcagtggactatgctacaaaaggaattacgtgtaatgcgatttgccctgcaggaacagatactccgcttacagagagaagttcagcagatattaagacgagaatggcagagattgcagcacagggaaaagatccgatggaatggctgaagaattctatgttgtctggaaagacagagacgttgcagaagaaaaatgcgacaccggaagagcaggcagcaacgattttgtattttgcaagtgatgaggcaagacacattacaggttccattgttgcaagtgatggtggatttactacatactaaaataaaacgaaacaaagaacctcttgggagtcagtcggctcctgagaggtttttgtctgtttcatagaccttttttacatcagcccggcatctgaaaattgtgcagaaacagatgagaagagagcatgcagcaaaaaaagacatgcagagccgataatccaagatttcagcagtagctcctacaattacagaaaggatgctgctgacagccatcagaatcatattttcaaatgcattgattctggcgcgcatggattccggaatgtaagactggacggcggcaacacgtaaggtggcgctgtttgttccgagaaaaccggcaaaggcacggtttacgagcataagaggatatggaagccaaagcagaataagatccatgcattcgtaaaaggtatagactgcaaaagtaacgtagaattttttcttttttggaatttcaatccggtactgcaccactccgccgatggtgcgtcctaaaaattcagcaatggaaaataaagaataaagtgcggcggacattccgggggcggtacggaaaaatgcgaccagaatgggagcatatccggaagcgaccccatttgtggctgccatatagtagtaaatagcctgtaatccacgttcttttttaaaatagcggagaacttcttgaagatcttctttccatacctgaaaagaaaatgttttttcacacacacgtgtttcttccgtcaactgaattgtgttttcaatgagtgcagcacatatggaaaataatccttgtccgataaaaagccacggcataccgatcgtatccataagtactgcagccagaggcagcatgatcacacgcagtaggggatataacatggaagaaatggcatatcctttttgttccattccacttggtatgatctttggaaaaatactgttatatgccagttcatccagacttcccagtgtagcaagaagcaaagaatatccaagataaccaacgtatgaaaagtcgaaaaacagcaaatagattcccataagagcataaaagattccattgatgaaatctccaaatacaagaaatggttttctgggaaagcggtccatccagggagcaaccaacagtgggattaaaaaattggggatcaattggattgcgattacaagagcagatgcaaaggtgcttccagtttcatcaaaaacaagaaatgacaatgcgaaattgcccacaattcctcccatacatccaaaagttgtagctgcaatcaacagagaaaaatttctggtccataagggattcttcatatcgtgatatcacctcctgttttttagtatacaggaagaatgaaagaaagaaaataagggaaaattgagaaaattttatgaaagttttcaggtaaaagacgaaaagaaagagatgttgaaaaaagaatccattctttgtacaggatgatataatggagctagcaaatgaacggagaataggaacatgttagagcacgaacaaaaaaatgtatggaaaatgatagggatgcggattcgccgggaacgtatcaaaagaaactggagtcagtcaggtctgtgttatgggatatgtgcagtatcttatctttccaaaattgaacagggaaagatggaagtatcagaagagattttgaagcttttgctggaacggttagagttaccgtggattgatgacaaagaaacaaaggatttagaaagttttgtggaagcacagtatgaatttctatttacgcatcctatacaagaatttttaaaacaaaaagaaatatttcaagagaaaaaggaaaagttgtattccagttcgttgatcgcagatgcctgcattttggaagcagtatatgagagtcgtaaagatgaaatagaagagggattggaacgttacctggatttcaggcagcttgctgttctgcgtatgctgcagggaaggctggatgaggcaatcacattgcttccaattccgtttatgtatatgcgggcaggggagattctttatgagacaggccagaattacgcatcagctatttcttatctgcaaatgggctataatctggcagcccaggaagggatggcgatgctgatgctgcagtgccgcattatcatcggaaattgctacagtaatcagcaggaactggaaaatatggagagggagtatcaaattgcttcgcgtctggcaagagacctacatcagacagaaatattaaaggtgatcaactataatcgggcatctacatgggtggcgcttggaagctataagaaagcgtacgactatttttcaaaagtagaagaacccgcgatattagatttgcataagcttgcaatctgttgtgaagcgtatggaagaaaagcggaggggatagaagctgtaaaacgcgcagagaggatgggagaattcggggatgatccagatgatgagaagcagttggaagtggaaatgtgtcgattggtccgctatcgtttggaacatgagaattatctgaaggaagaggaatatgaaaaacttttgtttccttgttttgagaaaatgaaagcaagactgcctgttggttttgcggtatttcatgtgccgtatgtactggagtggtatacagacagacgccaatataagcaggcatatgagatggtgaggaaatatgggggatttattcctgttttatagttttccaatcagcgcgttttaggtagcaaaataggggaaataatatgtttcccccaataaacgatctcatcctccaatcaggattacaaccttaaatgatgtatcatcataagaaatatccagtgtcccctcatatttttcgacaatatcccgaatagaagaaattccgattccatgagcagatttgtcttctttatcagaaatatactgatttttttggactacaatttcattgattttagaattgatcagttccagactaaaatatccgttttccgtgtagcggcatttcaattccagttttcgtctgtccggagcttctattttttgacatgcttcaatcgcattgtccagtgtgttggcaaacagtgtacaaagactgacatcgtcgatatggattatacaaatgatgggggggataacagcaattgaaatcaaagcgcttggaattcttctgttactgattgcagttttctgttttgtattgttctctgtatatcgtgtttctctgaaaaaagcagagaagattgtaaacttaaattaaaaataagtttacaatcaagcatccatgcactatactgaaaaaaagaaatcagcatggaggcagaacaatgagtttgatacaggaaataaaggaacaggtattgcagggaaatcagattgcaaaggcagaggccttgcagttatatggggaaccattggaggaattatgccttgcggcagacgagatccgttaccagttttgtggaaatcgatttgatctttgtacgatcattaatggaaagagcggcagatgttcagaaaactgtaaatattgtgcacagtcagcctgttaccatacagaaattgaagaatatccgctgcttgcagtggagaagatcaaagagcaggcgaaatacaatgaagaaagaggagtcctgcgttattcgatcgtaacttccggaaaagcattgaatgacacggaagtggaacatgtctgcgaaagcgtccgggaaatccacaaagaatcaaagatcaaggtctgtgtgtccggcggccttttgaatgaaactcagtttcgaaaattaaaacaggcaggcgtcacaagagtgcataataatctggagacatcccgacagaattttccgaatgtctgtaccactcatacttatgaagacaagatcgcagcgatccgcgcagcttggaaagccggaatagaagtatgcagcggagggattatgggactgggagagaccgtggaggaccggatcgatcttgcattggaagtccgaaaattaggagtcaaatccatgcctgtaaatttactgaatccaattccggggacaccttatgagcataatccggttcttacgacagaagaaatgcgtcggatcgttgcagttttccggtttttgcttccggatgcatggattcgccttgcaggaggaagagggcttctcccggataaaggaagatcctgctttacatccggggcaaatgctgcaatttcaggagacatgctgacaactgcgggaatcaccattgagcgggatatgcagatgttaggagaactcggctacattgtgaaataaagaaactttggaaatagaggaaaagtggaagtgaatttcatttttttctctatttttctttacaaacaaatattttttgttataataagttagccaaaactaataaaagttaaatgaaagtaatttcaaggagatgaaaaatgtttgtattgggtaaagtattaagtacaacagcagttttactgtgcatattgtgtctggcagctccgctgaaaaaaacaaaggcagggcagaaaataaaaggacttcggatactgctgaagccgcatgtgttatatggctggctgctgcttgttataggacttatgcatgggattatggcaggtaagaacccggggatgatcagtggcaagctggtatggatggtattgcttgttctgcttcttgcggcctgcctgaaaagccggatgaaaaaatctgtctggatgtttctgcacagatccttatctgttgtttttgcagcaggaatcgtatttcatattgcgtatgcagtgatattctaaaactgcagtttttgtttcctccttgtaaatctttctgactgacgttatactcagaacagaaagtattttcactagaggaaggactaaagagagaatgacgatcaaacagaaaaaaacaattgcaatagcagcaaccggcgggaccatagccggaaccggagaagcgggaaagacggcagtctatcatgcgggagagatgaatgtggagtcgattctggagacaatcccgatgattcggaatgttgcagatattgagacggtacagttgtttaatgtggacagcaatgagatggatgaagagaagtggatcacgctggcgaatcagctcaatgagctggcagcccgtccggatatcgatggaattgtggtcacacatggaacagataccctggatgagaccgcatattttttaaatctgacagtatatacacagaagcccgtagtacttacaggagcaatgcgtccggccacagccaccagtgcagacggaccgtttaatctgtatcaggcagtctgtctggcggccagcgatgatgccagaggacagggtgtgatggctgtgttttccaacacaatctattccggaagagatattcagaaagtaaataattacaagacagatgcatttgatcagaacgcattcggctgcctgggatatatgcaggatgagactgcgtatttcttttccagaagctttaagacacataccatgcagtctatttttgctctgcgcaggctggaaagtctggcgaaagtagccgtggtttatttttatgcaggcgcagatgagaaaatcctggattatctggcagagacacatgaagggatcgtgatcgtgggatctggcagcggtaattataaccggaaatggatgaaaacgatggagaaactggcagaaaaaggaacagtgtttgtcagggcatccagagtgtcacagggaattgtatttgatgacagagtgtttgatccgatggatgtctgcattggagcgaatacgttgtccgggcagaaagcgagggttcttttgatgcttgcactgacgatcacaaaagatgtaaaacagattcgaaatatcttcaatcaatattagaatggatgcggcgtatagattgacaaaagtatcgtttgtattataatagataatacaaatgatacttttttaatgaaacggaggaacgtaaaaatgtggatcgtgatctttttaggaggcgcattgctcaccggctatgcgctgtaccgccaggcagtcagagaatcgggcagtagatttcagtgtcgtcactgcggacatacgtttcggacagagtggaaaaatctgtttcttgccacacacagctggggagaatataaattaaagtgtccgaactgtggtgccgcagattattgtgcaaatctggataaaaagaagaaaaaataaaaagaaaggggactacagggatgttgattcgattggatatggcaagtgctactccgatttatgtgcagctgcgcaatcagattgtgatgggaatcggcacgggtgcattgaaggtcggggaaaagcttccgactgttcggcagatggcggcagatgcgggagtcaacaccatgacggtaaataaaacctatcagctgttgaaggcggaagggtttattgagattgacagaagaagaggtgcagttgtgaatccggtggaggatacggcgggagttttccgggaaaaactggaaggagagcttgcacttctgggtgcagaggcaaaaataaagggaatgaacgagcaggagtttctgcagctgtgtgagacaatttttgagaatttatccgggcagaccggaagcctccggtttggataaggggaaggacggtgcatgatgtatgggatacgagattatgatgtgtgtgatggctctgtttgtgaatctcttggtcgtgggatgttttgcgctggtttacggaacaaagatgaagtatgaaaacggtatgctctttggaatccatatgccaaaagaagcacagaaagatccggaagtccagtcattgatggagcagtatgcagttcgaatgaaaaaattttactggtggaatgtggcaggtgccgtactgtcaggtctgctggcatttagctatacttccatctttatgtttggatggatgttctggatttttgagtttacgatcggaagtatgggctttctctgtatgaatcatcggaaactttatgacatcaaagtaaagcatcagtggtttgcagcagaaggtgcggacatcgttgtgatcgatatcggagcaagtgcaaaggcagaggagaagcggattccggcagtctggcatctgcctgcagttgtgatcctggcatggctttgttttttgccggggatgcgaagatgggtacaggaagaggcagcaaatatactggttccgggaatggcactgctgacggcaggtttattctgggtattgcacatctggaccaaccgcagacggtgtgacgcatacagtgaaaatacgcagatcaatacagcgatccatgtcagggagagaagaatgtgggcatggatctggcttgtgggaacatatacaagtctgatcggtatgggagaaattctctggcagatttcccgtaaaggatatctggatgttgtggatacgatcatttgtgtcatattcagcatggcaggcggtctgtttatacttgcggcaatcctgtggatgatgaaaaagcggcaggagcttttgaaaacagaagagccgctttcctatgtggatgatgatatttactggaaaaatggctggtataacaatccacgggacagacgctgggtggttcctgacagaatgtgcagttcgaactattcttttaatatgggaaaaccgggtgtccgttatctgacaggagcactggggagtgtgatcgtcatcggcgttttgtggctggttgttgtgttttttgggatggattttgtccgtccgcagctatctatagatggaaaccaggtgacagtcagaagtgctgaatatgggatttcttttgacaagaaagagatagaagatgcagagcttctggaagacttgccggaagaagattttgtgaggattaacggactttctgacagccgccagcttcttggaaaattcaaaggcgaagagtccggaaaggcgatgttttatatccggcgtggagaaacaccggttttaaagatcaaacttccggaatatacagtttttgtcaacagtgaagaatccgggaaagtgcaggaatggtacgaggaactttcctcttgatttcatatttttttcgtgatatacttctcctaaaaatttgaagtgatttttaggaggagtatttttatggacgcagaccctgcagggaacaagattatttttgacttatgtatcttattatttttcacattgatgaatgcttttttcgccggagcagagatggcagttgtttccgtgaatcacaaccggatccgcagtcttgccgcagagggcaataaaaaagcagtcgttatccaaggtcttttcgaagattccacgaagtttctttcaacgattcaggtagcaattacatttgccggattctattccagtgcttcagcggcgtcgagcatttcaccggtattgagtgcatggatggaacaaagaggaattccatatagtacagcgattgcgtcaaatggagtgacgcttgttttgatgttttttaatctggtattcggagaacttgtgccaaagaggatcgcgctgcagaaggcagaacagttctgtatgatcacagtgatgccgatccattatatttctaagattttgtctccgtttatcaaactgctttctatctcgacaaagggagtgttaaaattgctccgcatgaagacggaagatcaggaagagatcgttacagaggaagaaatcaaagcaatgctgaagatgggagcagaatccggtacggtcgaagacagcgaacgggaaatgatcaactcggtattttctttcggcgataagagcgcaagagagctgatggtgccgagaagagaagtgtttgctgtggatattgaggatccggatgaggagattctggatgcagttctggaatccagacattcgagaattccggtttatgaagaaactgtggacaatattatcggaattcttcatgccaaagatgtgatgatcgaaatgcggaaaaaaacgaccggagaaattgagatccgcgggctattgagagatgtgttttttgtgccggatacaaaagatgccgatgatctgtttcgggaacttcaggcatgcagaaggcatatggcggtgttggtggatgagtatggtggattctccggaatcattacagtagaggatctggtggaggcaatcatgggagatattcacgaagaagatgaagtcgaagaaccggaaatccagcagctttcggatgaagagtacctggtagacggaggtatcctgctggaagatttgaacgaggaattgccgttgtctctgttctcggaaaactatgacacactgtcgggctacatgattgaaaatctgggatatattccaaaagaaaatgagcaggcctctgttttggcaggtgagtggcagctgcgtgtagaacaggtgaaagataaccgcattgcgagggtacatgtttccaggtgcatggggcatgtatcagaaaagtaataagtaattattaggaaaagtaagtaacagacgctctggaaaaggtggatttatattgaattctaataaattcaaagttataataaggctgtatttataaatagaattcgtaatcaaaggagaccatctatatgaaaatgttatcaatcgagcaggaattgaaaagtaattcttatccgggaagaggaatcatccttggaaaaagcgaagatggaacaaaagcggttgccgcttattttatcatgggaagaagcgaaaacagccgcaatcgtgtttttgtagaagaaggacagggaatccgcacacaggcatttgatccttccaagctgacagatccgagcctgatcatttatgcaccggttcgtgtactgggcaataagacgatcgtgacaaacggagatcagacagatacaatctacgagggcatggacaagcagatgacatttgaacagtctctcagaagcagagagtttgagccggatggtccgaactatacacctcgtatttccggaattatgcatcttgagaatggaacatacaactatgcaatgtccatcttaaagagcaataacggaaatccggatgcctgcaaccgttacacatttgcatacgagaacccggttgccggagaaggacactttattcatacatatatgcatgacggcaatccgcttccgagttttgaaggagagccaaaactgatttctgtaccgaacagaatcgaagaatttacagatcttctgtggaacagtctgaatgaagagaacaaggtttctctgttcgttcgctatatcgatattgcaactggggatatcgagacaaagattgtgaataaaaatcaataatcagaggcagagtgtggataaaggagaagaaaatgaaagaattagaattaaaatatggatgtaacccgaaccagaaaccggcaaagatcgcagtcaatgatggaagagaccttccaatcgaggttctctgcggaagaccgggatatatcaacttcatggacgcatttaacggatggcagctggtatccgagctgaaaaaagcaaccggacttccggcggcgacttctttcaagcacgtatccccggcaggggcagcagtgggactccctctgagcgatacacttgcaaaaatctactgggtggatgatctcggagagctttctccgcttgcatgtgcttatgcaagagcaagaggtgcagacagaatgtcttcctttggagattttattgcactctctgatgtgtgtgatgtatcgactgcaaagctgattaaaagagaagtatctgacggtgtgatcgcaccgggatatgagccggaggcactggaaatcctcaaagagaagaaaaagggaaattataatgtgatccagatcgatccaaactatgttccggcaccgatcgaacacaaagatgtatttggtatccagtttgagcagggaagaaatgagctggtgatcgacgatgcattatttgcaaatgttgtgacagagaacaaagagattccggaagcagcaaaaagagatctggcgatttctatgatcacactgaagtatacacagtctaactctgtatgctatgtaaaagacggacaggcgatcggaatcggagcaggacagcagtccagaatccactgtacacgactggcaggaacaaaagcggacaactggttcctgcgtcagagcccgcaggtattagggctgcagtttgtagacggaatcaaacgtgcggacagagacaacgcaatcgatctgtatatcggagaagattacatggatgttctggcagatggagcatgggagaatatcttcaaagtaaaaccggaagtattcacaagagaagaaaagagagcatggctggatcagatgacagacgtggcacttggttcagatgcattcttcccatttggggataacattgaacgtgcacacagaagcggtgttaaatatatcgcacagccgggcggttctgtaagagatgacaatgtgatcgaaacatgtaataaatacaaaatggcaatggcatttacaggaattcgtttattccatcactaaaatgtggtaaaatccgtatgacggggaaatttcaagtacccggcatacggattttttgtataagaaatgatagaagataaatgatgtctgatggagggaagaagcgatgataatagaaacaagaagcgcacaggagacatttcagcttggaaaagaactgggcgagaaggcatatccggggcaggtgtttacgctgaccggagatcttggtgttgggaaaactgtgtttacgcagggctttgcggccggtcttggaattacagagccggttaatagtccgacatttacgatcgtacaggtgtatgaggaaggcagactgccgttttatcattttgacgtatatcgcattggagatgtggaagaaatggatgaagtgggattcgaagattatgtgatgggggaaggtgtttccctgatcgaatgggcaaacttaattgaggagatacttccccaaaaacggacggagatcacgatcgagaagaatctggaagaagggtttgattatcggaaaattactgtggaggaaaccgtttaggtaaatctgtttgcacaatttagaaaaacacggtaacatagaggatacaaaaaagaaaaggaaaggaaagagaatatgcgggtattggcaattgacagttcagggctgactgcgactgttgcagtcgtggaagagactcagactgttgcagaatatacgatcaattataaaaagacacattcacagacattgcttcctatgatcgatgaagtagtaaagatgacagagctggatctgggtacgatcaatgcgattgcagtggcaggaggaccgggatctttcaccggacttcggattggttctgcgacagcgaaagggctgggacttgcactgaataaaccattgatccatgtgccgactgtggatggacttgcgtataatgtgttcgggtgtgaggatattatctgtccaatcatggatgcaagacgtaatcaggtatatactggaatttatacattttcaaaaaaagcgggagaaaaagaagggaggaatctggtagaaccggtttttcaggtgatcaagatgcagatggcggtttctattgaagaactggcagaacggctgaaccgctatcgccgtccggtcgtatttttgggagacggagtgccggtctatgaaaatgtactggcagaaaaactgactgttccgtattcttttgcacctgcgtatatgaaccggcagagagctgctgttgtaggaactttggcaatccagtattacaaatcaggaaaatttgagacagcagaggagcatcgtccggattatctgcgtgtttctcaggcagagcgggaacgcgctcagcgtgagaaagaagcagagattatagtacgagagttgaaagtggaagattctgcggcagttgcggagatggagcagcagattttttcggattcatggagtgaaaaaagcgtgttggagactgtgcagcagaagcagtctgtttgctttgcggcggaaaaagcaggacatcttttgggatatctgcttgcatatcatgcggcggacgaagcggagatcgcaagaattgcggtgcagaaagaagcacgcagacaaggggctgccggtaaactgatgcaggcgcttgaacactattgtgaagaacacaagatggaaaagcttcttctggatgtgagggagagtaatgaggcggcgcgcagcttctatacgaaaaacggattcgtggaggatggcattcgacagggattttatgttaacccgtctgaagatgcggttttgatgagcagacagctcggtgcagatgtctgatggatttcaaaagaatgcttatagaatcactggaagtgccggaagcagttcccagtaggaattgcggcgatatccggctataatgtaggcgtagcaaaaagaaaatccgaaaatcacaggaggaaattttatgcgccagtatgaattaaaagaacgaaaagaaatcagtaaaattatttgtaataaatgtggaaaagaaattccggtatccggtggacatgagatgaaaggggtgttccgtgtggactacgagtggggatatttctcagaaaaagacggagagagacatgcctttgatctgtgcgaaacgtgctatgatgcacttctccaatcgtttctgataccggtggaaatagagggatgatatgttagatgtatgtttgcttggaagcggcggaatgatgccgcttccttatcgctggctgacgtcgctgatgacacggttcaacggcagcagcctgctgatcgactgcggggaaggaacgcagattgcgattaaagaaaaagggtggagctttaagccgattgatgtgatctgttttacacattatcacggagatcatatcagtgggcttcctggacttcttctcaccatgggaaatgcagatcggaaagaaccgctgactttgatcggaccaaaagggctggagcgtgtggtatctgctctgcgggtcattgctccggaactgccgtttccgatcatttataaagaaattgaaggggcagagcagactttcgaattaaacggatatcgtctgaaagcatttcgggtgaaccataacgttctctgctatggttatacaatggagatcgaccgtgcaggaaaatttgatgtggagcgtgcaaaagaacaggaaattccgcagaagtattggaagcatcttcaaaaaggtgaaacgatcgagacggaaaatggaatcctgactccggatatggtgcttggaccgccgagaaaagggttaaaacttacgtatacaacagatacgagaccgacgaactctatccgggaaaatgcgaaggattctgacttgtttatctgcgaagggatgtatggagaaaaagaaaaagcagcaaaagcagtagaatacaagcacatgacattttatgaagcggcgcatctggcaaaggacgcacaggtgaaagagatgtggctgacacattacagtccgtccctgacaagaccggaagagtatatggatgaagtgcgccggatcttcccggaagccaaggcaggaaaagacagaatgtccagagaactggcatttgagtagaaagaggtttgcagtatgaaagaaatcagagatatcaatatattagcgatcgagagctcctgtgatgaaacagcggcagcagtgatccacaacggaagagaagtgcgctccaatgtcatttcttcccagattgaactgcacaaactgtacgggggcgttgtgccggagatcgcatccagaaagcatattgaaaagatcaatcaggtgatagaggaagctttaaaagaggcaaacgtgacattggacgatatcgatgcaatcggggtaacttacggtccgggacttgtgggggctctccttgtcggtgtggcggaggcaaaagcgattgcctacgcaaaaaatcttccgttggtaggggtgcaccatatcgaggggcatatttccgccaattatattgaaaatccagacctggagccgccgtttttatgccttgtggtatccggcggacatacccatctggtctgtgtgaaagaatatggaaaatatgaaatactgggacgtacccgtgatgatgcggcgggagaagcctacgataaagtggcgagagcaatcggacttggttatccgggcgggcctaaaatcgaccggatcgcaaaagaaggaaatccggatgccattcagttcccaaaggcgcatatggattcagaatatgatttcagcttcagcggtctgaaatcttcagtattgaattatatcaatggatgcaagatgaaaggagagtcctataatccggcagatattgcggcatccttccagaaagcggttgtggaagttttggtagaaaactccatgcatgcagtagaaaaatatggaatgaacaagtttgcgattgcaggcggtgtggcatccaacagcgcccttcgccaggcaatgcaggaggcttgcgaaaaacgtggtgtgaaattttatcacccgtcaccgattttctgtacagataatgcagctatgatcggagtggctgcatattatgaatatctggcaggaacaaggcacgggctggatctaaacgcagttccgaatctgaaactcggagaaagataaaggatatgaaagaaaaagaatttgtaacagcaatcgttctggcagcaggcagaggaacgcggatggggaccaaaatacaaaaacagtatctggatctgtgtggaaaaccggtcctctattattccctgcacgcatttcaggaatctcctcttattgacgaaatcctgttagtgacaggagaacaggaaatcgaatactgccggaaagagattgtagaaaaatatcagcttacaaaagtaagaaaaatacttgccggaggggcagagcgttatctttctgtctggaatggaatccaggcagcagaaaataaaggctgtctcttcattcacgatggtgccaggccgtttgtagatgaggagatgatagagcgtgtgtatgagcaggtacagaaagaaaaagcatgtgtagttggtatgccggtcaaagacaccatcaaaatcgcggatgaaaaagagtacgttcagacaacaccggacagaagcacagtgtggatgatacagaccccgcaggtattttcttacgatatcgtaaaaggagcttacgagatgctgatgcgggaacaacagatttccgtgacagacgatgccatggtcgtggaacagatgctgaatcatcccatccgtctggtgtatggttcgtatgaaaatatcaagatcacaacaccggaagatctggagatggcagaagtgtttttgaaaagacgaaaaaagtaaatgatgtatgcaagaggctgggagtttccggcctttttcttttggcaaaatgaaacttttgaccgaaaagaactgtatgtatagatagaaagggggggtatgcaagatggtaaaaaagagattgatacttcaactgcaacaaaaagaaattgccgcattagaagaaattatccaaacgtatcataattatgtagcaaaaattgtatattcgattctttctttttattcgacagaaatagatatacaggcagtgatcaatcaggtgtgtttttttgctttgggaaaaggcagaacagatagatacaaataaatgtgaagacattaagtactatctggctgcgattgccaaacatgaggtgatcaatgaaagaaacaaattcgtccgcatgttgaattggatgaaaatgtgattggaaacagtgcaaaagtatttgcggatatagagttacgagaggtaatatattctgcacttcaacagttgaaaacagaatatcagattatattgttgaaatattattatcaggaaaagttgattcgggaaattgcatcagaagagggaatccaagagtctacagtaaaaacaaaattaaaaagaggcagggaaaagctgaaggaaatcttgataaaggagtgcgtcattgatgaaaatgaattatagtgatatgtttgactgtgtttctgataaaagtgctgaaattttgaatgaatatgaagaatacgagctagatactgttttttctgcagttaatactgaaaaagtggtaatttctaagattatgaatagagtaccttcggtaaaaaagaaaagtctggaaatggcgaatattacttgcagcggcaatgatattatcagcttcatcaattgtatttgcagtgaaatattggcagtttccaaatgatggaggaacacagctggtaacggaggaaaatcgtgaattgataggagaaagcatacaaggaacagcattggtttatgattcggaaggaaatcttataaacaaagaagatgcggaaagtgtatcagggctctatgattgggaaaattgtccaatgattcaacaaatagaggatgaaactgcaattccgagtacatttacagtaatcccagtgaaaaaaagagggacacaatatcaaatcccagaagtgatgtttaccagtgaagcgcttgtgatttttacaaaggaagacggaagtggatgggaattaagcgaaggtgatgagattcaaattcatctggaagaatacgaaacaaaggattttcgggtagaaggacaaatgatcggatacaaattgatccataacggagaattaaaaaaagcagaagatgtacgagaaggactcagacaaaattgcatactgtctgcaactgaaaaaggggagtattatccatgtttgatcggcagaagctctgatattacaacgctgaaaaatggaactattacagttatcgaaaaatagaagtgaatatatagcggcagccataataaagaaagatgcaatcagctgccgcgacattgattattcctgttccaattgtgtttgtgtaagcgctatatttgcgcagtgtcatttcttaattgtaggcagaaattatttgtgcagagatagttacgaaagaagagttaatggccatcgcacaaaaaaataaaaaaagtgaaaaaaaggtgttgacatttcagatagtattatgctagaatacacattgtcgcgagggcgaacaagacaatttaacctgtgaaatgacaggaagtttggagaggtatcgaagtggtcataacgaggcggtcttgaaaaccgtttgtccgagagggcgcgtgggttcgaatcccaccctctccgcttgggaagttcagaattgaatggacttccttttgttttccttgaaggtgcgcatgcacaactgagaaggttgaggcatatgacgacaaacgaggaatgagtgagaaaagtatagcgtgtataatacgcgggcattttggagaagtacccaagctggccgaaggggctcccctggaaagggagtaggtcgttagtagcggcgcgagggttcaaatccctccttctccgttactttctaaatgagaaagtacacattgaaaactctggaagaaaaataaaaaagttcttgacagaagaaagtggatgtgataacctattaaagctgacttgtgagggagaaacacttccggaacagacagtaaaaagaaaaataaaaaagttcttgacaaagagaaaacggcgtgataaaatatcaaagctacttcttatcaacaagaacagcgaagaaccttgataattaaacaatagacaacaaccttgaaaatttcttaagagaagatttttta

SEQ ID NO: 7024 - DNA, 13731 bp, Unknown
  gut microbiota DNA sequence
ctaccaaccaccccatatcgagacaaaaaacagaaaaatgtccgaaaatattttttcggatgtaaagtgcgtgctataatagggaaaggagctgtctgtacagtgagaatccggaggtggaaagacttgaaattatggtatcgaatgattcgacgtttggaagaaatttatataagaaagcataaagaagagttcctgttgaggaaacagaagtgggatgaagaattttatgaatgtattcaggatattacgaagcatccggttgtgcttcgtatgaaactatatccgcatcatggaaatacgaattgttatcagcattgccttcatgtatcttactacaattatgtgtggtgccgcttttttcatctggatgcaaaatcagcggcaagaggcgggatgctgcatgatctgtttctgtatgactggcatacccatgcaaaagagacggggcagcgtttccacgggctgacacatccgaaaacagccttaaaccatgcatgtcgtttattttctctgaatgatatagagaaagatgtgatccgggcgcatatgtggccagtcacattttttagcattcctcacacaaaagaaggatggatcatcacactgacagacaaatattgcggagcatttgaaagtatgaaaagaaaatagaagaatttcgggcaaaaattttgtcgaacttatgtgacattaactgataaaatcggcctttttcgtgtgctattctctaaaagaacccgggggagcggacaggcttccggcaaaaaattaattgaatcaaggaggatatacagcatggaaagacagatcccaaaaaatgttcgtcagattggaaacgtgagtgacagcccgaaaatttatgtggaggactatgtagatacttttttcctacagctttgtgataaggcgaaggacggaccgatcggggcatttctcgtaggagatatgcaaaagagcgaggatgaggaatatgtatacatatatggtgcgattcagatgcacgacttgaagctggtcggcaatgaatacgtgatcgatgatgaaacatggaaaaatgcatatgaggactgtaaacagtattttgaagacggagaaatgttgggctggtttgtcgcacagcccggagtagaactggatgcaaagagcaacatagtgaaacttcataaaaaatcgttcccgaaacagaatactgtttttgttatgaaggattccgcagagaaggaagaatcttattttgtgcataaactgaatgatctgatggagatcggcggtcgttatacatattatgagaaaaatccatgtatgcagaactatatgattgctgctcgaagaaagaatggggtgtctccctcggaaactgttgaggatcgagctgctcaggactttcggaacatggtccgcagtcgaggaagccggacgcatcagaaaaaaaacaaccgtctgatgtatgtggcaagttccatactgatactggtggcagttattatgggagttacgacactcaataatttcgggaaaatgaaagctgtccagaaagtgatgagtcaggcgtcgtcagcggtcttacaggaaaataatacagaggaagtgcagccggtgagcggtgaagtgacagagacatccaatgagggagacgtggaaaaacaggaagaaacaccaccatcagaaaaggatgcatcagatccggaaacaaaacaggaagaagaaaaagcagatgatattgttcaggaacaggagagcacagaaggagaaggtgattcctcagaaggagtgtacgtagtagagcagggagatacactggcgatcatcagcaaaaaggcctacggagatgtttcgcatgtagattctatctgtcggatgaacggaattacggatggaaatttgatttatgtaggtcagaaattgctattaccataaaataatgctataatcggaaaataaaacaaaatgataaggggtcggatatgaagcaaaagaaaaatccgcggtttcgattttctggatccatagatatggagatcattcggaggcaggtcaaaaggcacagaagaagcgtgctgggacagtggacgatccggatcgtcgtggcagccatgatcgtgacaggaacctatcttgtgattgaaaatcagacgtatacgtccgttgcaacagcggactcacataagaaagatacagaagacagcaaccagtatatcgcattttcagacggtgtgatccgatatagcagagatggcgttgtgtttctgaataaaaggaataaggaaaaatggattcagccctgtcagatccagaatccgatagtggacgttaatgaggatgtgtttgcaatagcagatgtgggcggtaatacgattatgatctttcagaagagtggattaaagggggagattgagactacgcttccgattgaaaagatttctgtttcaaatcaggggattgtaagcgcaattctgaaaaacgaatctacgccgcagatcatttcctatgatgcagtgggaaatatacttgtagagcatcaggtgaatctaaacagtaccggatatccaatctcactggatatgtcggcggatggggagaacctgatggtatcgtatctttccacaaaaaacggaacattgaagtccatggttgctttttataattttggaaaagaaggtcaggaaaaaacggacaacctgatttatacagaagattttgagcagacagtcgttccggatgtgttttatatggacgcgtccacatccgttgcggttggtgataaatcatttgtgatctatgaaggtacaaagtccgtgaaaaagaaaaccgaagtgaagctgaatcaggagatacgcagtgaatttcactcggacaggtatatcgggtttattcttacgaataaagataaatcaggatatgaagtgcagctttatgataaaacgggaaaacagataataaaccgggaaataacaggagaatatagtcatgtaaagatagcaggagatgagatcatcatgttcgacggaacaaagggatgtatcatcagcgacacaggaatacagcgatttaagggagactggggaatagaagcacaggaagtgattccggctgccggaattcacagatacctgatcgccggtgaagatgaactgcggcttgtttacctgacaaattaggagaaaatatggataattggttattgattattgtaggagtgatatttttgatcagtatcgtggcaggctatgttagaggactgctcaaaatcggaatttcgttgctggctacggttctgtcgatcgtgctggttatgtttctggcgccttatgtcagtgatgcgcttattaaatggacacctgcggatgagatgattgaagaaaaatgtatggagatgttcatgcctcagatttctgcagatacattgaaaaatgcagatttaagcggtacttcacttggagaattgaatcaggatcagctggcggatatcaacaatctggactggaaccagttggggatcaacattcaggatattttgaatatcattggagagattccaaaagaagtgcagattcaggagattgaaaatgcagcgttgccggagtttttgaaaaaccggctgctggaaaacaataacagcacaatttatcaggaactgggagttaagtcatttcctgagtatgcggcatcgtatattgcaaggatgatcctcaaggttgtggcgtttcttgttacatttatccttgtttggattcttgtcagggcactgatggctgcagtagatctgatcggcgagcttccgattctgggatttttcaatcacctgggcggagcggttgtcggagcagcggcggcactggtgattgtctggctcttgtttttgatcataacattattgtataataatgcgattggacagtcttgctttgagatgattgagaaaagcagtattctgacatttttgtatgataacaatatattgattacgaagctgttgtcattttaagagggattttcgatcttgaaaagtcggttttgaagataaaatatatattttacaaaaaattgaaaaaatctattgacaggtactgtgcgatatggtatattttaatagctgtcggtgataactgaacagcttgaacgggggattagctcagttgggagagcgcctgccttgcaagcaggaggtcacgagttcgaatctcgtattctccatttactcagtgataagagctgagacaattttatagtattcctcgatagctcagtggtagagcattcggctgttaaccgaagggtcgttggttcgaacccaactcggggagttgttaagttccatagatagtaatgtctatggaatttttttgtagaaagaatagaaaaatgaggacgacgatggcgttgtcctcattttttctttcctatcatcagatagggttcaaacataatatagtagttctgatatttggtacagactccatattttgagcgataatcggcaatggcatcgcgaagctgttcttctgttacatccagaaattcagcagtttcgtgatattcccggcatccatgctgataggcatcgatcaaaccacgcagaccgatcagccgttcataggtccacattcgtgcctggcgttcctgctttgcatttgcaggatcggagatatccagaatatttccaacagaagtgtagtgatgaccaagttcttctgccagaatacaggctttttctgcagaggtctccaattggtccgagagggcgatattttgatctacatacaatccctttaagtttccatgaaaaggaaagttctcatctactgatatgttctgggcggcagcctcttctaacagttcttcatatttgttcagcatagccgtttctgaatgctcctttattgttttctttttgaacggataaattgaatgtatttttcaacatcatccaactcagcctgcgtaaggtcagaggtatcaaggtgtgcggcaatcgtgacaggttcgggttcatgagagagtgaactacgtccgagaagatagtctgcatcgacctggaagatatctgcaattttattcagaatatcaaaatcaggttcacgccgtccttgttcgtacatactgactgcactctttgagatgccaaggcgagtggcaagctcctgctgggataagtgtttatctgttcgcagtgttttgagtatattggcaaatacagccataacatacacgtcctttctaagcagctttttgctgcactgggaagtttttgtaaaaatcaaaactttttatgaatacaatatgattatacacaaatcgtgggaaaaagtaaataaaaaatccacaaaatgtgcttgacaaaagaacacgaattgtgtattgtataactacacgaaacgtgcacaaagcgtgtgaaaagaaatagaaagaccgaatacagagaatttcggcaggaggtaaatatgagagatagaattttacgggaagtaccggaaaagagagagcgttgtgtcaaacattttcagatgacacagaagggaatggcggcagctgtatatccggctccggttcattatgaagaagacggacagtggaaagaaattgataaccgtctggaacctgtacaggaagacgggagagaagtttatcgaaattttgcgtccgcagttcgtgtaagttttgcaaaagagtcagatacaaaggaactggtaacgatcgagaaagacggaaagaaaatcttatggggattgtcaccttttttacgcacaaaaagtacacgaaacgtgaattttaaaaacaaaatttctacatttcgtgttttggaaaaggaagatttctggaaagaagcagaaatgttggatatgaaagtgtctgttttagaagaggaagagtcagaagaggatgagatccgaaagatgatgtgtgttccgcatttaaacggagaaggtgtgtatgaggaaattcttccgggaattgatctgcattactcaatccagggagagcagctaaaagagaatattcgactgaacagaaaagaggcggcagaacaggaattgagctttcagctgatgcatcctggaatggagctgcgaagcgaagaagatggaggacttgggctgtatgattcggaaaatcaggagtcaggaagaattttcagactggtgaaaccgtatatgtatgatgcagcaggaaatcagtctcttcaggtggaatttcaagtagaaatcggcacagagagcagtgttatcaaagttgtgccggatcgtgaatggatgcaggacacagaacgtgtttatccaatcgtgattgatccaatgacagagacgagtaaaacaaaaggaaatattgaagatacgtatgttttcacaggaggaaatgtaccggagaatccggggaacgtatatgcatatggatctttcgtggtagggcgaagtgatgaacttggaaaaatgagagcgctgcttcggtttcgagaccttccggatattggaaaaggttcgatcatttacggagcgaccatgtatatctggcagtttgaatattcatcctacagcaatccggagctgccgcttcttgcttatgaagtaaaaaacagctgggatgaaaaaagcgtccgttggggaaatcagccggcagtagatggtgcaatactggattataaaaaagtaaaacaggtaatcaatggaaatacagtttcgatcacaccgataggattcaatgtgaccagattggtgcgtcagtggtataacacaggaaaaaactatggaattatggtgaaatcaaaatatgaagatgatgaaaatctggcaaaccgtgcttatgcgagattctatgcatctgactcaccaagtatctcttctgaacagtttccaagcggtgtgttttattacaggaatgtgaatggtctggaagattatcagagttaccatgagcagtcagcagggcgcgcaggaatcggttacacgaatgactttacaggaaatgttgtctggagtcatttggatgtggcaacagagggaggtccgatgacaacagaaatccgtcatgtgtataattccagcgaagcggataccttttcccgtatggggcacggatggagactcagcagccagcaggagttgaaagaaagtgggatcaaagattatccgtatgtgtatatcgatgaagacggaacaaaacattatttctataaagataccaatgacggtaataagctgaaagatgaggatgggctgggactgacgatcacagtgacgtcaagttctgaacatgaccgttatcgcacgatggaaacaaaagacaaagtgaagtatatattcggacaggacggatttttacgattcatcgaagatctgaacggaaattccgtgaaacaccagtatggtccgaattcagcgggaaattatctgggatatattacagatgcgtcaggtggatttttaaatatcatttattcaacggatgaggggaaatcaaagataacagctattcaggataccaaagggcgagagattcgatatggatatgatgcgcaggggaatctgacatccattacttatccggatggaagtaagagccagtttacttatgatagttctcataaactgctcagtgtgaccaatccggatggctatcgtgtaaattacgagtacacaaatgatttccgggtaccccgtgtcagcaaagtatccgaaacgggacagaaaaatgcaccgggtcaggaattaaagatttcctatgaaaacggaaatactacgatttttgaagaacctggattggatggtcagatggaacgtccgggagataataagaaaacaacgtggcattttgacaatatgggacgtccgacagatgtgctggatgcagatggatttgcaaataattattcttactatacatccggcatgaaaaatcataagctgagtaaagatggttctgttcagaaaacagtgtatggtctgctgagaaatccaacatttgatccgtctcatggagatggcggatggtacacctgtcgtatgtcagatggaaaacggggagcgatcacacatgcagatggatatattggtacaaaaagtgcgaaactgacaaaaacagagctgacatcagaagaaggaatctgtcaggatgtgcatctgtcagctggaacatatacgttgtctgcttatgtaaaaacagaatcgctgaacccggaaaaccaggaacagggagcggttgtatccgtaatccgggcagaccggaccagaatcatgggggaacgctgtattgactatgtgacagataaaaacgtggatgacggatgggagagactggttctcacattccagcttccggcagaagaaaccatttccgtgtttgtgggaatgacaagagcaagaggaacacttttggtaagtggtgttcagctggaaacaggaaatgtggcaaatgaactgaatctgatcgacaatccgggatttgaacggtgcacaaatgatgtgcctgataattggggatttcatgcagctgcaaccgggaataagagtatgatcactgcagataagggaagatgtgcagtactgaacggacaaatggagcagcagcttcatctgtctcaggctgtaaatatttcaggacaggaaggtgatatctttaatcttagctgctgggtaaatggatttggaattccggataagcaattttcagtggatgcagcagtcatttatacggatggtacagttaaatggcatcaattacagtgtaatcccaatattaagggatggcagtttgtcagcaacaccttcagtacagacgatcaaaatgaaggggcgaagaaaacatacaaggcgatccatgtgtatctgatgtaccacaatcaggtgaatcaggtgttattcaaaggtgtgcagcttgtcagggatgacggggagagttaccagtatgatgatgacgggaatctgatccatgcagtgagtgcagcggaaaaagagagtttttcatacgacaaaaaaggaagtctgacgaagcttggaagtattgacggaacagggtttgaatatcgatacgatacgaaaaatcatctgactcaggctgccaattctgaaggagtccgttatcgatttacatacaatgacaaaggacagccaatccagatgacagcagatggcggaaaatatctcggagcagtcataccgggcagagtgtattatatccgggaaaaaatttccggaaattatctggatgtcagaaacagtgagacggcaaacggaactgtggtacagttgtgcacgttctttggatttgccgcgcagaaatggaagctgatcgatggaaaagacggatatatgcagtttgagcctctttgtggctctggataccgcctggatcttaataacaaatctgaggcagagggagaaaaaattcagatttatggaaataacaataccgatgcacagaaatggaagctgcatccaaacgcagatggaagtttccagatcaccagcaaggcaacgaaagataagaaagcgttgacaaacggaccaaagagtaccacaagcggacagccggtgcagagttatacacgaaaagaagaaaacgaacatcaggactggtattttgaaccggcagatgagggaactgtttcagcagttccgaaagcgggagggatttatcatatccgggtacgtcattcgggacaatatattgatgtgaagaatgcttcgacagcagcaggaacacaggcagtgcagttcaactacaatggcgggatgaaccagcagtatcgtttgctgccatatgacggcacgtattatcagttagagccggttcacgcaccgggaaaagtactggcaaaatcaggaaccaacgacagaggtttttccattctttccttagaggcatctatgtcgggcgcagcaaatcagctgttccgattcgaagaggtatcaccggggaatggatatgcgatcatctgtaaggatggaaacctgtctctggatgtgatggattattcccatcaaaaattggcagatatcattctgacagcccaccagtcaaacagccaggtcaacaaatggtggatcctggaagagtgcagtgagcgcatggaatcgtctatgacatacacatccgattataagcagccgaagacgatcacagattccagaggaaataccgttcattatgaatacgatgacaagaaccgacttctgacaaagctgacagatgcaaaaggaaatgccacttcctatgcatacgatgccaacacggacaagatgacagaagttgcgagaatggtggatggaaaagaagtgaaagtttcttacacctatgaaaacgaaaaagtgacgtccatcggtcacaatggatttacgtatgattatgcgtatgatccgtttggaaatctgaagtccgtatcggtaggaggaagggaactggagcgcaccacgcttcgaagccggaacggtcttgcggacaggatcacctatgcgacaggagaagccgttcggaatgaatacaattcagaagaacagcttgcggcacagtatctgatcaccgcagacggcagagaagaaaaactgtttgaaaatacgtatgacagctgtggaaaaattgcaaggcacaatgatctttgcagtggagtgaccagcacatatcagtatgacctgatcggaagaatggtaggaacagaccgttctgacggaatgaaacttcgcaaagtgtatgatgagaaaaatcgtgtcaaaggatatacttatcagaaagatcgagccggacatgaggtggaattcctttacggggatgtggaaaaacagcagaaaccggggcttggatatggaatcaagatcaatggcgcccagaagattgcctatgagtatgatgcccttgggcgtgtgatccgtacccacaatcacttctccgatatgaatacatcgactcaggagtatacatacgtctcaggcaaagaggcaggagtgaccacgaatctggttgcatctgtccgagaaggaaatcgtgcagaatcctacacctatgacgcctgtggaaatgtggaaacaatggtggagcgaagcgccgatggcagcgaaagaaaaatccgctactactatgatgcactgaatcagctggtacgagaagacaatcagaagcagaatcagaccatctgttacacctatgatgtgggtggaaatatggtcagaagagacgagtaccgttataccgaaaatccggtgatcacagaagctccgcggaagtccgatacatttaagtatcagaccggaggctggagagatcagcttcgtttctacaacggacaggcaattacctacgatgccatgggaaatccgctccagtatctggggatgcagatggaatgggaaaaaggatatcagctgaggcacatcacaggcgccggactggatatgtactgcatgtacaatgacagcggaaagagaatccgaaagacggtcaatggcgttacgacagacttttatctggatggttcggccattctgatgcagacgtccagtgacggcagcaggatcgatttcttctacgatgacaagggtaatgtgtttgccatgaagtatcagaatgagatgtatttctaccgcaaaaatctttttggggatattctgggaattcttgacagtcacggaacggaacttgtaaaatatgagtataattcctggggaaaactgctgaatctgacggattacagttcgaatggactgggcagaaggaatccattccgtttcaagggatactactatgacgaagaactgggaatgtactatctgaatagtcggtattacgatccggagacggggagatttgtcaatgcggatgatgtaagccttataggaaaagtgcctaccaaattaacagataagaacctgtatgtatattgtgacaataataatgtgatacgtaaagatgcaggaggggatttttgggagacagcacttgatgtagttactttgggagcaagtatcgtggaggttgcagctaatccatcagatgtattggcatgggctggtttagtaggcgatgcagttgatttggttccattcgttactggaattggagaagctacaaaggctattacgaaaattcagaaagtagctgaagaaggggatgacatcattaaatcagcgaaagcaatgagtttaccaaaggaaattagaaaaggatttggctcatatgaaattttttatacggatggactaagttatgttggaaaaggtggctttgacagagcaattcaatcagccaaaggacataaaggaacagtgaaatcaatattatggaagtcagctccgtcaaaaaatgaggcttttatcgatgaatatttgatgcaatgtcgaaggattgaaaagtccccaaatggaaagtttaaagatgcacagcatacactaaaaaacaaaatttggagtccaggaaggaagcagtttcataaaaagtttcaatatctcaaatattaagtaaggtgtaagagctattgaattttaaagcatccccattcgggcatcccgcaatgtatgcctacggcaggcggacttcgtccgataaagtatacccgaatggggataagatatgggacgaaaaaatgaaggcgtaataatattcaagaaggaggagttacatgaaggcatttgaacttacagaagagcaaaggaatgatttgtattttaaaaattttgatggaacgatcaaaatagacggatttgtattcagtgattataaagggaacactgctatgagaatttcaaatacacaggaggagcgacccaaacgccgtacagagcgaaccatagaagaacatgtaaaatttatcaatgaaaataatgtggagagagtagatgtttttacggaaagtattgaatttttaaaagaatgtccgggaataaaggcagcatctgtctatgttcccctgtgcgttgagaaagaatttgacttttctccgttgtatgagatggaaaatttagaagctgtggattgtggagcagaaagtttagcaggtgctccacgagttaataaattttttgtggacttcacgaaaatgaaacatatcaaacaaattaggatatcattaagtaatttcagaagaggaaccgggtttcaaaaagtgaaggatttagaattacttaggatatctgattgcgataaagaagacttaagggaatatttttgctcagaaaaaatgaagtatcttatgatattttattcaaggcttcgaaatttagaccatatagaaacagcccccaacttaaaatgggttcaactggaagaattaaaaaggttggaagatatttcggcactagaacatatagcagaatctgttgaggcgctttgtatcagtggatgcccgaaggtgaaagatttttctgtattggaaaaactggtaaatctgagacatttagagttgaccggaagaaatgaaatttcgagtttgagttttttgaatcaaatgcctcagatacagacgtttctgttttcggtgaatgtgttggatggagatctgactccttgtatgaagattccatatgtgtattgtgaaaggaaccggaagcattataatttaaaaaataaagatttgccaagaacagtggatgaatattatggatggggatataagttcgagttaccatcggaatatatgttgtattaatctgagaagattgtgtttgatgaaagtcaataaagagtaaaacagtaagaaactgtcgatatacagaggaaactgccacttacgatgtatatcggcaagag

SEQ ID NO: 7025 - DNA, 1935 bp, Unknown
  gut microbiota DNA sequence
gataagacaatttggtggaaattgtaacaaatctcagtttggacttttcttatagagcctttccctgaaggagaggctctataatttttatctgaaatcactaaggctactttaactgtcatcttttcttaacctaaaatcaatgtacatattttttctctaagtaagtcgattacaatatctataaattctccagcaaataagataaagatcagaacacctcccatacaaaccagaaaagctgcctgtagccagtcttgataacagattactgttccaatgaacaacgccataattcccaatcccaatatcttttttgcgattgccaccatatgtactaatagcttcactccggcacctatgatcgaaatgataaaccacaatggaatcaataacacttttcctgccacttttaaaatacccatatctgtcctcctatcttgccagccacggcatgtcatgatttacttctgcccggtaatatccactgattgttgaaggtgcattgaacaatgccgcaagtaaatatttcttgatattcttgattttactcgtatttccttccagacaatgcagcacatactctacatgggaataatccagcttcatgaattttcctcttaccaaggctcctgaataccagttgcttgcaatcagtactttatcactcttacacataacagtctctacgatcagatccacgatttcatcaatctgatttttgtcatgaggatgactcactaacaaagaatcataatccagattgtctttgatcagagattgatacgcatgtaacgtttccatctcatcctcttcggatcctatcccatctgcagatacgatatgattagatttattctcactaagattagtattgttaatattagtattattagagtttgaaatgtaaacttcttgaagtttattttcgggacttcttgaagtttgtttttgggacttcttgaagtttgaaatgtaaacttcttctgtctcttcttcctctacagaagtttgatttataaacttcaccatctttgatttttcttttttctgttcctcacattcctcctgaacaaatgattttacatagatgatcgtaacctttccaaagccctgtctgcgcttttcaatcaaacctatccctttttcatcatccagctcctgaagagatttcaccgctttatttctgccacaattcaataattccatgatatcttcaatggaaaaatagatatatgcccgattttcttcatcaaaccactgattcttaatggataaagacattctgtccagcatcaaaccgtataagatcttcgcatcacaggaaagatccttaaaacagtcattggtaaataacgctttgggtattctgtaaaaactaaactggtctgcttctgttccataaaaatatttaaaattcatttttttgtccatgtatcttcctcccttcctttctctcatagaagtcctttttttaaacttctgtatctcttctttcttcgggttgtcttattttgacaacccttattcctgttctcttttccattgttccagtaatgcctcaatcaccttttccatatccgtttccgaataatcttccggaaaatactttgtgagcttctttcctgataacaccacttttctctccggtgcttttactgctatgcagctattgaaaatcgagatcataaatccttgattcacagttccttcttccaactgttttctcaaagctgtaatctgctttggtttgataaatcctgtatcccggatatactcgtagatccatttctgcatttccttatcaatgtaggaaatatcaacggcaatggtaaaattcaacttctttgcatctaccatatccaataattctggaatcaattctgtaaggcgaatgtagcgctgaatttgttttgaactttctccaacttcttc

SEQ ID NO: 7026 - DNA, 5204 bp, Unknown
  gut microbiota DNA sequence
caagtgttttcagtttgctcagcagacactaaataaaatggtgcacgaagtatatctgtcaatttcttatcacttggcaatacgaatccatgtgtaatagacagttcatacagtaaatccttactaataagattaacatgatataattgtacacaaacttcatttagcaacaaattatgaaatgagtctttataggccgttctaatggtaagaattattttccaaccagcagaaataaacatttgaagcaaatcctcaaatgtttgctggttttctaaaacaaaatatttttcaactgcatcaatatatagaatacgattctcagtctcttcgtacacctttagtacttcatctattatgagcgttccatatgtcatcaaaaaatttctctcgtcagaaacatccatgtctgtacatctaaatgccaaaataaccgtatcctgaccgatactagccatactctttttaatgagtgcagattttcctgcaccagcctcaccatctacaactaaagcctgattctcagactgcaaaaaagaatttatattaaacacattattttccagaataatggttttatcatatacgacacttgtgtcccaatatgattaaaaatatcttctttatgctttttaaggttttcacaacattcctgaactgcagaatctgcttgaaagaaaacatttctacaaatagtaagtcttttatcctgcataagctgagcctcgatattacttaaacctctccactcaattgtaatccccagtaattgtgcagtattttcaatatttgtctgatatgccggttttacaatatcttttttggaacttggagaaaattcttgactaatataaaaataaagtgttgtaataccaggataagctcttgctgctcctttaactgcatcacttaattcattttctttgccagacatagaaacactatctgaataatattttgcttgaaatcctataagtttgtcccctacttgaatggggttcgtttcaatatacaagcgtgtgcgagggagattgtggataaagggatgatttatcaataagaaaaggtgtatggtggaaagcaagtctgaaaacaaaatgattaggcgttgtcagattcgaataacagacagaaaacctcggatgcccattttataagggtttccgaggtttctttatgcctgttggatctatttcttttgacggagtattttttatgcgttaataccgaaaaacttctccatatcctcttccacagtgccaattcctgcaatgccgaagttctcgatcaagacctttgcaacattcgggctgagaaatgccggaagtgtagggccaaggtggatattcttcacaccaagatataaaagagcaagaagaacgataactgctttttgctcgtaccatgcgatattatagataattggcagatcgttaatatcgtcaagcccaaagacctctttgagtttcaaggcgattacagcaagggaataggaatcattgcattgacctgcatccagaacacgtgggatgccattgatatcgcctaaaggcaacttgttatatttatattttgcacaaccggcagtaaggatgacagtgtccttcggcagagccttagcaaattctgtatagtagtcgcggctctttgctcgaccatcacagcccgccataaccacaaactttttgatagcaccgctttttacagcttctacaactttatctgccaaagccagaacctgtgcatgggcaaatccgccgatgatttcaccggtttcgatttcactcggagcgacacatttttttgcatgctcaataatcgcagaaaaatttttttgttcgccaatttctcccggaatatgtgtacatcccggatatcccgcagcgccggtagtgtaaagcctgtttttgtaactatccttaggaggaacaatgcagttggttgtcattagaataggaccgttaaaggattcaaattcttctttttgtttccaccaagcattcccataattaccaacaaagttaggatattttttgaaagcgggataataatgagctggcaacatctcggaatgcgtatacacatccactccagttccctgtgtctgttctaacagcatttccaaatcgcgcaggtcgtggccggataccagaatgccggggttctttctgacaccgatatttacctttgtaatttcggggtttccatagctgtctgtgttagccttatccagcattgccataccggatactccgtattttcctgtttccattgttagagcaatcagatcttctacactaaggttgtcattcagcgtggcagccagtgctttctgaagaaatgtgtcaacttcatcgttgtccttcaacagcacatttgcgtgcttcgagtaagcggaaagtcccttcaaaccgtaggtgattaactcgcgcagagagcgaatatcctcgttttcggtagaaagaacaccgacagttctggctttttcttcccagttttcagatccgttccattttgcggcttcaggcagaacagtcagattggtaacttgctttagcagaacttccttttcggtcagtgtagcacggattcttgattcaatgctctctttatcaaaatttgcgttggtaatggtagtgaacagattcagagtaatcaagtgattgattttggcagatacctgcttaccttcctgacgcaatgcagtcgtaatagccgaaattccttttgtgacatagaccaacagatcctgcatggccgctacatcaggtttctttccgcatacgccggacatggtgcagcccttgcacccggcggtttcctgacactgatagcaaaacattttttgttccataatatgcctcctaaaaactattaaaatttgaaataatgtggtttcttctcaatcaaaaaagcatatagacgcgtttgaattaatcttcccaggcgattgcagacacaggacacgagtcgatggcctcctgtacagcaccttgattttcagcgtttgctggttgatacgcttccgcctttccctgctcgttcatacggaaaacctcgtcgcagatccacagcaaagcccacagccaatgcagagatccttatctacttttgttgctttcataaaatcaccttcctttgtcaattttgcgtttgattaaaatacaactactaaaagcatcttgaacgcttcctgcccatataccgcatggggatggcctgctggcatgacaatagattctccttcgtgcagcagatattcaacgccatcaatcgtgatttttccgataccatccaagcaggtgacgaaggcgtccccacccgattcatgggtgctgatctcttcgccctttgcgaatgagaacagggtaatacttactgcctggttttgtgtcaaagttttgctgacaacctgcccctcctgataagaaatttgttctctcagcgtcagtacttctgattgagcaatgtttttcatttttttactcatagtatctctccttttattccaaaattttaccacccaacgaaatcgtaacaatctgccaaggaatgaattttccgcttgcctgcaacgcttttttggcagctaattccagtccgccgcagcagggaacttccatgcgtacaaccgtcacactttgaatgttgttgttttgaatgatctgcgtcagcttttcgctgtagtctatgctgtcaagctttggacagccgataatcgtaattttcccacgcatgaaatcctcgtgcattctggcataggcgtatgcactgcaatccgctgcaattaacaattttgcgccgtcaaaatatggtgcattagtcggtaccagtttgatttggcatggccattgtcccaactgtgattctgtctgtacccgggcagaaggagttgtttcttgtgaatgttgaatacgctgcattcgactgccggggcagcctgtatggggaacagcggcatgattgcttttcgcttttttcctcatattttcctgcacagctttttcatcataggcggcagcttctctctccacaaaggaaattgcacctgtcgggcaggttggcagacaatctcccaaaccatcacaataatcatctcgcagaagtgttgctttgccgtttaccatgccgattgcaccctcgtgacaagcttcggcacacgcaccacatccgttacatttttcttcatctatttggataattcttcgaatcattttataccatcctttctcttgtctttctgggcatagtatattataattaaaaataaaaatctgttgttataacaacgaaagggtaaaaaatatgaaattatccgatatgcagctattccgtgggttagaagaagatgacatctcctcgcttttaagctgtttgaatagtgtaaaacgcaattataaaaaaggagaagtaattctttcagaagggagtattatagagaatatcggcattgtactgtcaggcatggcaatgatatcttgtaacgaaatttgggggaataccagcattttaggaagtgttgcacctggttctgtatttgctgaggtatatgcctgtattccgggacagccgatgctggttacagtgtctgccgtggaagatacctctgtgttgtttatgaatgtgggacgtgttctgactacctgcacaaacgcctgcccttttcatacaaaccttgcacgaaatctactgactgtctgtgctcataaaagtctgcaactttcacaaaggattttgcacaccagttccaaatccatacgaggccgattgatgtcttatttttcagaatgcgcaaaacatgccggaagcaattcttttctgattccatataaccgccagcaattagcagattacttgaatgttgaccgcagtactatgtgcaacgagctttctaaaatgcagaaagatggcatgattgaatataaaaaaaatcgtattttgctcaaagactgagatttaaggaatggtatgaatttgaatagggattgattttttaagcaaaatcgcttatgatctgaaatagaatatagtgctattatccacagttacggagcaagtgttatcaacaccgataacaaaatgataacattagcctgtataggcaggataatatggataaatcaaataatcaaaagaactgtaaacacgacagagaataatctctaaactataaatgagcaagttcgtgattttgcataaaagaa

SEQ ID NO: 7027 - DNA, 5449 bp, Unknown
  gut microbiota DNA sequence
atcaaagcattcgccagcttcagagtcatcacatgctttttgcacttacagacatgtcctgctgcatgatgcgcatgctgtccattcatctgtcccagcactgcctccacagctttggaaatatcctgttcgttcatagcagtcctctttcttaaattagttcagtcccaactgatccataactttctttgtgatagatgctaccagatctgcgtccggtgtctctgctgtttttgcagcaccacatccgccaccgcatgagtgacagcttggttttcctgcttttgcatttggacacaggtttgcaggatgttttccgctcagtcccatctgtcttctgatttcataaagtttttcaacctgctctttattcagctcctgtggtccgccgatctgcattgtctgccataacagacgagcgtagaactctacagattccatcttgtggtaagcgttcagtaaggaatcagaatatgtcagtgctccgtggttctcaagcagaactgcatcgaaatactgcaggtgctcagatactgcatccggaatctctactgtagaaggtgtaccgtattttgcgatcggaacacatccaagagcgataactgcttccggcatgattggctgtgtcagaggaataccagcgattgcaaatgttgtagcatacagcggatgcgcatgtactactgattttacgtccggtctctctttgtatacacgtaagtgcattttaatttcagaagaaggtctgaatcctttgtttgcctgaagtacgtttccgtccaggtctactttacaaatataatcaggtgtcataaaacctttgctgacccctgttggtgtacataatacttcgttctcgctgattcttacggagaagtttccgtcgtttgcagcaaccatcccacgattataaactcttttcccaatttcacacatctcttttttgatttcgtattcgttttgcatccttttttcctccttggattcttaaaacaaaccttttgattcttgttggttcttgtcttatattaccacataaacccacaacagtcaactttttaaggtgttgtttttgttgtttttctgtttatcctccgatctgacactcaacccctgaaaactcttctgccacttttaggagcatctgcattttctcattagctggcggcttaacctcacccataagataaggtctgttcagaccgtcatatttgtcctgtcccaacctgtgataagggagcaggtgcagtcgttttacatgaccaagctctctcgtaaatactgcaatatccctgatttcttccggtgtatcattgaatcccggaataaccggaatccggatactgagctctgtcatcccggaagcggcaattttttttgcattttccagcatcagttcattgccgcgtcctgtaaattcttcatgctttttcgaattcatatgcttgatatccagcagatactgatccagatatggaagaatctcctcgatcacactgtaatctgcacatcccatactttccatcgctgtcgtgatcccggcctcatgagcagcccgcagcatatctcttgcaaattccggctgacaaaggctctctcctccggacagagtcagccccccgccggttcttctgtagtatgttctgtccttttccaccgtcttcatcacttcgccgactgtggtatcctctccgatgatcttcggctctccctgtaccatcatagtctcgatttcatatgactgagattccggattacagcaccatctgcagtgaagcacacagccttttaaaaagacgatcgtacggattccgttaccatcatggatcgaatatctctggatatcaaaaatccgtccttttgtttttaagtaatcttccatgtcgcacacctttctgcctgtatcctaaaatccctgctctgttctgcggatgatgtcatcctgcagtgacttggacagtgttgtaaacaatgcgctgtagcccgccacacgtacgaccaggtgcttgtactgttccggatgtttctgcgcatccagaagtgtctctctgctgacaacattaaactgcatatggcttcccttctgatcaaagtaagaacggatcagccctacaaagttctccagtccatttcttccgctgagcgcagaaggatggaatttctgattaaataaggtaccgtttgacgcaatgtaatgatccagtctggaaacagagttcgcagccgctgtcggaccattgacatcttttcctgcagacggagacacgccatcggccaccggctgatatgccagacgtccatccggagtcgctcccgtctgtgcgccgagcggtacattggcggataccggataaagccccgcctggaaggaaccgcctctcggatttttgtaattctgaagaggttctgtataggtgtaggcaacatctcttgcaaatgcatctacttccggaatatcatttccgaatttcggcacttcttcgatcagcttcaggattctttccccgtttgcctttacttccggtgcttcggatgccgcaactacagtatttaaaattgcagcgacctctttttcaccgatcgtctttccggcttctttaagctcattcgcgatcttagccgtcatggcggccacatcttccgctccaagtcccttcccgtaatttgttgcaagcgcttctttgagttctcccatcgtgatcttcttctcatcatagacaagcgtttttaccgaatagagggaatctgccatattggcaaccccaaatccctgcggaccggtaaagttgtaaacagctccgccttcctgtacagtctttccaactttcatgcagtcatctaccatggaagataagaatggaagcggacatcgttctgcatgcgccatatcgatggcattatcagcattgaccaaaagctggatcgcataatccatctgctttttatatgcatcatagaactgctcaaatgtcgtcatgtcctccacattgcctgttgccggaccgatgcggacacctttgtccattccattcgaaaataccagctccagcggacggcacatattgaaaaacgccgcatcatgccatccttctgtcttaccggacttctgtggttccacacatccaatgatgttataatctcttgcatcctgcagagtcagtcctctgctcatcagagacggtatgatcacttcgtcattgtaatatgccggaagtccgattccggttcttgtcaactctgccgccctaatcaggaattcgtgtggtgttccgttccatacccgcacagaaagtgacggctgcggaagaaatacatgcatggatgcctgaatgctcataaaggaaaggtcattcgtcacatcaattccttcttcattctgtcctccggcaatcaggttctggaacagactgtaacctgcaaacccttccgctgacgctgcatctctgcacttgttcagatcattgagttttacccagatacaatccatcagttcctgcgcaaactctcttgtgatcttgccgctctccatgtccttctgataataaggatacatgtactggtcaaatcttcccggtgagatcgaatgtccgctggactcaatctgcagaagctgctgcacaaaccagaaagactggcaggcttcgtaaaatcctgtggcacctttttccggaacatttgcacagttctgagcaatctgaagcaattctcttttccggacaggatctgtgcattcttctgcttctttcaaagccagtcttgcatatcttctggcatattcgatggctgcatcacagctgatcatcactgcctccagaaaacgggacttcttctgataatctccatctgccagacacagcttatcaagctctgcctgtgcttttgccttgattccggaaaatccgattgcaagcacctctccgtattttacggtcacatgtcccacaccattatagaaataatttccaggcgtaaagatattgtgttccattgccagcagtgtctccggttccatgtaagaagtggcaagttcgctggtcgtttttcctttccagtaagcattcgcttcttttaactcctgctttgtcttttctgaaatatagaacggatccgcacttcttgtctccacagtatcaaactctgcttccagccattcataagaaaattccggataggtctgacatcctctcggtgcgattgttgtgcttcccacaatcagttccaggtcacggatgacgatcggaatattctcaagaatgtgtgcaaatgcttttgctctgcggatcaccatcggctcattctctgtctgtctgtaagattccgtgatcaaaattgctcttgcagactcaatctcaggcatctttgcatacagattttctaccagcttcggaattctgtctgactttggaatctcagtgctgtcataattatacaatcccatctgccttgttgctcctttctcatattcgtattaactttctaaagaaaccctctctctatccagttaacgtcattatactttacacaacagcagaagtcaacaaaactacaatatcatttcccgtctttaccctttaaatcaaaataaatcagaatttattttatgtggtttttgttgtttttattaaaaaaccacacctcagcgcattgacaaaactgcagaaatccatcatactggaaacagaaatctggaaaggtgggacttttcatgtcacattttgaatttgatatccatactcatacaatcgccagcggacatggttcagctgccacgatcactgatatggtcaaaactgcacgtacacagcatttaaatatgctcggaatttcggaccatggtcctgccacacttggcggcggaaaatctgcatatttccgaaatcttacttatgcacctaaaaaccggatgggaatccgcatgctgtacggtgccgaggtcagtattttagacaatcacggaaaactggatctggaggatgaaattttaaagcacctggattatgtgatcgccagcctgcaccgccctgctaagcgccccggatcaaaggaagaaaatacacgttcttatatagaagcaatgaaaaacccatatgtacgaatcatcggacattgtgatgatgtaaaattcccggtagactaccttgcactggtagaagctgcaatggaatatcatgtcattctggagctcaatgacagctcactgcgcccggacggctaccggggcgatacccgttttaacgatatgatgctgctcaacctgtgcaaacatttccactatccgatcctgttgtccagtgacagtcacggaaccggacatatcggaaattttgatcatgcaatggaactgatccggctcgctgaatttccagaggaactgatcttaaaccgctcgtccggcgaatttttgagctggcttgagaaatggcggatgtagtcaagaccaccggcttag

SEQ ID NO: 7028 - DNA, 1996 bp, Unknown
  gut microbiota DNA sequence
actgcttcatagattctttgcaggagatacaacctttcatgaaaatctgctcctctcttctgtttgttcaaaatcgtcctgtttttccatattatagttcagaagttcaaaattttcaatatttacagcaagaaaacacaagaaataggggaataatgaatgttatactaagtgcaagaaatgacacagacaagtcagacagattaagggaaattaaaaaacaggaggattatcatggaagtaagaacagcagcatcaccaaaagatgtaaaacattacacaacagacagattaagagaggaatttctgattcaggatttattccaggcagataagatcaatctggtatacagccacattgaccgtatcattacaggagcagcagttccggtcaatgagaaactggttctcacagcaggagatgaacttcgtgcagaatatttccttcagagaagagagcttggaatcatcaatatcggtggagatggaatcatcacaattgacggacgtgtttatgaagtaaatgcaagagacggaatgtatgttggaagaggatccaaagatatttctttcgagagtaaagatgcttctaacccggcaaaattctatatgaacagtgcaccggcacacgtatcttacccaacagtacatatcaaacttgagggagaagcagaagaaggcgttgtgatcgtaaaagatgagaataaggtagaattaggaacactggaagattcgaaccacagaatcatcaataaatacattgtaacaggacaggtagagagctgccagcttgcaatgggactgacaaaacttcttccgggaagtgtatggaacaccatgccgtctcatacacatgacagacgtatggaagtatatctgtactttgacatggatgatgattcattcgtaatgcactacatgggagaaccacaggagacaagacatatcatcatgcacaatgaagaagcagtcatctctccaagctggtccatccactccggatgtggatccaaagcatacacattcatttggggaatgtgcggagaaaaccaggattacggcgatatggacacaattgcaaacaaagatctcagataatagattttagaatttagaagagaaggagaaacagttatggtaaatttttcactggaaggtaaaattgcactggtcacaggtgcatcttacggaatcggatttggaatcgcttctgcatacgcagaggcaggagcaacaatctgctttaacgatattacacaggaaaaagtagatttaggacttgctgcatacaaagaggccggaatcgaagctcacggatatgtatgtgacgtaacagatgaagcacaggtaaaagcaatggttgcaaagatcaacgaagaagttggaatcattgacatccttgtaaacaatgccggaatcatcatgagaaaaccaatgctggaaatggaagctgatgagttcagaaaagtcatcgatgtagacttgaatgcaccgttcatcgtttctaaagcagtgattccgggaatgaaagaaaaaggacacggaaagatcatcaacatctgctctatgatgagtgaacttggacgtgagactgtatctgcatatgcagctgcaaaaggtggactgaaaatgctcacaaagaacatttgttcagaatacggtgagtacaacatccagtgtaatggtatcggacctggatacattgcaacaccacagacagcaccactgcgtgaaattcaggcagacggaagcagacatccattcgatcagtttatcatttccaaaacacctgctgcaagatggggaacaccggaagatcttcagggacctgcagtattccttgcatccgatgcatctgattttgtaaatggacacattctgtatgtagatggtggaatcctggcatacattggaaaacagccataagaaattgaaatataaataatcaagaggagatcaattcttatgaggaagtaacgccgcagctggtggaaca

SEQ ID NO: 7029 - DNA, 636 bp, Unknown
  gut microbiota DNA sequence
atccagattttgggatgttatatggatcttggaaatccagacgatgaagtgcggaaaaatgctgtagatacatttaaaaaatgtttgaaattcaatcagatcctgggagcgtccattgttggaacagaaactgcgtatccgcgtctgagcctggaggaaaagaagatctggcatccctatatgatggacagtgttgccagactggtagaagaggcagagcggcttgatgttgatatggcattggaaccggtctactggcatccgttggaggatctggagacaacggtagaagtgtttgaaaagatgaacagcgaccgtctgaaaatgatctttgatccggcaaacgtgctggaatttccggagatcgatcaggatgcttactggaaagagtggctgtgtgtactgggagataaggtcgaggcaatccatatgaaagattttgtggaaggaccgaacaaagagtattgcccggtctgtcttggtgaaggcgtgatccggtatggcgagatcgtaaaatggatgaagcagcataaaccagatatcgttgttgtcagggaagagatgaatcctgaaacggcgcagagagatattgcgtatatgagaaggttgtggatggagtagtatcatctgaaatag

SEQ ID NO: 7030 - DNA, 6567 bp, Unknown
  gut microbiota DNA sequence
tttttcccccccccccctatttttttcttcaatttgcattttttcttcttatcacttacaataaaatctaatatatcagggaaaggaaattgcacttatgaaaatcagaattgctactttaaaagatttagattctatccttcgcatttatgaacatgcccgttcttttatggcgtctcatggaaatccgactcaatggggaaccacatatcctcctgttgatatgatagaacatgatatccggatgggcaacgcctatgtctgcgaagaaaacaatcgcgttattgctgttttttactatgcatttgaaaatgatgtcacttataccacaatctacgacgggaactggttaaatgacgcaccttacggagtcgttcaccgaattgcttctgacggtacagtaaaaggtgcagcttctttttgtttaagctgggcattctcacaatgtcacaatctgaaaattgacacccatcaggataatctcgtcatgcagagtcttctcgctaaactggatttcaaaaaatgcggaaccatcctgacagaagatggatcaagccgaattgcttatcagaaacaggacagcaaataaacttatcctcatgatacctttcgttctaaagcttctactcgctcttccaacttttctgtccgcaaagcaagtgcgcaatttggcgcactattgccattgcgttcaagacacaccaaacggttttcaatacgctcagatcgattgttcgcatgttcctgcactgtatccaattctgacaggacattgctttccacttctatgatcgtatgctccatatcctttaatttttgctccacaccatctaatcttcgattcgtaccctctagtctttggttcatatcctgtaatcttcgatctatctgttcgaacttctgatctatttgttccaactttcgatccatctgatcaaacttctgatctatttgctcaaacttccggtctatctgttcaaacttctggtctatctgttcgaacttctgatctatctgctcgaacttccggtctatctgctcgaacttccggtctatctgctcgaacttccggtctatctgctcgaacttccggtctatctgttcgaatttctggcctatctgttcaaacttctgatctatttgttcaaatttctgtcggaactcggtgtccattttatctacccgctgttccaacctctcgattcttccatccagcatatcaaaacggtctacaataaccgtagtgatagactgcagcaattgttcatttgtcatacccatacaataaactccttcttttatttttatattgttttttggaaacatattttcataagcaatgcattgtttatttgactgagatttttacaacattaagaaatgtatgcagattaataagaataagaatttaccagatttgttcttattgatgtagatgattataacatgcttctgtagagcagtacagctgttttttctatttttctcgtttttgttactctttcacaaagtcactttctaaaaaaatctccacatccaattttcatcggatatggagatttttcttaatcttcttcctgcatcccccagaatactttttctgcggtgatcggaagttctctcacttttactccgaccgcatggctgactgcacttgcaatcgcaggggacggcgtattgatcacaatctcgcctatcgatttcgctccaaacgggcctgtcggctcgtagctgctttcaaattccacccggatattgcccacatccagacggcttgggattttatactgcataaaggaattgctgtaattttttccttttgcattatagatgacatcttcatacatggccattccgattccctgcgcaagtcctccctctgtctgtactctcgccagacttggattcactaccgttccacaatctactactgccacataatcaatcaattccagttctccggtttctttgtcaatctccacttccgccattccaaccataaacggcggcggtgaaatcggtgagctgtatgcctcactggcatagagcgcctcttcattgttgcacatcacacggtttccgatttccgctctcgaaatggatgtacctgttttgatattcacaacacactgtccgtcaaaatccacatcgtccacatcacatcccaggtactgtgcacctttttcgcaaagtttgtcttttagtgtttcacaggtacgtacgactgccattcctgtcacatatgtagtacttgatgcataggaacctgtatcataaggagaagaatctgtatccactccatgcacaataatctcatccatctcacagtccagacattctgctgccatctgtgacaaaatcgtgtcacaccctgttcccatatctgaagcaccaatcaagagactgtagaatccatcatcgttcactttaattccaacagatgctgtatctacagcggaaatacctgagccctgcattgccattgccacaccgacacctctgacttttccatttcccatatcacggctcgggaatttttcatcccatttcatcatttcttttgccttttccatacacttatccagggcacagctgtttgccgtctccccgtaatatgcaggcattacctgcccctgacgaaccatatttttctcacgcagcgtgaccggatccatattcattttttctgccagctcattgactgcagactctactgcaaacaagccctgtgttgcaccatatccacgataagcaccggctgacattacattcgtgtataccacgtcataagcaaaacggaatgctttcgccttcccgtacagaggaatcgatttgtgaccggaaagtccaactgttgtcggtccgtgttccccaaacgctcctgtattggaaagcgtatagacatctattccctgaataattccgtctttatcagctccaagacggacatgaacctccatctcatgccgcggagaggatgcaatcatagattcttctcttgtaaaaatcatctttgccggttttcccgttttccatgttaccagtgccggataaacttctgagacaacagactgttttgccccgaaaccgcctccgatccttggcttgatcacacgaatcttcgactttggaatatccaatgcatttgcaagaatccgccgtacatggaacggaacctgtgtggacgaaaggacattcaatcttccatacgtatccagatatgtatatgttctgaatgtttccatcattgcctgctggtttgcctttgtatgatacacctgatcaatgatatactcacagtttgccagaaccgcttctatatctccctcttcacagctgtcatgtgcacagagatttcgcttgttgtctgcccctaccggacacagactcttccagttttcttccggatgcaccagaatcggattgtctttggctttatgaaaatcaagtacaggctctaatacctcatactttactttgatcaattttaacgccttatttaccgcttcttttgtccgtccggcaacgatcgcaactgcatctcctacaaaacggactctctgatccaggatcagtctgtcataaggactcggctccggatatgtttgtcccgccatcgtaaaccgcttgtccggacaatctttgtatgtcagaatacattcaatatccggaaccagttctgcccttgtcagattgatatcctgaatcaatgcatgtgcatgaggactccttaatactttaacaacaagactgtcttttgccgccagatcatctgtgtaaactgcctttcctgttaccagcgccttataatccactttcggaatggcctgacttaccactctgttccccatgcctgcacctccttctctttctcactctgctttttcaccgccatatatttccggattgcccgaagctgtcccatatatccggtacatctgcacaaatttcctgataaatattctttcatttcttcaatcgttggattttctaactcccgcaccattgccagcacattcataataaatcccggagagcagaatccacactgttctgcaccttcctgtgcaagaaatgcaccgaactcttctgcttcctctttcagcccttccagagtcgtcacttcctgcccctcgatccctgctgccagaatcgagcaggaaagtctggattttccattgatccagactgtacaaagtccgcagtttgttgtctcgcacccacatttcacactgtagcatcctaaatttctcaatacatccagaagtatggtatctccggatacttctgccgatacctgttttccatttaatttaaaccttacttccatgctcttccctccgtgatgattgaacgcatctctctgaagatcagtacctctgccagatgctgacgatactttgcacttcctctcatattggttccatactcaaattctgaagctactatttttgcatattcccggatttcttcttccgaaatatctgccggaatctcccactgcttttctaacagtgctgctttcatcggtcttgctcccactgaaaagtaccaggactctactccgttgaccattccagtgacaacagaacatgcaatcaccggaaaatctgttttggtttgccgtactgaatcatagcggaaggaacgcttgctttttcttattataatagagagaagaagatccttatcttttttacgatttacaaattccgaaagtcgaataattcctccattatataactccacaaatgtatccaaagccaataatgccgtcagtacatctgaaaatccaaatcttccatatatacttccgccgactgtcgcctgatttcgaaactgcactccaacaatgtggcggacacactctgcaattccgtcgccatacatttcacgtaatccctgatgtaactccagctgtctcaaagtacacatcgccccgattttaaatacatggtctgtctcttcaatctgatcaagaccaagctctgacagatcgattactgtctttactctcgcatttccaagacgcatccacatcattccgcccattacacggctgtttctcgcctggttcaattcgtaagcttcttccaaagtctttgctttcacataatctgtaatcgtaagcaaaattcttctcctctcttttgtatctttcactcttttgttctcaaggcataaaaaaagtgcaaatgtacttatcattcacactttattttaaccttataaattttatcacatgttttagaaaaagtcaaaactttttatcgttggttctgttcaagaggaactttgattacctctatatttttgataataaataaaagccgtaaaatcttccatttctagaacttttcacgacttcctaagaacaggggatgagagaatcgaactcccaccaaaggttttggagacccctatcataccatttgaccaatcccctatatggtgtatctcttgaatactcgttaagtatacctgttattcctctgtttgtcaagaaaatttttgaattttttctacaattcaaaatattttatttctaacatcatttacaaacaaacagtgcacccaaaaagtcaggtgcactctgtttttattgttcaattacatccattgccatcactttcccatctattttagaaatgtcttcatcagcaatcgtatatacatttttatcatccttgtttacatgtactgtaatcgtctccggatccccgtatttcatcccctgatccagataattccgcaaaatatcatgataaatttcaaaaacatgtgtctgcatatctgtctcagacggtaaggatgctccattcatcacttcattactaacctgagtagcataatcttctgtctgtttctgaagctcctgataggtatcattaaagattaacataggctctacttttacatctaccgtgaaatttttattttctacttcttttgcctctgcaactgtatattttacttgcttcatcatatcgctaaacaactttcgatacttttcttccaactcatccggcaattcatagccggaaaattcttgtagcattatatccatgttgttttgaagattatcttcaaatattttatccgcttccttttcatccgcccctgttaattctacatacttctgaatttcgtttttataacttacatccaaaactgccttggtataaccactggcatcaaatttcttcccacatcctgcaagcaagacacatactccgataaaaaatgctatgtagcgtatctttttccccatattcttcataagttctctactccttttcttatttttcttcattatagcattaatatacatcccagtcaccgtcttcttatcgccaaatttcgtcattttaaagcaaaagattcgtagaaacagtaacaacacaaaaaaacaacaccatacggtgctgcctctcattccatctgtatttcctgtaccttcaaaactgcatacaaagaatcatccttttcctatcaccttgcttggttatgccctcgacctattagtaacagtcagctccatgcgttaccgcacttccacctctgccc

SEQ ID NO: 7031 - DNA, 992 bp, Unknown
  gut microbiota DNA sequence
cgccttctttcggcgctgcgattccacccagagacaggcgatacttatcggttcgtccatcttccagcgtcatatgggcaagggcatcaatacaggcttcatacaccgctacccgatggcttttccccaaaggcggaacacaaaagctatactgtttgttgcttccttcctgttccattcgaaagctctttccccggctgtcataaatcccacgcagaaacgcatactttgcttctccctgttcatccatgccaacaaaaacagcgttatggtagggggcgctctcatacaggattcccagctgcacacaataatccagtacctcatcccggattcccctttggttcaaatatctccgtacccggtaaaaactgtcgttggggaaaggcagggaaaagggcttcttcctgggggctggttctgctctggaaacatacacaggcgtctgctcacacaagatttttactgcttccgtatatcccatgccatctacctgcatcaaaaaccggagagccgacattccaccaatacccctggacttccaatgccatttgctggtaatctcattgattttgaaactgtcatggtcctgaagctgccattcatttcttgtccgtgtttttttcaatctccccggctgatatgtctgcagatactcgtaggctctcacctgcttggctgcctgatattcttcttcagtaacccaagccatcagatcactgcattgcgaagagcctcgaccttatcggtgcgctcccacggaaactcttttcttccgaaatgcccgaaggctgcagtctgtcggaaaataggacgggtaaggcgcagggtatccacgatctgcttcggagtcagcccaaacaccagcgggattgccagttccagacagtcatccgcacacacgtttcccgtaccaaacgtgtccacctgcaccataactggctgtgccactccgattgcataagccaaagacacttgacacttgctggcaa

SEQ ID NO: 7032 - DNA, 5375 bp, Unknown
  gut microbiota DNA sequence
ccgtatgcatcaagaagagtggaatccagatccagaataacagcctgtggcatctgaatactgtaaactctttttcgaagtattctgccaatcgtaaggaattggtttaaagtatcttcatccatacggttaaagaatcttgataccgtaggttgtgatgctaaagcatctttatttagtactgctttaaatactgggtcatttgtaagttcatctgaagcatcatcttcaaaataacctgcaataatcatatagattatctgaaggagattctccttgtcagtgtgatatctaaatgatgcagaatcattagtcttaaatgagcgactgaaaagtttatcaatgtcaagtttacttacgaattctttgataagaagcaggcctgcatcggaggataaatctcctccatcaaaatttattttaatctgtctattgctttctagtgataaggtgtttacaatactcatgaagggctcctttgtttgtattattaatggctttgaacaccttaattttaccacaaacggatgctctttttttattcacttgataagtgaaaagcaatattcaattaaaatacagtaactatgtggctttcagccactttcacggctacgccgtgaataatccaggctaaagtatattcacctgtaatatgaaacataggaggatcaggagatggatagtgaacgggcccttgctgtagcggaggaatcttttcttgtaaatctgctttcagacgaaacgcaggagataatccggcatgatatgcgagagtatgaaatagaaaatggctgccgttttgaaagagatgaaacgggaaaatatttatggatgcagagacctttttcagaattgaaaaaggttctttattcaggaacagatttaatatattgtgagccggaagaagtaaaagaactctataagaaaagcagaacctatagtattccaatagaactttctaaagcagatttaagaagtctatgctgtaaggcgggatcagtaggattgactgtgggtgaattgttagagaattttataaatgatttaatcataggagagcgttccaatggatctgatgaacgtatgtatgcagaacaatggtttcaacgctgctggttcagcattgactacggaacatcatcatttctttcttatctctacaatatgactatgatagattatgtagaaggcctgctagaagagttggaacactacgattcggctcataaattagaagattatgaaaatctggaaaggcaggaaatccagaatgaattggaagggatttttaatgattacaaagaggaatgtaaaaatgaaagttgtagttttaaagaagagattgaggagattaagaaatggataaatgaacgtgaaggtcttacgaaacatgcaggtatttattcggagcataaaaaatcccattagatagtgcaagtaaggagtgttataatatcaatatctgagaagtattcaaaatactataaattaaagagtcaagatatgaacaatatttttttgaaaaatcgttgacactgtagggaaaaacgacggttatgaagctgttgacaaatctctggaaaccgacaggaggaagcatcgagctgtttggagagaaactgacatcgacttcgtatgaggtacttaagcggatggggtgcatgattgaatttcctactttttatgagcatttaagtggcagagagaatcttgcgcttcattgtgaatacatgggatattacaatacaggaagtattgaaaatgccatggagctgttaggcttgaacaatacagggaaaaaatcagtacgcgagtattctctgggaatgaaacagcgattaggacttgcacgagcggtgttgtgtaagccggaacttttgattttggatgaaccgactaatggtcttgatccggcaggaatcaaacagattcgggatttactgcggatgctttgtacggaatacgacattacgattattgtgtccagtcatattctttcagagatcgagagtattgcagatacgatcggagtgatcaaccgcggtgttctcgttcaggaaatcgcgatgcaggaaattacggaaagaagtcttgcctatattgaattgaatgttgtggatacaagaaaggcttcgtatgtactgtcggataagatagggattgacaactttaagattgtagaagatagaatcatccgaatttatgacgggaatatatcggtgcaagaattgtcaaaggcgctggcattacacgatgtggaaatgactgcgattggaacaaagtcagaatcactggaagaatatttcctcaaactgacaggaggtgatgtgagatgttaaaattgatcaaactggaatggaaaaagaacaacatcggtaagtacattagaaatgctgtgattcttgcgattatcctctgcacgtttctgtttgcactggcgtatctgggaattgcaaatgatccggacaccggagtgccggatgctgcaccggggaatgagatgatttcgtcttccatcgaactgtttacggggatgtcttttttagtatttaccggggtgatgctggcttcgtttattgtcacagcgtataaaaataaaaccatgaatctgatgttttcctatccgatcagacggcagaaaatattagtgtcacaaatgctggcagtgtggatttttaatcttattgcgctgattttgacaaaattgctggtttatggctgtgtacttgtcggctcactttttatgaaatctgcatttttgcttgattttaacatggcaagtgcgtcattttatgtgcagcttattctgaaatcgattgtgatggtaagtatgagttttattgcgctgtttatcggtctggcaatgaaatcatccaaagcaacgatcatttcgtcattccttctgatttttttgacacaggcgaatatcggtgattttacgctgaaagataatctggtttttcctgtaatcttaacaggaatatcggttgtttttgcagtactttctgtgtgtcatgcggagacgaaagatttgatgtagtggggcgttttaagaaaaatgacgcccgaaaatagcagggagagtgtaagctgaaaagagaaaagctgtaacgtgttatcataaagataaaatgcgttacagcttatattgtcaggcgttacagcccgaagaactctttgatttgcccggcaatgatgttcataagttttgttctggcttcaatgcttgcccatgcgatgtgaggtgtgataagaagccggttgctgtccgtgaagccgcgaagcggattgtcttcggacataggttctacacacagaacgtccagaccggcagcttgtatttcatttgtttccagtgcggtttttaaatctgcttccacgacgatcggaccacgtcccagatttaagaagatcgcgctttttttcatcttacaaaaggcgttcaagttcataagatgttctgtatgttcattcaaaggtgcatgtacagagacaatatcggaagtttcaagaagtgtatcaagagaaacctgatggtagccctcctgaggcgctgcaccggatggggaagcatagatgacttgcgcaccaaaagcttctgcaatcgcagctactctgcgtccgatatttccaagtccgataatgccccagatctttccttttaattcgtagaaggtctgggcaaaatgagtgaaaatagtgtcatttgtgtagtggtcctctttgacatagtcatcgtaatatcgcagatgttccagaagatagaacaacatggcaaaagtatgctgggcaactgattctgtagaatatccggcaacatttctccacgcaatcccgcgtttgtctaaatattccttgtccagattgtttgtgccggtggcagtgacacagaccaatttgagatttttggcagcgccgatggaggcttcattcacctgaattttatttacaatgatcacatctgcatcctgaatgcgttcaggcacttcctgttgggtggaaaaaggatatttcacaacttctccaaacagatcaaatctggacagatcaatgtcgtcgccaattgtttttacatctaaaaatacgaacttcatagtttgtctacccctttcatttgttgtatacccatctgggcatcccgtaatacatgcccgcggcgggtgaacttcgtccgatactgtatggtatcatggatttgagaatactatatcacatagagagggtggggtcaaaaatctaaggttgcgctatcaagtgattcgctaagaaattccgatttgaaggagcatttatgacattctacaaatacaagggaaagcgtatcagcgccacaaagacttagtatcgtggcggttcaatctatttcccgtcagcctcttttacgtaataagaaacgatggagttttcaaggggaaaaatgaatttcaactttctctttttaaataatcatgttataatgcagaaaagcataaaattctggttttctaagcggaacgataccgcatcttttattcttatagcatatcggaagatctctatgctttgatttcaatctaaaacagcagagagatttgagagaaagatgccgtattggaaagcctcctgcagctattttcattcaaggaggtatttatatgaaccagacaacacagatgcagcccgtaaacagactgtacaaatcgaggatttttgccatgctctacagtgacaggaaagatctgctcgatctgtacaatgcggtcagcggaaaacattatgaagatccggaattgctggaaatcaatacactggaaaatgcaatctacatgtcgatgcataatgatctgtcctttctcattgattccagactttccctatatgagcatcagtccacctacagtcccaacctgcccctgcggtatttgttttatatctcggatctgtattccgggatgacaaaagatgaaaacctgtatggtacgaaaaggattcagatcccgactccgcagtttgtaatcttttacaatggaagtcaggaacagccggatcgaaaaattttaagattgtctgatgcatattgcgtcaaagaagaacatccggcattggagctgactgcggtgatgctgaatatcaaccgcgggcataatgaaaagttgaaggaaatgtgcaaatctctgaaggattactcggaatatacggcaagagtgcgggagtacgctcaggtaaagccggtggaagaagcagtggaacaggcaatcagtgagtgtattcaggaaggaattctttcagagtttttgaaacaaaacagagcggaggcgaaacaagtgagtatttatgaatatgatgaggaaaagcatatgcggcaggagcgggaagcgtcctgggaagagggc

SEQ ID NO: 7033 - DNA, 1026 bp, Unknown
  gut microbiota DNA sequence
tattctcaaaatcgttttttttgctttgttctgaattgtagtatagcagtttttttactttttttctatctcaccctgtattttctgccctgagcctttcgttatatgagagggttaatctttcaagagcaagatccacccgggtaataccgtatcctcattttatgagaacggtcttatccccgggttaggtatcttgatggggattacgtttccccataccctcgcttttgcatcaaagatgcagtcagtatccacaaaaatggatactgcactaattctctatcggaagggacagccgataaaaattagtgaactgtaacactattcgatgtcacagtttagaaaggaaggaggagtatgccaccaaaagaaaaatcaaaggaattgaagcatcgaaacataatctgtctgaaacttacagacattgaattggaaatattaaatcaggccgcaagctctgtgggaatctctcgttcagaatatctacgaagattgttcctaaatagaccaattcaaattcattatgaagttgtcgcagacatcaaagtacttcgggagctggtcgggcaatacggtaaaatcggttccaatctgaaccagatcgccaagtattttaataccggtggaactcattcccaggctatggaaaatgaaatccatcaatgtatctccgacctcttcctcttgcgaaaaaaagtgttagaaatggcaggtgattttcatggcaatactaaaacacatcaaaagtagaaatgccaactattcaaatgccattgattatctgcttttccaacatgatgagagcactggaaaaaagataaaagatgaaatggggcgaagtcttttaagagatgagttctacatggatggtctcaactgtgatccgatgtcttttgacaaggagtgtagtctgacaaatgcgaaatttcataaaaacaaaaaatcatctgaaatcaaaagtcatcactatatcatcagttatgatcctgctgatgctattgaatgtgatctgacgggagaaaa

SEQ ID NO: 7034 - DNA, 980 bp, Unknown
  gut microbiota DNA sequence
gagacaccttctttcgtaaatgttgcaaatgtttgttttggcactttcattatacaacacatggaatcgaggtgtctttcttttatgcaaaatcacgaacttgctcatttatagctggaataaaagatggatattagaaaactcttatttttttatgttcaaggaaggagttcgatgaaaaaattattaccgctattactttttggatttttatcaatcataataggagcttcgatattgagtaaagaaaataaagaaacatccccaaatagagacatatcacaaatgtcaaatgctcatcttttatcagatacaggtactttgttggaataccatcctgataaaaaagaaaccatagtacaagtagatgattcagataatcgatttttatacgatgaggttactttaattctcacaggtcctgcaggtgagtataaaattgattcatcaatggttggtgagaaaatcaaattttcttattttcatagtacaccaactgataagccgacattagaaatttatttaattgacaaatgggaaaaataaattgtatacttataaataagcaaatatcgaattttacacaaaactgactttaagtttattcaggggcagattgcccctgttttttaaaataactccatacttctctccaaaatccctcgcatatacgcaatggcaattccataattcgtaattggaatgccctgctctctggcacaatctaatcgatactgcatttctttttctgtcagcgtgcatccgccgcagtggatgatcacctgataaggggacagatctgacggaaaatccgttccgcttgtaaatgtaaactgcaaatctttctgtgtaaactgtttcagcatcctgggcagtttgacagttccgatgtcttcgcactgccgatgatgggtgcagccttcgcagatcagtacatgatccccgtcttttaatgttttcagggtctgtgcaccatgggc

SEQ ID NO: 7035 - DNA, 601 bp, Unknown
  gut microbiota DNA sequence
ggcattgtttaccgctctgtcactttctacctcttttgtatagttcggtctaaactcgttagggtctacatagtcgtaatagaatacatagccttgaactctgttgccttttttcttcttctcgtaccgcaggtttctaatacactttgatttctcgttgatatcctttattgcaatgtttatagtatatttttcaaaaagtgccctattaaatgcaccattgtaaacataatcttcttttgtcattccaaacagtgcttttaattgttttgtcgttgctccgaatatcccctttgtactccaacgcatcagttgctgataaagcaacatagaatatttgcttttgaacgatatagcatcatcactaagtaagcgagtaaaaccaggttgcagttgaatcaacaaaggaatatatttagctgctatagtgacgtaaactttcttttttgttgttctaatcgctgagatcaaaaaaccgtcatcaaatatttcgtcatcaccgaactctatccatgaagccattgccagttttttgaacatacctctaattcttgaataatagtgatgagatttaaagccaagcatatcaaacattgctttt

SEQ ID NO: 7036 - DNA, 134324 bp, Unknown
  gut microbiota DNA sequence
cagcatatggaaagtacatattaaaagaattatcaaagaggttaacgcaaaaatttgggcgaggttactcgtatgataatttaaaattgatgagaaaattttatctggtatattctaaagattcaattggggaaacggtgtttccccaatctgaaaacttgccgactacaaaagaaggaagaaaattttatttgagttggtctcattatcttattttaatgagaataagtaagattgaagaacgtcatttttacgaaatagaagcatatagaaatggctggagtaaagatgaattggcacgtcagtatggtagttcgctatatgaacgtttgtcattgagcagaaataaggaagaagtaatgcgtcttgcaacagaaggacaaatgcttgaaaagccagaagatatattcaaagatccgtatattttagagtttacaggacttccggaaatggttacttattctgaaacggaattggaaaatcgaattatagataatttgcagaagttcctattagaattagggagaggatttacatttgtaggcagacaggttagatttacatttgaagaagagcattttagagttgatttggtgttttataatcgtttattgcgttgatttgtattgtttgatttgaaaattggccagttaaagcatcaagatataggacagatgcagatgtatgtcaattattatgaccgaaaagttaaattggacgatgaaaatgcaacaataggtattataatttgtaaagataagaaggatgctattgtagaaatgacattgcctaaggataataatcagatatttgcgagtaaatacgaaacggtacttcctagtaaagaagaattacaaacagtgttggaagacaaaaattttgaataaataaatgatgaatactcgacggagtattttgcattccgttacgaatatatttgaaaatgtggctgacagtaagcatacgaaaagtcacacatggaggattttgctatggatagattcattttgaaagccccatataagccaaccggagaccagccacaggcgatcgagcagttggtaaaaggtttcaaggaaggcaatcaatgccagactttactaggggttacgggttctggaaaaacttttacgatggcaaatgtgattcagcaattacagaagccgacgcttgtcatcgctcataataaaacacttgcagctcagttgtacggcgagtttaaggagatgttccctgagaacgcagtggaatattttgttagttactacgactactatcagcccgaagcctacgtcccatcctcggatacctacatcgccaaggattcagcaatcaatgatgagattgataagctgcggttatctgctacgatggcactggcagagcgcagagatgtgatcattgtggcgagtgtttcctgtatctatggactgggaagtccggtagactatcagaacatggtgatttctctgcgtccggggatgatcaaggacagagatgaagttgtagcaaagctgattgagattcagtatgacagaaacgacatggattttcatcgtggaacattccgggttcggggagatgttttggaagtgattccagcatatgaatcagatgttgcgatccgtattgaattttttggtgatgaagtggatagaatcacagaggtggatattcttacgggagagatcaaagacgagttaaagcatgtagcgattttcccggcatctcattatgtggtggataaagagaatatcaaccgcgccgtcaaggcgattgaagaagagttggaagagcgcgtcaaagaatttaaaagacaggataagctgttagaagcgcagcggattgctgagcggacaaattttgatattgagatgatgcaagagacaggattttgctctgggattgagaactattcccgtcatctgtcaggattggcgcccgggcaggcgccatatacactgattgattatttcccggatgattttgtaattatgatcgatgagtctcataagacgattccgcagattggaggaatgtattccggggatcagtcgagaaagtcgaccttggtggattatggattccgtcttccttctgcgaaagacaaccgcccgttgaattttgaagagtttgaaagtaagatcaatcaggtattgtttgtgtcagcaaccccgggagtttatgaagaggagcatgagcttctgcgggcagagcaggtgattcgtccgacagggcttttagatccggaagtagaagtgcgtccggtagaaggtcagattgatgatctgatcggtgagatcaatcaggaaatttccaggaaaaataaagtgctggttacaactctgacaaaacggatggcagaggatctgacagattatatgcgggaaatcgggattcgcgtaaaatatttgcattccgatgtggatacattagaacggacggagatcatccgtgatatgcgtctggatgtatttgatgtactcgtgggaattaatcttttgagagaaggtctggatattccggagattacgctggtggcaattctggacgcagataaagaaggatttttacgttccgagacttctctgattcagacgatcgggcgtgcggcacgaaattcggaaggtcacgtgatcatgtacgcagacaaactgacagactcgatgcgtctggcaattgatgagacggaaagacgacgcaagattcagatggcatacaatgaagaacatggtattacgccaaagaccattcagaaggcggtccgcgatcagatcagtatttccaaaaaagtagcagcagaagaactgaagctggagaaagatccagagtctatgagcaggaaagaactggagaagttgatcggagaagttacgaagcgaatgaagaaagcggcagcagagctggatttcgaatcagcggcagaattaagagataaattgattgagctgaaacagatattgaatgagatcgaataattatgatataaatgggaaaggaattttacatgggaaaaaagatggacgccagacagtatatcagaatacgcggcgcgaatgagaataatttgaaaaatatagatgttgacatccccagaaatgaactggtagtgctgacaggactgagtggttcgggaaaatcatccctggcttttgatacaatttatgccgaggggcagagaagatatatggaatcgctttcttcctatgcaaggcagtttcttggtcagatggagaaaccggatgtggaaagtatagaagggctttctccggcgatttctattgatcagaaatcgaccaatcacaatcctcgctctaccgtgggtacagtgacagagatctatgattatttccgactgctctatgcgagaatcgggattccacattgtccgaaatgcggaaaagagattaaaaagcagacggtggatcagatggtagatcaggtgatggcacttccggaaggtacaaagatccagttgcttgctcctgtcgtaagaggcaggaaaggaacccatgcaaagctgtttgaacgggcaaagaagtcaggatatgtgcgtgttcgtgtagacgggaatctgtatgaattgtcagaggatatcgcactggataaaaatatcaaacataatattgagattattgtagaccgtcttgttgtgaaaccgggaattgaaaaacgaatgacagattccgtggaaagtgtactttcacttgcggaagggcttctgatcgtagatatcatcggcggagaaccgatgaatttcagtcagagtttttcctgcccggactgtggaattagtattgaagaaattgagccgagaagtttctcgttcaacaatccgtttggtgcctgcccgacttgttttgggctgggatacaagatggaatttgatgaggatttgatgataccggatccgacactcagcattcagcagggagcaatcgcagtgatgggctggcagtcctgtacagaaaaatcaagctttacacgtgcaattttagatgcgttgtgtgaagaataccattttgatctggagacgccgtttcaggactatccgaaagagattcacgatgttttgatttacggaacaaacgggaaatctgtgaaagtacattacaaaggacagcgtggagaaggtgtttatgatgtggtctttgaaggactgatcaaaaatgtggagcgccgctatcgcgaaacggggtctgagacaatgaaggcagagtatgagacttttatgcggattactccatgttccgaatgtaaaggtcagagattgaaaaaaggttctcttgcggtaactgtgggagagaaaaatattgcagaactcacagcattttcaatcgataagctgcagaaatttttacaggggctggaactgacagagacgcagctgctgatcggagaacagatcttaaaagaaatcaaagcgcggattcagtttttgctggatgtaggactggactatctgacgcttgccagagcgacagggacactgtccggcggggaagcgcagagaatccggctggcaactcagattggttccggacttgttggtgtggcctatattctggatgaaccgagtatcggattgcatcagcgggacaacgacaagttacttgccacattgaagcatctccgcgatttgggaaattctctgattgtagtggagcatgacgaagatacgatgctggcggctgactgcattgtggatatcggtccgggagctggagagcatggtggacaggttgttgcagtgggaacggctcaagagttgatggcaaacgaaaaatcagtgaccggagcgtatctgagcggacgcctcaagatcccggttccggaaaaaagagagaaaccgaccggatatttgaaagtagtaggcgcaaaagaaaataacctgaaaaatatcgatgtcaagtttccgttgggaatcatgacatgtgtgacaggagtgtccggttccggaaaaagttctcttgtcaatgagattttatacaaaacacttgccaaaaaactgaaccatgcaagaacaattccgggaaggcatacgagaattgaagggctggagcaggtagataaagtgatcgacattgatcagtctccgattggaagaacaccgcgttccaatccggcaacatatacgggtgtatttgatttgattcgtgatttgttcgcagcaacaccggatgcaaaagcgagaggctataaaaaaggaagatttagcttcaatgtgaagggcggacgctgtgaggcctgcagcggagatggaatcattaagattgagatgcatttcctgccggatgtatacgtaccgtgtgaagtgtgtggaggaaaacgctataacagagaaactctggaagtgaaatataaaggaaagacaatttatgatgtattgaacatgacggtggaagaggcgttggaattttttgaacatgttccgagtatccggagaaaaatggaaacactcaatgatgttggtctgtcttatatccgactgggacagccatctacgacattatccggaggagaagcccagagaatcaaactggcaacagagttaagccgcagaagtacaggaaagacggtatatattctggatgagcctacaacaggactacattttgcagatgtgcataagctgacagagattttgcgacgtttatcaggtgacggcaatacggtgatcgtgattgaacataatctggatgtgatcaaaacagcagattatattatcgatattggtccggaaggcggagataaaggtggtacagtcgtagcgagcgggacaccggaagaaattgcagcaaatgagaaatcgtatacaggcaaatatattgccgcaattctgaataaaaaataaaaatgtgcaaaaggggtttccaagtgaaataaattttattatacttaactatgtgagtatctgaagccgaagagaagacagattataaatgaactgagaaatacaaaagaggggaaaaagaatttgtaaggctggaggagaaaagatggctgtagatatcggaatagatttgggaaccgcaagtgttcttgtatacgtgaaaggaaaaggggttgttttaaaagaaccatctgtagtagcgtttgacagagatacgaatgtaataagagcgatcggagaggaagcacggctgatgttaggcagaacaccgggcaatattgtagcagtacgtcctctcaggcagggtgtgatctcagattatacagtaactgaaaagatgattcagtactttgtaagaaaagcaatcggaaaaagaacgtttaagaagccaagaatcagcatttgtgtaccgagcggtgtgacagaagtagaaaaaagagctgtagaagaagctgcgtttgcggcaggagcaagagaagtacatctcattgaagagccggtggcagcagcaatcggagcaggaatagatatcggaaagccatgtggtaatatgatcgtggatattggaggcggaactgcagatattgctgtaatttcgctgggtggcgcggtcgtgcatacctcgattaaaattgccggggatgattttgatgaagcaattgtacggtatatgcggaaaaagcataaccttctgatcggggagcggactgctgaagatattaagatcaaagtcggcacgacatatcctctgattgaggaagagagtatggaggtcagagggaggaatctggtgacagggcttccaaagacggtaacagtgacttcctcggagacagaagaagcacttcgcgagacatcagggaagattgtggaagcggttgtttcggtattggaacagactccgccggagctgtctgccgacattctggatcgggggattgttctgactggcggtggggcaatgctgcgaggtctggaagagctgatagaggaaaagacaggtatcaatacaatgacggcagaagatccgatgaaagtagtagcgatcggaaccggacagtttgtggaatttatgagtggcaggaaggatttctgagaagaaatcaggatgggacaggctgcttcggcaacagaatgaagattctgtatgtcgggggagtctgtcttctattgtaggactgttaaacagaaaaaatatgcaagaatacatgtatacaatgttgaggctgcataaaatgggaggaagaagtggagattgtaacaggatacgtggaacatattgtgtttcgcaatgaagaaaatggatatacagtatttcagctggaaagtgaagcgggcgaagtaacctgtgtaggaaccctgaattttatcagcgaaggagagcgcctggaaattaagggagattatgtgaatcacaatatttacggaagccagttgaaaatcagttcttacgagatgaaggaaccggaagatctgatctccatagagcggtatcttggttccggtgcgatcaaaggagtcggtgcagctctggcaggaagaattgtaaggaagtttaaaacagacacctttcgtattatagaagaagagccggaacggcttgcagaagtgaatggaatcagcgaacgcaaagcaagggagatcgcgctgcaggtggatgagaaaaaaggaatgcgcaaagtgatgatttatttacagaactttggaatcagtacagcactggcagcaaaaatctatcagaagtatggcagtaaagtgtatgagatcctggaaaccaatccttacaaacttgcggatgatatcgaaggtgttgggtttaaaactgcggatgagattgcggcaaagattggaatacatacagactctgatttccggatccaaagcgggattttttatgtgcttcagcagtccatgacagaaggacatgtatatttgccgaagaatgttttagaggtaaggacctccaggcttcttggtgttgagattgaaggaattgaaaaatatatcatggatctttgcatggaacgaaagacagttatgaaagaaatagaaggagagatccgtatctacccgtcccgcttttattatatggaactgaatgttgcccgtatgctgaatgatctggatattgactgcgcgatgccggaagatatgatggaaaaacgactgcgaaaagtggaggagctggaacagatttcactggatccaatgcaacatcaggcggtgatcgaatcgatcaagcatggacttttgatcctgacaggaggacccggaaccggaaagacaacaacaatcaacaccatgattcagttttttgagagcgaggggatgagtattcttctggcagcgccgacagggcgtgcagcaaagcgcatgacagaagcgacaggttatgaagcgcagacgattcatcgtctgcttgaagtcagcggaaatccagaagaagaaggaaatgtcaatggatttttaagaaatcgcgacaatccactggaaacagatgtgctgatcattgatgaaatgtccatggtagatctgaccttgatgcatgcactccttacagcagttgtgcccggaacaagattgattttggtgggggatgtcaatcagctgccgtcggtaggaccgggaagtgtattaaaagatacgattgcatcgaataaatttcatgtggttacactgacaaagattttccgtcaggcgggagaaagtgatatcgtactgaatgcgcataagattaatgcgggtgagcgcgtgatcataaataacaaaagtcgtgatttctttttcctgaagcgacaggaggcggatgtgatcataggagttgtgatcacactgatccagaagaaacttccgaaatatgtggatgcatctccgtttgatattcaggtgatgacaccgacaagaaaaggtctgcttggagtagagcgtctgaatgtgattttgcagagatatttaaatcctccggatccgaagaaggaagaaaaggaagcaaacggaaggattttccgtaccggtgataaagtgatgcagatcaagaataattatcagctggagtgggaagtttgtacaaagtatggggtgacggtagataaaggaatggggattttcaatggggatatgggaatcatccgggagatcagctcctataaagaaactctgactgttgagtatgatgagaagcgacaggtagaatatccgtttgagctgttggatgaactggaactggcgtatgcgatcacggttcacaaatcccagggaagcgaatatccggcggtggtaattccgctgcttccgggaccaaagctgttatataatcggaatttattgtatacagcagtgacaagggcaaaaaaatgtttaacgatagttgggagtgaagatacatttcaggaaatgataaaaaacaaaaacgaacaggaacgatacacaagtttggacgagcgtatacaagagttttagagctgttgtacccttcagtttgtccattttgcgaaaatgtatacaagtatggaatctgtccttcctgtaaagaaaagatcgtgtatatccgtcagccaagatgcatgaaatgcggaaagccattgagaaaggaagagcaggagtactgccgtgattgccaaaaaaagaagtatgcctttgaagccgggaagagtatctgggtgcataaagcaccggtttcgcagggaatttacagatttaaatacaaaaacagaagatgttatggagaaatttttgctgcggaaatggctgcagaattaggagatgctgtgaaacaatggaaaatagaagaaattataccagttccgcttcacagatccagacagaggataagaggttacaatcaggcacaaattctggcggaagaacttgggaaaaggctggatcttcccgtgaacaaagatgcagtaaaaagaattcagaaaacgcgacctcagaaagtgcttgggagcagagacaggattcgaaatctaaaaggagcatttggtgtcacaaaatcctggattccgaaaaaatgtgtgctggtcatcgatgatatttatacaaccggaaataccatacacagagtggcaaaggtgttgaaaaatgcaggagcacaaaaagtatattttttgaccataagcattggacaaggactctgacagtatgatatactaaaaatgatgtttaaaaggcaatggatcgaggtggaaacatgttggataaaagaaaaatacgattgatgatcaagatggcttcttatgaaaagcagggagcagaagaggatctgaaaatcagcagttattataaaaaggattatgtgagtatgaatgtgtgggctacggcaatctggtttaccatcggttatgcaatcgtagcggcactgatcgcattctgcacgttggagcagattctggaaaagcttacgatactaaagcttcttctcttgatgggaacggcagtaggcggttatctgattcttttgattctttattgtaccggtgcaaggatgttctacaagagaaaacacaatcttgccaagcagcatgtgaaaaaatattatcgggatctgtcccgtcttgaaaagataaacatgaaggagaaaaaataatatgagcacattacttgtatggaaggatcagatagaaaaaatttatgccagatattctttttatattgtaaagatactgcagttcgtgttgggattatgtgtattcggactgatcaattccaatataggatttatgaaagcattatcctctacagtttgtacagttggtcttgctgctgttacggcctttcttccggtcgggatgctggcacttgtagcagccctgcttgttctggtacatctgtatgcactgtctttgccggtagcgggattatgtctggcaatttttctggtgatgtatattttttatgtaagatttacacctaaaaaatcatggctggtggtagtggcggcagtagcagttgctctgaaggtcccatatgtgatcccggttgtatttgggttgctcggagcgccttcatttgcagtttcgatgatgctggggacgattgtttattatatgctccacacagtaaagctgacggcatcggcatttcagagcggaggggtaaaagaacttctggatggaatcatggtatttacaaaacagatactggccaacaaagagatgtggatgatggtagttgttctgctcctggcgatgatggtagtatatggggtgagaacaagaggcatcagtcatgcgtggaagacagcttccgttgcgggagcaatcgtggcggcagtgcttcaggtgtcaggctgtatgacattggatgtttccttccaggcaagttttattttactggatcttgtggtgacagtagcagcaggtctgatagcagaatttttcttcctttctgtggattattcaagaacagagacattacagtttgaggacgatgagtattactactatgtaaaagcggtgccgaaagtaggggttacattacctgaaaaacaggtgaagcatattacagagcctcatgaagaacagccaaaggaagcaaaagcagcagtaaatctgaagccggagccgatggttcaggaaacggtggcgattgatacgagccagatccaggaagcagatctggagaaaaatgtagatgaacttctgctgacgcagagtttaaatgaagaattgagacagaatcagaacgagccggaggatgacttgagtcttacgaaaagtcttggagatttgtggaccaagaagcctggttctggagaataggatgaggaggtgactggatggaagaccggatcagaatttttttaaacaattacataaatggtttatactttccaacggtacacctgacagatgtgatagagatattgatcattacagtgatcgtgtatgagatcatgctgtggatcaagaatacaaaagcgtggatgctcttaaaagggatgatcatgctgggggcattctttttgcttgccgcgatctttaagatgcatacgattttatttgtggcaaaggagtcgatcagcgtacttgcaatagcggcagttgtcgtgttccagccagaacttagaagagctcttgaaaagctgggcgaaaagaattttcttacgaatgttactctttttgataaaagcaaagaaaatcagcgcttttccgatgaaacccgagacgggatcgtgcgcgcatgctttgagatgggcagtgtctgcacaggagcgttgatcgttgtagagcaggcgattcatctgacagagtatgaggtgacgggaattgaactggattgcaagatctcttcacaggtattggtcaatatatttgagcataacacaccgcttcatgacggagcagtgatcatacggggaaatcggattacctcagcaacgtgttaccttcctctttcagataatatgcagatcagcaaagaactgggaacaagacacagagcggcgctcggaatgagtgaggtctgtgatgcgctggtgatcgcagtttcggaagagacaggtcaggtatctgttgcaatgggcggacaattagagagaggagtgtcaaaggagaggcttacagaacgactgaatcggattcagtacagatcagcagagaagaaagcaaaaaaatggaaaggatggcgcaggaatgaaaaagcataaatacatggaaaatctgagcttgaaagtgattgccctgttcttcgctgtatttctgtggctgatcgtgataaacattgatgatcctgttgacacacagacgtttgataatattccggtggaagtaaaaaatgagcaggttgtaaaaagtaaaggaaaaatgtatcagattttggatgggacagagaatgtaagtgtaaaagtgacggcaaagcgtgaaatactggagaaactgacatcttcagatttcagcgcggttgctgacatgcaggaaatgcagatcaacagtctgatcccgatcaaagtttctgtaaagcgatatagcagtgagtgtaaagctgaggcttcgccgaataacctggtagtggagatcaatgatgtcaaacagaaggtatttcctctgacagtcagtgtgtcaggaacgccgcagaatggatgtatcattggcaacatgactgtaaatcctgaaaagattacgatcaaaggctcagaaccgcttgtagaaagcattgaaaaagcagtggttaaagtggatgtgacgggacgcgcagattcgggaactgttcagggaaatctggtactttatgacagtcagggtaatattgtggatcagagcaagttgagcaataacctgaacacggagaagggaattcaggtagagatccagatgctgaatacaaaagacgtaccgattacatatcagcagccggagaatctgaaagagaattatatttgcacaggatggacctgtgagccgcagacaatacaagtcagcggtacaaaagagatgctggatacgatatcggagatagaaattccgacatcggaaattgatgtcagtgatgttactaaaaaagtagaaaagacagtggatatcacgcagtatcttccggagggaatcaaactggtggatgagaatgccaatacgattttgatcactgttatgattgagaaggagggttccaggattatagaattcccggtagaaggaattcaggttaataatctgaaagacaaatatgagcttacgtttgaatcagatgaagtgatcgaattgaagtttatcggagaacagacaacacttgatcagctggatattacaaatgcagtttcgattgatctgcaggactgtaaatctacaggagagtatgaggttccggtatcgattgaagtgcctgacggagtagaattggaaaaacagcctacaataaaagtaaagctgacagaaaaggaagatgaaacagatcagaaagccgataagaaatctgacagtacacaggagaaatcggaaaaataagggaggagacataaaatggtcagtggaaagacaaaaatcaagaatcctacaggactgcatttacgtccggcaggattattctgcaaaacagcaatgcagtttgcaagtaagatcacggtcagaaagcaggctcgaaatgaggaggtcactgccaatgcaaaaagtgtactgagtgtactcggggcatgtatcaaaagcggagatgagatcgaagtggtctgtgaaggctctgatgagacagcagctcttgcagagatgatcaggatcattgaggatggactgggagaataaaggttacagagcaaaggagaaaaacatgaacaaagcaacattagtcgtaatggcggcagggattggaagcagatttggcggcggaatcaaacagctggaaccggtgggaccaaacggagagattattatggattactccatttatgatgcaatggaagccggatttgataaggttgtatttgtaatcagaaaggatctggaaaaagattttaaagaagtgatcggaaaccggattgaaaaggttgtagaggttgcttacgcatatcaggaggtagatgatattccgcaggcgtatcgggaacgtttttcaggtcgcacaaagccatggggaaccggacaggcaattctctgctgtaaggatgttgtagacagtccgtttctggtcattaatgcagatgattactatggaaagcaggcatatgtggaagcgtacgagtaccttacaagagagacaacatcaaaggatgagatctgtatggtcagctttgttttgaaaaatacactgagtgataacggcggggtaacacgcggagtctgtaaagtaaatgaaaacggatatcttgcagatattgtggagatgtccaatattgagaaatatgagagcggagcagccgttcacaagggagaagcgtacattccaatcgatattgaatccagcgtttccatgaatatgtggggacttacgccagagttcttccagattctggaaagtggatttgaggcatttgtagcaaataccccggcagataacttgaaagcagaatatttactgccgacgatcattggtgatcttttggcggagaaaaagcttgcagtaaaagtgctgacatcaaaagataaatggtttggtgtgacttataaagaagataaggattccgttgtttcggaattgcaggctttgattcatgcgggagtttatccgaaaaagttattctgaaataaaaaataagagagggggcgcagcaaatcaggctgcgttcccttttgccgcgtaaaagtggtcagtataaaagttggaattaaggagaggacataagattgcaggagttaaagaaaaagcgcagaaagaggccgaaaaatgagttagacagaggggcgcaaaaagagcagaagaatctgacggatataacggaagaacagttgaaagtgaatatcgggatcgttcgtttgggaaacatgataaaggtgattcagattgtgatgaaagtgctgctgtgtatgttagcagtgttgttctcatttctggcaatcttgcttcacgaagcggcaaactggatgctggcgacatggacaaatctgtctatggaggagcttgtcgctcagttaaagacaccgatccagggcaccagtcatgaggttatatgggattttatagagacttgtgtaccggccgcagtgatggcagtgttttttgtggtattggtaatcgtaatggtgcgaaaaacaaagattacaaaatgggtggtacagattggagccgttgcaggttcgatggcactgattgtatcatccggacagatggtgtggaatgaactggatgttggagaatatctggaaaatcaggatacgatttcgatgtttttgcaggagaattatatggatccggcattggttccggttacatttcccgagcagaagagaaatctggtgtacatttttatggagtccatggaatccacgtacgcttcaacagatgtaggcggcgcttttgcagaaaatgatattccggagatgacgcagctggcaatggaaaacgttaatttttcgacgggcgatatgctgggcggtctgattccttctgatggtgccacgtggacaatgggagctatggtggcgcagacatcggggctgccgttgaaggtaaagctacgcgcggagaatatacaggaggatgtgcaagtgcttccgggagcaactgttttgggtgatatgttagcggcacaaggctacaaacgggttgttatgtttggctcagaaggggagtttgccggaagaaaacagtattttgagggacatggaaattatgaagtgaaagatttgctctacgctcagcaaaacggtctcatacctccggattatcgagtgtggtggggatatgaggatcataaattgtacgattttgcaaggcaggaagtgacaaacctggctaacagtggacaaccatttaactttacgatgctgacagttgatactcattttgaggatggatatgtttgtgatctgtgccaggatgatcatcctgggaatcagtatgcaaatgttatgtcctgcgccagcagacaggtcgtggattttgtaaactggttgaaagcacagccattttatgagaatactacgattgtgattgtaggagatcatttgacaatggatagtgatttttgtcaggatgtgccggaagattacacacgaggtgtatataatacgatcatcaatgctccaattgttccggtcaatcagaaaaacagaatggcgacgacaatggatatgtttccaacgacaattgcggcattgggagcacagattgaaggggatcgcctgggactcggaacaaatttgttttcagcagagccgactcttgcagaaaaagtgggaatggataccctgaataaggaaattagaaaacgttctattttttatgaacagatagcaggaaaagaaaatattgatgattcagtcatggatatggactaggagaatagagaatgaaagagttttttgaattttgtagaaaaagaatagatttacttatctttaacatatccattgtagcagtggtctatggatgtagaatttttaatttgtctgttactatggataccgatctttttattaatacgcctagaagcgtttataattggttagatattggcagatatggattgatttttacagaaaaaatttttggaatacgttggtataatccctatataaactcaacacttggtttttttgcgattgttgcatttttaatgatgtttgcgtattcatttgaatatatctcaggcagagaaaatagatataattatttcgtgttttcagcactttttatgacacatccaatatgggtgatgcaatgggtgtttaaattacagaattttgatatagcaatatcaattttattagtagcgattgcagtatatcttacatttagttggattaagtgcagagcagtctggaggctattattagctataggatgtcttgtttggagttttggaagttatcaggctaacacgacactttttatagcagcggtagcatttggaattttgatatgtaaagaaaccgatttgaaaaaattgtttttggtgtgtgtaaaggcagtagtgccatttggatgtgcttatatattaaattccataattgtaaaaatgttcttttcttcaggagactatattgaaggacaagtattatggggaaacgtttctgcagagcaatgtataattaatataattcagcatattaaacaagtgttttttgtttataaggattatatatacggatatggcgcagtcgtgttaagtatatgtgctgtagttatgctggtgatttggtgcaaaagtgctataaaaattcctgtttggaaatgggtggctattttggtgttaataatcagcccatttatgcttactgtgtatgcgggagtagcacttgcttatcgaagtcaatatactcttccttttgtaattgcggtgggatttgtgtatttaacaagaaggagagatgatgaagcggttgagaaaaagaaatctataaataaaattgtaagaaagacaatacaagcaggagtgttgatagctgcaattgcagtaggattgagtcagacatatacaacattgagattttggtatgcggatgatgtgagatatgaacaagatgtagacacattgaatgaaattgttacacgctgtcatataaaagattatgatctgcaaaaaagtaaaattgcatttatcggagagcgcaaggcaccgttgaataatgcttgttatcccgaaattgattttataggcatgtcatattttaatatgtttgcatggatggagccagaatattattattctacaggaaagatttgtacgtttgcattaacaagaggaatagagttgaatggtgcaactcaagaggaaattgcgagggctacaaattttgcaaaaaacatgccggcatggccagctaatgatgcgattcaaaaagatggcgatttaattatagtgaagatgggagaaatcaaatagaaagtcaatctataatatgttatagttaaaatagatagctttgatgaggaagaaatatggaaaagataagtgtagttgtttcatgttataatgaagaagaaagtattcctttattttacaatgaaataaaaaaagtaatgagcattatgaaagaattccagtttgaagttctttttgtagatgatgggtcaaaggacagaactcttgaagttgcaaaagaactggcaaaaaaagacgaatgtataaagtatgtgtcattttccagaaattttgggaaagaagcagcgatgtatgcgggattaagttatgcttctggagagtatgtcacaatcatggatgcggatttacaagatccgccaagtctgttgcctgaaatgatgcgttatatcaaagatgagggctatgattcggtggcaacaagacgagtgacaagaaaaggagagccaaagatccggtcattttttgcaaggagattttatcatttgatcaagaaaatttcagatacggaaattgtagatggagccagagattatcgattgatgacgcgtcagtttgtaaatagtcttctggagctggaagaatacaatagattttcaaaaggtctgtatggttgggttggatataaaacaaaatggatggaatatgaaaacgtcgagagagttgcaggtgagacaaagtggtctttttggaaattgtttgtgtatgcaatcgaagggattgttgctttttctacagtaccgttgctgatttcagcaatcatgggaattgtattctgtgtacttgcgtttatattgattatcgtaattgttgcaaaaacactgatttttggagatccgacatctggatggccatctatggtatgtattatgctattcataggtggaattcaactgttttgtatcggtattttgggggagtattttgcaaaagcatatatggaattgaaaaaaagaccaatttttatttgcaaagagacaaatattcagccataggcttttatatatagatattacgcaaaagagaaaggggttaaaacaaaagaatgaaaaaagtacagaaagtacttgcgctgttactggtgtttgtgatggtgtttactacagctggaatgaatgtggcggcagctggggagatggattctgttgcaggagaagcagatatacaatcacaggagcaacagcagattttagatgaaacagacacacagcaggaggcaacacagcagacttcggaaggaattctggagtatgtgtatgtggatgaatcagtggtcaatatgccacagacacagaatatagcagttggattttcggatgagaacctggtgctggaatctgcagttctgcattatagttctgttgttacaggtgaacagtttgaaatgccggcgtcagcaattgtgaacaatacagttttgttcacacaggattatccggaaggatcagcagaagatgtgtatcagctggatagcctgacatatcagagttcgggagtaagttctacggtaaatctgctggatgaagaaattgatgcgggttatacagttacagtacaaccggaagaggagaattcttcagaggaagcagtgccggatgtggcagtatattcacttagtgaagacggaaatgtgatcgaggcttctgccgatacagagaacattgaggagactgtggcaggagtactggaagaggcagatcctgtatcaccgcttgcaagagaagcaagagccaataaaacggtggtgatctgcgccggacatgatgcgacacatacaggagccagcggcaatggactaaaagaagaagagcttacttttaaagttgcacagtattgcaaacaggcattggagcagtatcagggagttacagtgtatatggacagagattctatttcctgtaaatatccgggacagagtacaagctattgcctgaatcagagaatcaaagatgcagcagcactcggagcgaccgtatttgtagatattcatttcaatacaggagggggaacgggagccgaggtttactatccaaacaaaagctacaatgaaggaatccatcaggaaggtcagaatctggcaaacaagattctgagtgagttgtcagcacttggattaacaaatcgtggtgcaaaaattaaagacggtaccacgggtgagacagattcgaatggaaataaagatgactattttacgacaaactatctttctaaacaatatggaatgacaggggtgatcgtagaacatgcattcttagacagtgcatctgatgccgcgaaattgaaagatgagaatttcctgaaaaagctgggagaagcggatgcagcaggaattgcagcaacttacgggttcagcaaaggcgataacggaaacgagcaggcaactgtgcagattaaaaataaaaatgattttaatggaactgcacagattgaggtgagtggttctggaaatggttacaaagtggcagtgtggagtgaagaaaacggtcaggacgaccttgtctggtattctttgccgggaactgcaagagttatcaattttgatattcagaatcataagaagtccaccggaaaatataatgttcatgtatataattggaatacgacatcgaatttatgccaggccgaattcagagtctcgggtaatactacttctacgttaaaggtttcttctgttgacaacagaagtgatctgtatcgggttcagctgaagtttgcagatatgccggatgacgtggatgtcgtacagtttccggtatggaacaaggcagatcaaagtgatattcgctggattacagctcagcagaaatcgaacggagtctgggaagcggatgtgagtattccggatcaacaggttggagctgtttatcaggtacatgcctatgcaaatctgacaagtggaacgctggtattccttgggaaaacaacgtttaaggtgattggaccaagtgcagatgtggagattcaaaattataatgcaaatcagggaacttttgatgttattgtgaaaaatgttgaagttccggcaggagtggaatctgtcagagttccggtgtggagtgagccggatcaggacgatctgatttggtattttgcagacaggcagagtgacggtacttacaaagttcatgtagatattgcaaatcatcacaacaatagaagtacctataatgttcatgtatatgtgatggataacaatggagtacagacattcgttgcgatgacatcccagcaggtgagtgaaatgaaggacgaactgacagcagaggataagagcggaaaagaaacgacatatcagctgaccttaaaaaatcacaaagcagcaaaagcaacaagcgttaattttgcagtgtggagtgaacgaaacgatcaggatgatctggtatggtatgaaggaaaaaaaacatcttcaaatacatggagtgcagaggcttcgatcaagaatcataaaacagccggaaaatatctggttcatgtatatggaattgtaaatggaaagcagatctttttggatcagacaacgtttgaagtttcagaagcgcaggcaaccctggaagtgggtacatatgatgcagaaaagaaaagttttgaagtaactgtcaaaggcatttcctgtaaatcaggtatcaaggaagtcctggttccggtatggagcaaatcaaaccagagcgatcttgtatggcatgagacgaaaaagcagagtgatggttcttataaagtgacgattaaagtgccttctgatatcaaaaatgcgaagtataatgttcatgcctatgtgaccgggaaaaacggagttcagtcttgtgtaggagtaacaacaaaggaagtaacgaatgagcaaattgttgtatcggcaaaagataccagcaagaaagaaagtacttatcaggtaaaactggaaaaccagggaaaatatgacaggatcgatgatgtaaactttgcagtgtggagcgttgcaaatgatcaggatgatctgatatggtattctggcaacaaagaaagtgcaaatgtatggacggcagatgtcagcatatccagccataaaacggcagggacgtataatgttcatgtatatggagttgttaatggacagcagataaatttaggacaaactacgtttgaagtgtcaagcccaaaagggaaaacagaagtgaaaaactataatgctgttaaaggatcatttgacgtgatcgtcaaaaatatttcttcaaaatcaggggttcagtcagtacaggttccggtatggagtcaggcagatcaaagggatctgatctggtattcagcaaagaaacagagtgatggcacttacaaagtaacagtggagttaagtaaacatcaaaatcataaaggaacctataatatccatacctatattacgacagagactggaatcatgacatttacggacggaattacatataatgtggtcagcgattcatccgaccaggatgcagaggaattaactacaatcatgggtgagacggctacaactgttgaacagatgatgcgttattatgaaagcagcggtaatcaatacccgtcagaggcacttggaaaaggcggagcgccgacacttcgagatttctgtcagatgtattacgaagaagctgtggcggaaggtgtgaaagctgaggtggcttttgcacaggcaatgaaagaaagcgcatggcttaaatttggaggcattgtgaaaatcgagcagtttaattttgcgggacttggagcattggatggaaatgcgcagggacaggcagcgagtttttctgatgtccggacaggaatcagagctcagattcagcatttgaaagcatatggttctgcggaaaacctgaagtcggcatgcgtagaccccagatttaaatatgtaacccgcaactcagcaaaatatgtagagtggctggggattaaggaaaatccggcaggtgtaggctgggcaagtgataaaaattacggatatacgattgttgatatggtgaaagtgttgacaagcaaataaacaacgattcggaaactatgatttgagttgtttgagaaaaagaaccttttatgtgttaaagaagcataagaggttcttttttaatgaatttcagaatattctttcttttatgcctgatttacgataaaatacatagtatagattttaatcaatagttattttataaaaagctgggttaaaaataaacggatacgaggtaagagggtatggatagggaattggtaagtgttttaatggtgaattataatagggggacaacaattggagagagcatcaaaagtgtgctggcacagacatatacggatttagagttgattattgtagatgatggttcaacagatgattcctgttccgtgattgaaagtattaaagatccgagaatcaagttgtatcgtctggagcagaatgagcatatcagtcatgcgacaaattatggatttcaaaaggtgacaggagcatatcttgcaaggatagacagtgatgatatctggtatccccaaaagctggaaaaacaaattacgtttttaaagaataaccccgaatataagatttgttttgcatggattgatttgattgacgagtatgggaatagcatcaatgagcagcaaaaggaattgctgggtgtgtttgaaactacatttcaggggcagagcgattgtttgcaccggttctttttcgggggaaactgtctgtcacatccttcagtggtgatgagaacggagttgatgcgggagacaggagattttaaccttgcatatatgcagtctcatgattttgattattgggtgcgaattgcaaagaaatacccaatttatgttatgcaggaaagactgttggcgatgcgtcgctttattcatgaaaacagtgaagtggaaaataacagtaaaacatatggtccgaatgtgatccgttacgaaaatgaagctgcaaatataaagcgtcatttttttgaggatatggaagatgaactgtttatcagaacattcaggcaggattttaaaaatccggagtcaaatacaaaagaagaattggaatgtgagaaaatatttttgctctgtaaaacatgtccggaattgcagaatatcctgcccacagggttagataattttttggagctgtatccgaagtatgcagaaatattaaaacagaaatttgattttacagttcatgatttctatgatttcacgggaaatcgagtttatcacaatgaaagagaagagaatgcaaaacgtagagaacaagaatgtttgaaagaggaacttcaaaaagtacacaaggaatgtgaaagacttaagatgcagattgaagcttacgagaattcgaaaagctggaaagctacagctccgtttagaaaaataaaagctgtatggaaaaaatgagcgatacaattaaaaatgttgcatagatgttaaagaaatgttataattttaaagaatatattggaggttaaaattatgagaacatatttagtaaccggtggagccggatttattggatcaaactacattcattacatgtttaaaaagtatgacaacgaaatccgcatcatcaatgtagataagctgacatatgcaggaaatcttgagaacctgaaagatatagaagacagagagaattacacatttgtaaaggcggacatctgtgatgcagatgcgatcaacaagatttttgaagaaaacgagattgacagagttgtacattttgcagcggaaagtcatgtggatcgaagcattaagaatccggatgtatttgtaaagacaaatgtactcgggacacttgtgatgctcaatgcggcaaaagcagcatgggagcttcctgacggaacatttaaggagggaaagaaattccttcatgtttctacagatgaagtgtatggatcactggaagaagagggagaatatttttatgagacaactccatacgatccgcacagtccatattctgcaagtaaagcatcatctgatatgctggtaaaatcttatatggatacgtataaattcccggcaaatatcacaaactgcagcaataactatggaccgtatcagttccctgagaagttgattccgctgatcattaacaatgctctgcagggcaagagtcttccggtatacggagacggaaagaatgtcagagactggctgtatgtagaagaccatgcaaaaggaattgacatggttcaggaaaaaggaagactttttgagacgtataatattggcggtcacaatgaaaaacagaatattcagattatccatatcattctggatacgttacaggagatgttgccggaaggagatccgagaaaagaacttgtcagcgaaaagctgatcacttatgtagaagacagaaagggtcatgacagacgctatgctattgcaccagacaagatcaaagaagaagtgggctggtatccggagacgatgtttgaagacggtattcgtctgacgatcaaatggttctttgaaaatgaagaatggatgaaaaatgttacaagcggtgactatcagaagtattacgaggatatgtatcaagataaataagcagagctcggcagtatcgaaagatactgctggtttgcgttaaaatatataatattaggaggagatacgatgaaaggtattattttagctggaggttcaggaacaaggttatacccattaacacaagtgacaagcaaacagctgttgccgatatatgataagccgatgatttattatccgctcagtattttaatggaagcaggaatccgggagatcctgattatttctacacctgtagatacgccaagatttgaggaattgcttggagatggaaaacagtttggaattcaactcagttataaggtacagccgtcaccggatggactggctcaggcattcttgctgggagaagaatttattgacggagaaagctgtgcaatgatcctgggagataatattttccacggacatggtctgagtaagagattgaaagcggcagcggcaaaagaagagggagctacggtatttggatattatgtggatgatccggagcgttttggtgttgttgaatttgatcaggatggaaaagccgtttctctggaagaaaaaccagaacatccaaagtctaattatgcagttaccggtttgtatttctatgataaccacgtagtagaatatgcgaagcagatcaaaccaagtgcaagaggggaactggagattacagatttgaacagaatttatctggaaaaaggaaatctggatgtggcgttattaggtcagggatttacatggcttgatacaggaacacatgaatcgttggtcgacgcaacaaattttgtaaagacagtggagacacatcagaacagaaagattgcgtgcttagaggaaattgcatacaacaacggatggattgataaagaagaattgcagaaagcatgtgaactctatcagaaaaatcagtatggtcgttatctgaaagatgtattggatggaaagtatatcgatcagaattagaagcaggaggaaaagactattatgggtaaaattaaagtagaaacatgtgagatagaaggtctgaaggtgattactccaacagtttttggtgatgagagaggttattttatggagacctataattataatgattataaagaagcaggaattgatatggaatttgtgcaggataatcagtcatcttccaaaaaaggagtacttagagggcttcattttcagatcaattatccacaggataaattagtgcgtgtagtgagcggagaagtttttgatgttgcagtggatctgagaaaagattctaaaacatacggacaatggtatggcgtactgttatcagcagagaataaaaaacagttttttattccaaaggattttgcgcatggatttgtagtattgtctgattcagcagaatttgcatataaatgtacagatttttatcatccgaatgatgaaggcggtctcgcatggaatgatccggatattggaattgaatggccgattccggaagatatggaactgacaatttctgaaaaggatcagaaatggggcggaattaaagaattaaagaagtaagaggagcacaacatgatacagtatgttagaaatttccagaagtttcgtccgctgttaggcgaactcgttatgagagatgtgaagattaaatatagaaaatctgtactgggcgtactctggacattgctgaatccgctgcttatgatggctgtgctgtctatcgtattttctcatttgcttcggtttaatgtggaaaactatcctgtatatattttaagtggtcaggtaatgtacaattttttctcggaagctacatcaagtgcaatgacttcgattttaaacaatgcgccattgattaagaaggtgtatattcctaaatatctgtttacttttgcacggatcgcatccagtgtgattaatattatggcatctttcgcagcactgattttagtaatggtatttatgcgtatggagttacattacacgctgtttctggggatcattcctcttttttgtgtgattgtgcttgcaaccggagttggacttatactggcgactgcgactgtaaaattcagagatatcatgcatttatacggagtcttccttacagcgctgacttatttatgtccggttatttatccaatgacatttttgtcagaaggatccctgatctatacgattgtaagtttgaatccgctgacaatcattatgaatatgttccgtgatcttgtgatttacggagttatgccgtcaatcggaagctttgtggccgcgataggaatatccggaatcgtgttggctatcgggttgtatgtattctataaaaaacaggatacctttatcttgaatctgtaaaaacataaaataaggagaagactatggaacagagaattgtggatgtggaaaatgtgtccataaagtttaacctttcatcggaaaaaatagacagcatgaaagattatttggtgaaacggctaaaaggtcagatatccttcgatgaattctgggcactgcaggacatcagtttttccatgaacagaggggattctgtagcattgattggattaaacggatgtggaaaaagtacgcttttaaagacaatcgcaggagtattaaaaccgacaaagggaagcgtaaaagtatatggaagtattgcaccgcttattgaattgggtgcagggtttgaccatgatctgacagctgaagaaaatatatatttaaacggggcaattcttggatacggaagacaggagatgcaaaagcattatgaggatattgtggagttttcggaattgcgggattttatgaatgtgccgattaagaatttttcttccggtatgttggcaagacttgcattttccattgcgacaattggaaacccggatcttttgattgtagatgaggtgctttctgtaggagatttccgttttcaggaaaagtgtgaaagacggatacagaatatgatgaaagaggatacctctattttgtttgtgtcacacagtattgaacaggtgcagaagctttgcaaaagggctatctggatagaaaaaggccatattgtaaaagcaggaacaacagaagaggtatgtccggaatacagagaggcatatcaagtataacagagaggcaaagttgatgaaaaaatggaaatatgtaatagtggcaatcgtaggtattttgtttgccgttatttattcgttcagaacctggccggcagaaatttatgataataacattgacagtacactttatacaaatgtgggagagctgacagaaggaagtaaagtcagccagcagtttacgtgtacacagaatggattaaacagcctggagttgacaatgagtaatctgggacaagaatgtgaagcggagtatgcgtggacattgacagagacggaaagtgaaaaagttgtggcaaaaggcgagtttacagctggtgaagtagataatagcaaaaatatggttttaaaactttctgaattggaagaaagtaaaggaaaacagtatgttctcacaattgagacagaaagtataaaatcagagcacggggttactgttatgacaacggaccgcagtctgaacgaagacggaaagctgtcgataaacgggaaagagtcatcgcaggtgcttgtgatgaaggaacaaatgaaatatttcaatacggagacatttattgtattgttaggattgattgcttatcttgtgtttttgatcacatttttaaacagactttttaagtaatcatcagtttggaggaacagcatgaatttcaaatcctatattgacgcaataaaatataagaaaatgggtaatgaatcctgctttatcattggcggttggtgtttttcggtttcgggagaaaaagttgagtatcaggttttggtaaatgggaaagcagtgaaatttgatatacaaaagattgcgagaagagatgtcacacaaaaaatggcgaaatatcagccggaattgtcgtgtggattctctatgaccattccagtaaatccagaagcagaagctccaaaagcattggagctttatgctgtaagcggaaatgagaaaaagaagattgtgtcattgaatgaagcaaagatagagaagattacagatacaagaagcatttcttatcatttagagtatgtaagaccagaagaaaaaggagatgctgtgaaatacagcatcggaggatgggcgatttctgaaaaaaaggcgcgggacatggaatatcaaatattagatgcgtcaggtcagaatgttgataagacagtccgtatggttaacagagatgatttgtacaaacttggaatggtagataaagaaaagaaatattgcggatttattgtggaatttcttggagatcaggataaaacttacacatttgtgatcagcgatggatataattctgtaagaaaaaagattgtctacaaagaagttgtaaaagcaaacagaagattatctcaggttggtactgtaaagatgatactgcataatcttaatggagagaacattgtaaaaggatgtgcatatctgaagaagaatggagctaaaaagttgatcagtcgtctgaaaaaaggcgttcacgtcaatggaatcccttatagtgagtggtatgaagctcataaagtgacagaagaggaactgaaaaaacagagaaaaaaagtgtttgaatatcagccgaaattcagcattatcgtgccgacttataacactccgattccgtttttgcgtgagatgatcgattctgtagttgcacagacatatccgaattgggaattatgtattggagacggcagtgaaggcaatccggaattagagcaggtacttgcagaatatgctgcaaaagatacaagaattaaatatcagatactggaaaagaattttggaatcgcagggaatacaaatggtgctttagaactggcaacaggagaatatgttggattatttgatcatgatgatatacttggtccaaacgctctttttgaagtaacaaaagcgcttcagaagaaaaagtatgatattctttacacggatgaagataaggtgtcaggtgatctgtccgaacatatggatccgaattttaagccggactggagcccggatctgttttattcgcacaactatattacacacttttttgttgtgaagaaagaaattatagataaaataggcggatttagaagcgaatatgatggttcccaggattatgatctgatgttccgctgtattgaaaacgcggaaagtatcaaacatattccgatgattttataccactggagaatgcatggcggatcagttgctgaaaatccggcaagtaagatgtatgcatatgaagcagggaaaaaggcgatagaaggtcatttcgagagaaccggtgtaaaggtaaaagttgaacatatgccgttatggggaatgtaccatgtgatttatgaaacaacgggaaatccactggtttctgttattatcccaaataaagatcatacgcaggatctggacacgtgtattcgctcattgtttgaaaagagcagttatcgtaatattgaaattattatcgtagagaataacagtgaagaggcaaaaacattttcatattatgaagaaatacagaagaagtatgagaatgtaaaagttgtaaaatgggaaaatgaatttaattatgcagcaatcaataattttggcgttacatttgccaagggtgattactatctgttcctgaacaatgatactgaagtaatcaatgagactgcagtcagtgaacttcttggctgctgtatgagagaagatgtgggaatcgtaggagcaaagctcttatatgaagatgatagcgtgcagcatgcaggaatcgtgcttggattcggaggctttgcagggcatgtgtttaccggacttgataaagatgattacggctacatggtaagaccgagaatcaactgtaattatagtgcggtaacagcggcatgtatgatggtagacagaaaagcatttgaagaagtaggcggattcagagaagaattcaaggtaggattaaatgatgttgatttctgtttgaaggttcggaaaaccggaaaactggtagtttacaatgcgcactctttatggcatcattatgagtcaaaatccagaggatatgaggatacacctgaaaaaatccgaagatttgaaggtgagattgctctgttccagaaatattggggagatcttttgaggaaaggagatccatattacaataaaaacttcccgattgaatatggtccgttccgtttgggatgattttgagaaatatgcaaatagttgcaagctgagactgcgaaggaggacaatttatgaaagcattagtaacaggagtaaaaggtcagcttggccatgatgttatgaatgaactcgcaaagcggggatatgaaggtgttggtgtagatgttgaagagatggacatcacagatgcagcagcagtagattctgtcattcgtgaggcaaaagtagacagcgttgttcactgcgcagcatggacggcagtggatgctgcggaagacaatgaagaaatgtgcagaaaagttaatgctgaaggtactgagaatattgcaaaagtatgtaaggcacttgatatcccgatgatctatatcagtacagattatgtgtttgagggagaaggaacacgtccgtgggagccggatgataaagtaacacagccactgaatatttacggacagaccaaatatgagggagaacaggctgtggaacgtctcttggacaaatattatattgttcgtatcgcgtgggtcttcggtgtgaatggaaagaattttatcaagaccatgctgaatctgggagagacacatgatactctgacagttgtggatgatcaggtaggaactccgacgtatacttatgatcttgccagactgcttgtggatatgctggaaaaagatgcttatggaaaatatcatgtgacaaatgaagggggatatatcacctggtatgaatttgcaaaagagatttttgcgcaggcaggaatggatgtcaatgtagttccggtgacaagcgacaaatttccggcaaaggcaaaacgccctcacaacagcagaatggacaaatctaaactgaagaaaaacggcttcacgccgcttccaacctggcaggatgccttgaaaagatatctgtcagaaatccgttaaggggggaatgggagtatgaagaaaaaatatgtattgggaattttgacagtggttgtgctgatgtttggaattacagcctgtggaaaaacaacagaatcaactccggaacaaaatgcaacacaggaagagcagaaagaggatcaggacaatgacacatctgatcaggatgtcaatcaggacggacagaatgaacaagaccagacacagcaggagcagacagaaaacacacaggatgcaaataatctgggagcaggaacaattactgtgtatgcccagaacaaggatgtatccggctttgataaaaaagaggtttcacttgaggcaatcacaccggaaactgtcctttctcagttggcagcagccggagttcttccatcggataccacagttctaagttttacaaagaaagaaaaggatggagaacaggtcattgatctggatctctccgaaaagtttgggacttacattaaagagatgggatcttctgcagaatatctggtgatcggaagcatctgcaacacgtatttggacgtttaccattgtgcaaaaattcacattacagtaaacggagaaatgcttgccacaggacacgcggagtatccgggctatatgacaagattttcttaaaaaagaataaaaagcaccctgtaaggggatccggcagtatgtgcaggcttcccttacagggtgttttctatttatgcaataattttcttttcagccagtcggccgcataaccgaatgtgtggcgtatcagggcaaattcgatccggatatagctgcctagatgctccatccgaaacggaaccttgcggcatttggacagaccatggattccttctttgattccgtttttgtaatctgttccaaatccgattttgcagaaaaataaatatttcaccagatatcccaaaagtaatggaatgaaattcaggatcagctgcaaaagcggcatatttttgtaattcagccagacactgttgcgggcagatagtttcactttaaaagtgttatatttggaaccgctcgttccacttccgacgtggtacacaagagcggaagcgcagaaccggtttttatagccgtagatcatggcacggtaaccaacatcgatatcttccagataggcaaaatggctttcgtcaaagaagccgatttcatcaaacacgcttcgcctgtagatcgcagctccggcacaggccgtaaataccgtgtcatcttcggtgtaattcgaaaccggtcgtccggctccccggcataccccccagcccatcaaggtatagagatctcctgcgctgtcgatcagatcggggtggtacatctggatcatcttgctgctcacagaaaaaatccggtcagagacctcgatcgcccggatcatctcttcgacataacgagaatccacggttgtatcattgtttaaaagaatgacgtacggggtatctgcgtgacgtatcccttcattgaccgcacggctgaatccatagttagaatccagggccaacacttcgatatcagggtaagtctgttccatatattccagacttccgtccgtggaggcattgtccacgatcaggatcttgaaatcccggcaagtctgttcatttaaagaagccagacagggctccataaaatgttttccgttataattgggaataatgatagtaactttcatgtgctcctcatttctattactgctgtaatttatttcgcgaatgtattatatcaaattcggttctgtttttctatacaaacatatgtttattaaaaattacgaaaatattacggaaaaatgaataaaatactgttaaaatcaagtttgtgcttgtccattgaaataaagtattgtattatatcatagataatgtgtttttataagtaagataacggaaggtcgtattatgataaaagaaaatcagaaattattaaaccgcattcaggttgtgctggatgcaggagtgatcattgtagcatatgtgctgtcctggtatatccgttttcggagcggattatttgacctggatccatggtatctgtcactgagagagtatatgaaggtactgttctttctggtgccgtcctatttgatcctgtattacgcatttcagctctacacgccgaagcgggtacagggaagaaggctggaagcctggcatgtagtacaggcgaatgtgatcggcctgatgggtgtgaccatggtatttttccttgcaaagctttcagacagatattccagatgggtagtatttattttctgctttgtcaatattaccatggaagtattcgccagaaatatggtgaggatggttttgcgcaaggcgagaaagaacggatataatcagaaacatatgattctggttggctacagccgcgcggcagagcagtatattgaccggattcttgcaaacccggagtggggatatgccgtgcggggaattctggatgaccaccagccgagaggaatggagtataaagggatcaaggtgatcgggagtatcgacaatctgctggtcattcttccgcagaatcagatcgatgagattgcgatcacactgggactggatgagtatcacaagctggaatatattgtaaatatgtgtgaaaaatcaggtgtgcatacaaagtttattccggattataacaatatcattccgacaaaaccatatacagaagatatccagggacttccagtgatcaacatccgtcatgtaccgcttaataatgctttgaataagtttgtgaagcgcgcagtagacatttttggtgcgatcgttgcgatcattcttttttcacctgtgatgctggttgtatctgtgctgatcaagttgactgcaccgggaccgctgatttttaaacaggagcggatcgggctgcagaacaagccgttctacatgtataagttccgttccatgatcgtacagaaagagagcgaagagaagaagggctggacgacaaaagatgatccgagagtgactccggtaggaaaatttatccggaagaccagcattgatgagcttccacagctattcaatgtgctcaaaggagatatgagcctggttggtccgaggccggagagaccactgtttgtagaaaagtttaaggaggaaatcccaagatatatgatcaagcatcaggtgcgtccgggactgaccggatgggcacaggtgaatggctatcgtggagatacttcgatccggaagcggattgagtgtgacctgtattatattgaaaactggacgttgggactggattttaagattatcctgctgacgtttctgaaaggctttatcaacaaaaacgcatactaaaacggaggcggatctatgtttcgcagaagagatcgaatatcactgcagcagagaaaacgattgaataaaaaaagacaaaggcggggaatcctgtttttggtcctggaatttctgatacttgcggttcttgttttggcggcatttatgatgtacaagctggatcatctcaaccataatacactggatgagagcagcctggaactacatgagacaccgaagggatacacgaatgtggcattgttcgggttggattccagagacggagagctaagtggcggcgtgagaagtgacagtattatgattgtcagcatcaacaataagaccggagatgtaaagatcatttccgtatatcgggatacgctgctaaagcagcaggatggttcttatgagaaagcaaatgcggcgtattcctttggaggtccgcaggaggcagtggcaatgctcaaccggaacttggatctggatattacaaaatatgcttctgtaaatttcaattcgcttgcagatatcatagatatcctgggtggggtggaagtagagctgaccagtgaggaaatattctggctgaatggatatacggcagaaacctcacaggtggtaggacggcagacacataccctggatgagaattctccgggagttcacaatctggatggaatacaggcagtttcctataccaggatccgttatacagccggagatgactttaagcgtgcagagcgccagagaatcatattgcagaagatgattcagaagctgaagacagcaggaccggtaaaatggaataaaattctggatcaggtactgccggaaatatcaacgaatatgacgacaccggatatcatgaaactgggactgaatatattccgatacaaaattggagagacaaaaggctttccgtttgatattacgaccagtgaaaatgtcattggactggaaggctcttatgcggttgcgatcggacatgcggacaatgtaagacagctccatgagcagctttttggagagactggataccagccttcggacgaagtacagcagatcagtcaggatgtggcttatctgacgggtgtttatccggaaaattatgcacagtagcgaaagaggaaaaaaatgttacgaaaaataatcgcagacagaaaaatcgaatatagttcttatactttagtttatgcggcagcggtattggctgcaaaggcacatctggattatgtgactgcagtacttctgatggcagaggcaatgtttttgtttatatggaattttagaaagacaaaaaatcttgtggatatgcgggggctttttacgctggcatgggtaggcggagaaggcatcgcatgcctgaagctcagcaggctgcagagtgactggagcaatgtgacatggctgaccttttttctgatctatgtgtgtttcaatctgggatatgatctctggcttggccgtttttcgaaagaacagaggcaggaagtaaaaagagatgagatctcggcaaagcggattctgatctgcatcttcggactgatggcagcttccattgcatgttttacgttggaggcagtggtggtaggttatattccattgttcaattcagcgcctcatgcatattcttattttcatatttcgggagtgcactattttacaatcagctgcattttgattccggcactgactgtattgtataccaaggttacagaaaaaatttcggtcaggacatggatacttttaattgcaggaaacctgacggcagtggcgattcctattttatgtgtctccagatttcagctgttgtttgcggttggctttgcggcagtgatgtatctgatgttgtataaaaaaatcacatggaagatgatcgtcacaggtttattgatcatgattccagtgtatgtacttctgacagttgcaagacggcataatgtgacttatttaaatggaatttttgagatgaaaaattccaaaatgccgatttttattacacagccttatatttatgtagccaataattttgagaattttaactgtatggtagagcagttgacagcgcacacatggggactgcagatgctgtttccgttttttgcactgacgggattgaaatttgtatttccacagctggtgacaattccggattttgtcacaaaaacagagcttacgacgttaacgatgttttatgatgcctactatgattttggaatcatcggaaccgctttgtttgcgtttataatcggtctgactgcagcagcagtttcaattccggtgcgtcagaagaaaaatccgatgacgtatatgttttatggacagattgcgatttatctggggcttgccttttttacgacctggttcagtaatccgacgacctggttctggctggcactgactttgatgatgtactggtttgtcggatatcgcaggaaaggaaaaggttcacatggaaggaaatagaacagtggatgtgctgatccctacgtataagccggatcagagatgcgtacagctggtaaaacgtctgttaagccagagtgttcaggtcaatcggatctatctgatcgatacagagagcgggatctttccaaaagagttgtatacgatttctgacagagtcaagatccaccggattctgccggaagagtttgatcacggtggtacgagaaatctgggagctgagatgtcagatgcggagattcttgtctacatgacccaggatgctatgccggcggatcaatttctgatcgagcgtctgctttacggattttcgtatgaaaacgtagcagcagtttatgcaagacagctgccggcagcggattgtcagtttattgagcgctatacaagagaatttaattatccgaaaaccagcagattgaaatccaaagaagatctttccaaactgggaatcaaaacctatttctgctctaatgtctgtgcagcataccaaaaggatgtatacgaaaggcttggaggatttgtacgaaaaacgattttcaatgaagacatgatcctggcaggcagaatggttcaggagggatggaagatttattatgcggcagatgcaaaagtgatccattctcacaattataactgcagacagcagtttcaccggaattttgacctggcggtctcacaggcagatcatccggagatttttgaaggagtaccttctgaaggagaagggatgcgtctggtgaaggatacagcaaaatatctgctgaagtcgggcagaccatggcttctggtatctcttgtatgcaagagcgggtggaagtacatgggatataaactggggaaaaattataagaaactgccccggtggctgattttgaaatgtacgatgaatccacgatactggagagaaacttgaaattcacagttttttcattgatgtttgaatgaaaatattgtatgatgttaaagtgcatattttaggcaatctatgatgtatgccatgagaaaggatagaattatgggagatacaagaaggcgttcgagagcagtaatgtccggagcggacagaagaagttctcagaggtcggggcagccgcgccgccgtccggagcaaagaaaccagatgggagacgacagggacaaaacgcagaggcagcaatccgcccagagaaaacgaccgtccggcagcacttctgcaaatgggaggcggtctgtgaatggaagaccttcacagaagaggcgttcgagaaagagggcaaagagaggatttgcatcttggtctccagggaaaaaagcagtggcgattctgatgggagttctgatcctgctgattacagcaaccgttgcagtggttgcggcaaaatggggaaaaattggcggtgttgcattaaatccggataagcttgcgatttcggaggaagcggagatcagcggtaccggttacctgactgttgctctgtttggcctggatacgcgtgcgacagatgaagagatgggggcccgaagtgatacgatcatggtggcgtctctgaaccgtgagacaaaggaaatcaagttggtttctgtttacagagatacgcttctgcagctttcagatggaacttacaataaagcgaatgcagcctatgcttacggcggtgaagaagaagcagttgctatgctcaataagaatctggatctgaatattgagcactatgtgtcagtggatttttccgttttagttcatgtgatagatgcccttggcggaattgatattaatgtagaagaagcggaaaatggcatggacatcattccgtatctgaacaactatgttgtagaagtgattaaaaatacaggagtggattcagctccgtttacgcagttaggacagcagcatttgaatggagtacaggcaacggcttatgcccgtctcagatacggcggcggtgacgattataagcgaacagagagacagcggcaagtactggagcagattgcgataaaagcgcagaaagcaaaactttccacgatcaacaagatcattgataaagtgtttgacaacgtgaagacgaattttacactgacggagacgattgcttatgcaaaagacgtgaagtcttatatatttggagagacgcagggatttccgtatgaaagtacaacggctgatcttgatgttggaaattctgttgtagcgacagatctggcatccgatgtgacgaagctgcaccagttcttatttggagagaacgattatacaccgtcttctacggtacaaagtatcagtgaggatatttccaactccacgtatgatacgggagaatcttacgatacagaatatgatgagtatggatattctcaggattattccggatatgacagcggctacacagataacagttatggaactggcggatatcaggacagtggctatggagatggcagctctggtaatgggtatacagaagataccggcggtgattatgtacctccgtcagatggcggcggtacagacagtggaagcagcgacagtaattcccagataccggataccggaaccggcgacagtggtgataccggtggagagagcttagaataagggaaaaacagtttttatttatacgaagaaaagtcgagagacaggaaagaggagatgtacatgaagtcgttgaaaaagatagggattcttttgtttgcagtgtgctttctgatgctgtatccttcagtgtctgtacatgcggcagaaggaacgtttcagttttcggatcctacagcaaaagtaggagaggatgttacagtcaaagctaagatcagtactggtggagaagcaatcggggatggttttgtcacagtaacatatgacaaagcagcactggagtttgtcagcggaaccaatgcaaccggtggggacggaacggtgaagctggaggctaccggggatggaactgtttcagagctggagtataccatggtctttaaagcgctgaaagaaggagcaacaaagctggaggtgtcagattatacctcttatctgtattctgatgaaactttaaatctgacaacaggtgattccacagttaccgtggaggcaggggacggaacatcgtcagagagctcagcagggaccactgcggtggccacaggaacgggaagtgtagagatcgacggagtcacatacacaatttacaatgatttttccgacgcgcttgttccggacggatgcagcagaactacgatggagtataacggagaaactgtaaacgcgattttgcaggaaacttccggaaagtattttgtgtatctggttgagggagacaaagacccagtgatggcactttacaatgaaaaagataactcatttgcgattacagagatggtgtcgattacagattccagttatatctttttgttgggaacaaatgatggaaaaggactgccgtctcagtttaagaaaacaaaactgacagtcggcacactgactttcccggtatggcagaattcagagagtgaggacttttatctgatgtatgcgatgaacgaatcaggagaggaatcgttctaccagtatgatacaaaggatgaaacgtaccagagatatccagtcacagatgtaaaagaaaagagtacaagttcttcgacaacactgatagataaagtaaaaaactttcttcaggatcaggtgctgattgttgtagcagcagcctgggcggttattttaattttgatcatcattattattgtagtcggcgtgaaattacgcagaagaaatgaagaacttgatgaattctacgatgagcatgaatccatcgggaattcaaaaggaagtcgtgcagttgttgagaaaaaatctcgtaaacagttcaaaggatatcaggacgaagaggatgattttgtagatgacttcgaagacgaagaggaaacagatgacgaagatcctgatgaatacgaagagtacgaagatgatgacgaatatggggaagatgattacgacacatacgaggacgattcggatgaatatgaggatgattttgaagagtacgacgatgacgagtatgaagatgatgattatgacgacgaatacgatgattatgacgacgaatacgatgagtatgaggactatgatgatgaagaagaggatgatgttccagagtatcagccaaaacgaagatcgtctgctcgtgaagaaaaagacagctatgatgtagattttatagatttataagaaattggggcaaacaacagggagagtctgtggtatgccccgattttatttataaatagtcactttaaggagagtataaggaggagaaagatatgtgtggaattgtaggatatgtaggagaaaagcaggcagcgccgattttgctggatggattatcaaagctggaatacagaggatatgactcagccggaattgcagtctatgacggagcagagattcagacagaaaaatcaaaaggtcgtttaaaggtgctcagtgaactgacacatgacggacagacaatgccgggaacaatcgggatcggtcataccagatgggcaacacatggtgaaccgtcagatgtaaatgcacatccacattataacaaaaataaaaatattgttgttgtgcacaatggaattattgaaaactatttgaaactcaaacagaagctggagaaaaaagggtatgagtttgtgtcggagacagataccgaagtactggcacatcttctggattactattatcagggaaaccctctgcaggcgattacaaaggtaatgcatcgagtagaagggtcctatgcacttgggatcatgttccaggatcatccggatgaactttatgcagtgcgaaaagacagtccgttgatcgtgggagagacagaaaacggatgtgtgatcgcatccgatgttccggcagtgctgaaatatacaagagatgtatattttattgaaaatgaagagattgtacgtatggaaaaagattcgatgcagtttttcaatgtagatgaagaagaaatcgagaaaactcctgagcatattgagtgggatgccaatgcagcagaaaaaggcggatatgagcattttatgctgaaagagatgtatgagcagccaaaagcaattctggatacgttttcaccgcgcatcaaaggaaatgatatcgtgatcgaagagcttgggatgtctgatgaggaaatcaaggcaatccgcaaaatcatgatcgtggcctgtggatctgcatatcatgcgggagttactgcaaaatatgtgatggaaggaatggctcggattccggtggaaacagatctggcttctgagttcagataccgtgatccgatcatgggggacggaacattggttgtgatcatcagccagtcaggagagactgcagattctctggcggcactgcgtgaagcaaagcagagaggggcaaaggtacttggaattgtcaatgttgtcggaagttctatcgcaagagaggcagataatgtcatgtatacatgggcgggaccagagattgcggttgcgacaacaaaagcatactccagtcagttgatcgcattgtatctgctggccatgaaatttgcatttgtgagagggaaaatcacagattcggaaatgcggggatatattgaagatcttcagaaacttccggagcaggtggagctgttattaaataacaagaatcgcatccagaagtttgccaaccgttatctggcagcgagagaagtattctttatcggaagaggaatcgattatgcgatttccatggaaggatctctgaaattaaaagagatttcttatatccattcagaggcatatgctgcgggagaattgaaacacggaaccatttctctgatcgaagagggaacactggtaacagcgattcttacacagaaagagctgtacaaaaagagcatcagcaatatcgtggaagtaaggaccagaggagcatttgttcttgccattacaaatgaaggaaatcatgagattgaaaaagcggcagattacgttgtatacattccgcagaccaatcgatattttgcaaattctctggcgatcattccgcttcagctgttcggatattacatttccgtcggaagaggatgcgatgtggataaaccgagaaacctggcaaaatctgtaacagtagaataaataaagctggtttcaagaattgttaaaggattgaacacagtttcatcacaaaaggacggtatgatagcagtataaaatacaagagaaagaaggaattgatatggagaatcaatacaattattaccattctgaggaaccgcagaatgattcatcttatagcagtcagccgaacccggagcatcatgaaaaaccaaaaaagaagatgccaaaggccgttgtggtgacaggatgcgcgttgctgttcggagtggtttcaagtgccacatttttaacaacaaatgtagtcggaaacaaagtgctgggactggatcagaaggctgcaaaagaagtatctaatacaacacagaataaagcgacactgacgaagacgtccagtgtagttacatcggatgtttccagtgttgtggaatctgtgatgccatcaattgtatccatcacaaatatgagtgttcagcaggtgcagagcttctttggaggaacctcccagcaggaagtgaccagtgcaggaacaggaattatcattgaaaagacagattcagagcttttgatcgttacaaataatcatgtcgttgcagacagcaatcagctgacagtgacatttgacgatcagagcagtgtggaagcagatatcaaaggaacagattccgcacatgatctggctgtgatcgcagttcagctggataagatttcggatgatacactggacaaaatttcagtagcgacacttggagattctacaaaattgaaagtaggagaacctgccattgcaatcggaaacgcactgggatacggacagtccgttacaacaggagtgatcagtgcaacagacagagagagccagacaacagacagtgcaacaggagagacaacaggatcttctgatgtaaaactgattcagacagatgcagcgatcaatcccggaaacagtggaggagctcttgtgaatgcaaatggagaagtcattggaatcaactctgcaaagctgatcggagagaatgtagaaggaatcggctatgcaattccaatctcagatgtcacagacattattacaaacctgatgaatcaggagacaaagacaaaagtatctgaggcagagagaggatatctcggaattacaggactggatgtagaagattctgattctcagcgttatggaatgccgacaggtgtttatatttccgaagtatcacgcggaggcggagcagctgatgcaggaattacaaaaggaagtatcattgtaggattcaacggaatcacaattgacagtatggagtcattgcaggagcagctccagtactataagaaaggcgaaaaggtaacactgacgcttcaggttcccggagatggtggagaatatcaggaacagacagttgatgtgacattgggaagcaaagctcagtaaaaaagataacatgtaaaaagcggaagcaaatagtcaggcttccgctttttttgtggctgtaataaagcaatggaaaagtcgccgcatcttttcgctgcttcgaaacatacattccggatgccactgaactccaatggcaaaaggatgagaagaatgctcgatggcttctatcgtctgatccggggcaagagcgctgactttcaaattaactcccggtctgtcgatcgcctgatggtggaagctgttgacgtaaacagagcggccaagacaggaaaagagtctggaagacctttcaatccggacaggatggctgacatcactgcgggagtcagatcgctgcatatgatcaagagattctcctggttggtatcggatatcctgaaacatggttccttgacaggcggtattgaaaatctgcattccacggcagatggaaaatacaggctttgtagaagacagaatcagcttcatcaggcggatctgaaatagatccagtgtgatattggtgtttccgatgccttctctgggttcttgaccaaataacaaaggcgtgatatcatttccgccgcagaagagaaaaccatcgcacagccgtaaatattgttgaagcatggaatctgagcggatcagcggaagcaggatggggatgccgccggaataccggacagactgaatataaggattggatacaaactggcggttgtccgacaatccgcagacaacaatgccgatcagaggttttgcagattcagatttcatttttgcgtctcctgtcatataatagtggtggttttagcatatgtaaaaaaagaagagcttatacgtaaatcaggaacaaaaaaggagaggaaaatgagaaaatggatcgatatgcactgtgatacattgagtgagctgctgccggcagaaacgctggaagagaacagtctttgtgtggatcgaaagagaatggaacagaccaaaatgctggctgaattttttgcctgttttgtatacgtgccagatggaaagtgggaagaagcataccagaaggtgatggagatggttgcccgtatggagtgtgagacaaaagaaaataagaaattaaagcttataaaaacagcaaaagatttagaatatgcagaacgggaggaactcaatctggctcttctgaccgtggaagagggcggcgttttaaatggaaacagaaaccgccttgaagaactgtatcagagaggcgtccgcctgattacactgacatggaactatgaaaattgcatcggatatccgaacagcagaaatgcacaggagatgcaaaagggattgaaatcctttggaaaacaggtagtagaagaaatgaacgaaagaggaatgctggtggatgtttctcacttgtcagacggcggcttttgggattgtatccggctgagcaaaaaaccgatcatagcgtctcattctaatgcccgcgcactttgtgcgcacccgcgaaatctttcggatgagatgctttgtgcactcggggaatgcggaggtgttgtgggacttaatttttatccgcagtttttacaaagcgatcggtcagcggaggttttggatattgcaaagcatgggatgcatattctgcaaaaagccggcgaagattctgtggcactgggaacagatttcgatggatttgaggcagggaagaactggattcgcgggattgaagagattgagtgtgtatgggatgctttgaaaaaggcaggaatgacggaacgtcagctggataagctttcgtatcagaacgtcaaaagagtgcttggggaagtgctttaaatatttctcaaaacaaagtctggttatcggcaggagaatctggtacaataggaaagattgaaactacaaaggaaaaggatagggaggatttttcaatggaaaatcagaaaattattcaggtggaagaaaaagtgccctttaagatgctgcttccactgagcattcagcacatgtttgccatgttcggggcatccgtgcttgttccgtttgtgttcgggatcaacccggcagttgtactgtttatgaacggaatcggaacactgctatttatcttgatcacaaagggaaaagctccggcatatttaggttccagttttgcatttcttgctccggcaggagttgtgatcagcaaatggggatacgagtatgcgctgggtggattcgttgcagtcggatttttaggctgcattctggcgctggtcatctataagttcgggtctgactggatccatgtggtactgccgccggcagccatgggaccggttgttgcgctgatcggtctggagttggcagggactgcggcatccaatgcaggattaaaagacgaggtgatcgatccgaagaatgtgatcgtatttcttgtgactttaggagttgcagtgcttggatcagtggtatttcgtaagttttttgcggtgattccgattctgattgcgatcattgccggatatgtggccgctgttatctgtggaattgtcgatttctcaagtgtgagtacggcgtcctggctggcaattccgaatttttctgcaccgaaattcaagtgggaggcaatcgtcattgtgctgccggttcttcttgtgatcgcttccgagcatatcggacatcagatcgtgacgagtaagatcatcggcagagacttgctgaaggaacctggacttcaccgttctctttttgcagataacttttccactatgatctccggatttatcggttctgtaccgacaacgacttacggggaaaatatcggagtgatggcaatgacaaaggtatacagtgtatatgtgatcggaggagcagctgttctttctattatttgttcctttattggaaaactgacaatgctgattaattccattcctggaccggttatcggtggaatttcgttcctgctttacggaatgatcggaacttccggtatccgtattctggtagaagagcaggtggattacggccgttccagaaatatggcaatgacatccgtgatctttgtgacaggattgtccggaatttccgtagaatttggcgggatccagctttccggaatggtacttgcctgtgtgacaggaatgctgatgggacttctgttctttgtactggatcaattaaaactgacaaatgacagagaggcagaataaacagctgcttccaaataaaaagatggcgaaagttcgtgtatgagctttcgccatctttttattttatcttatttttctaattcctgcattttcattgcacgcactttcagaggaagtccgaacaggttgataaatccttctgcatcgtggtggtcataaagctctccggttgtgaagcttgcaagggattcactgtataatgagtaaggggaagttgttcccgctttgatgatgtttcctttgtaaagcttgaattttacttctccggtcacatactgctgtgtgacatccacaaatgcctggactgcttcgcgaagcggtgtgaaccattttccttcgtatacgatctgtgccattttatttcccatgtccttttttacttcataggttgcacggtcgagtacaagttcttccagctggtcatgtgcttccatcaggatcgttccgccaggagtttcataaacaccgcgggatttcattccgacaacacggttttctacaatgtcaacgattccgattccgtgttttccgccaagtttgttgagttctgtgataatctcagatactttcatttcttttccgttcagacttttcggaacacccgcttcaaatgtcatagtgacatattctccttcatccggtgctttttcaggagaaacaccaagaacaagaaggtcatcgtagtttggctcacatgcaggatcttccagctccagtccttcgtggctgatatgccacagattacggtcacggctgtagctgtgttttgcatcaaatggaagatcaataccgtgagctttgcagtattcgatctcatcttcacgggactgcatggtccatacatctgtcatacgccatggagcaatgatctttaagtccggtgcaagcgctttgattccgagttcaaaacggatctggtcatttccttttcctgttgcaccgtggcagattgcagtagcgccttctttgcgggcgatctctaccagttttttcgcgatcggcggacgagccatggaagttccaagcagatatttgttctcatagactgctccggccttcacacatggaacaatgtagtcgtcgcagaattcgtcgatgatgttttcaatgtagagtttggaagcgccggataattttgcgcgttcctctaatccgtccagttcttcgccctgaccacagtcgatacagcagcagatgacttcgtaatcaaaattctctttcagccatggtatgatggcagtcgtgtcaagtcctccggaatacgccaatacaactttttctttactcataatgatatcctccttaaaaaatctctattgtctgatatgttgttgccaatcgtgtatgacaaaaccgttacgctttagaagctaatcagtaatatacacctaaattcataaatatgcaatagaaaaatggaaaaaagtgaaaaatatacaataaaattcaaaaagtatgcataaaataaaaaggggaatacagagcggatgcaaatatgttgttggaaagcgatccaatatcagttataataagggtattgtaaactgtggattaggagagaatgtgtatgaatatattagttgtagtagatatgcagaatgattttattgatggttctctgggcacagaagaggcgcaaaggattgttcctgaagtagtgaaaaagatacagacatttgatggaattgtgtttgcgacaagagatacccatgaagagaactatctggagacggcagaaggaaaaaaacttccggtcagacattgtatccgtggaacaaaaggctggcagatcagacaggagatcgcagatcttctgacagaggcgcctgttgataaagaaacgttcggaagcagggagcttgtgaaaaagctggagcagatccaggaagagacttcgatcgagagcatcacgctgatcgggctttgtacagatatttgcgtgatctccaatgccatgctctgtaaggcgtttctgccagaggttcccgtacaggtggatgcgtcctgctgtgcaggagtgacggtggagagtcacatgcaggcgctggaggcaatgaagatgtgtcagatcgacattttatagaagatacaggaatgaaaaaagagggtacaaaaagatggacagaaaagacatactgctgaataagcagaggattgtgatcaaagtgggaacttccacgatcacttatgaagaaacaggaaatatcaatctggagaagctggagaagtttgttcgtatcttgatcaatctcaggaataaaggaaaagaagtgatcgttgtctcatccggtgcagtcggagttgggaaaaatgccctgggaatggacaggcgtcctcagacggagtctgaaaaacaggcatgtgcggcagtcggtcaggggaagctgatgatgatctatgaaaagctgtttaacgaatacggacagctcacggcacaggttctgctcacaaaagaatctgtgacaaatgccaaatgccgcaaaaatgcaaaacagacatttgatgagttgtttaagatgcaggttgtcccgatcgtcaatgagaatgacgccatttcggtggacgagctttcttatgggaacttcggagacaacgatacactggcggcatatgtgtcccggcttgtggatgcggatcttctgatcctgatgtcagatatcgatgggctgtacacagatgacccgcgaaaaaatccgaatgcaagatttatccatacggtcggcaagatcgggcggggtctggaaaacatggcaaaaggagcatccagtgattgcgggacagggggtatggcaactaagatcaaggctgcaaaaattgccactgcagcaggggcagatatgatcattgcaaacggggataatatttattcgatcaatgatgtgatgaatggtaaaaaagtaggaacgttgtttttgtcagagcagcatcagaaagagatggcagaagaggtggcgcctgaacgggcagagttccgcagacaggcaaaacgggaaaagaaggtttagatggtatcaggaaaggagactgtatggaaacgtatatggagacattgggatgcagagcaaaagaagcatcaagggcagcggcaaagctgacgaccgttgaaaagaacagagggcttgaatttgtggcagaagaattatgtctgcgaaaagaagagttgctgtcagaaaacgagaaggacatggaggctgcaagagaacaggggatgtccgaagcacttcaggacagattgagactgacccaagcacggattgaggcaatggcggaaggtttgagacagattgcagggcttttggatccgatcggggaagtcctttccatgaaaaaccggccgaatggactgcgtatcgggaaaaagagagtgccgctcggtgttgttggtattatttacgaatccagaccaaatgtcacagcagatgcgttcgggctgtgttttaagaccggaaacgcagtgatcctgcggggaggcagtgatgcgatcaattccaacaaagcaatcgtacaggtgatcaaggccggacttcgcaaagccagattatcccaggatctgatcctacttgtagaggatacgagcagagcagttgccacggagatgatgcgcctgcatgagtatattgatgttctgattccaagaggcggtgccgggttgatctctactgtggtgcagaacagtacagtgccggtaattgagacaggaaccggaaactgtcatatttatgtggatgagagtgtggatgtaacgatggctgcggaaatcattgaaaatgcgaagacacagcgtcttggtgtgtgtaatgcatgcgaatctcttgtgatccacgaaaatgttttagagcaggcattgccgggtattgtaaagcgcctgaacaatcatcaggtggagattcgcggagatgagaaggcgagagcagtctgcacagaaattctgcctgcatcagaagaagattggggaatggaatatctggatgccattatttccgtgaagacagtggcctctctggatgaggcaatccgccatatcaaccggtataataccggacattccgaggcgatcattacaaaagattatgacagtgcgctgcgttttcaggatgagatcgatgcagcagcagtgtatgtcaatgcgtccaccagatttacagatggatttgaatttgggtttggcgcggaaatcgggatcagtacgcagaagttgcatgcaagaggaccgatgggactggaagcgctgacgacaacaaaatatattattttcggaaacggacagatccgaaaataaaaaaataaaaaaccatgcttgcataatatacaaaaaggatgtatacttatgcaaacgtggtttttatttatacagaaatatgaataaaatacaaaaaaatgcatactaaatgaaaaaaatatgaataaagtgagaaaggagctttcagaatgataaaagcaggaattattggttcgacaggatatgcaggaggagaactggtccgtattctgacaggacataaagaggcagagatcaaatggtacggttccagaagctatatcgatcaaaattatgcagatgtataccgcaatctttttcaaatcgtggatgcgaagtgtatggatgataacatggacgcgctggcagatcaggtggatgtgatttttacggcaaccccgcaggggctgtgtgcatctctgatcaatgaagagattctgtcaaagacaaaagtgatcgatctgagtgcagattttcggatcaaagacgtgtctgtctatgaagagtggtacaaaatagagcataaaagtcctcagtttatcgaagaggcggtgtacggactttgtgagatcaaccgggaaaagatcaaaaatgcaagattggtagccaatccgggatgttacacaacctgctccattctcacagtctaccccctggcaaaagaaggtctgatcgatatgaacacactgattattgatgcaaaatccggaacgtcaggagccgggcggggtgcaaaagtggcaaatctgtactgcgaagtgaatgaaaatatcaaagcatatgcagttggaagtcacagacataccccggagattgaagaacagctcgggtatgcggcgaatgagaccgtgaaattgagcttcacaccgcatctggttccgatgaaccggggaattctggtgacggaatatgcatcgttgaaaaaggaagtcaccaaggcggaaatccgggagatttatgaaacttattatggaaaagagccgtttatccggattctggatgacggagtctgcccggagacaaaatgggtggaaggaagtaactatgcagacattggctttcagatcgatccgcgtaccaaccgcataattctgatgggagccatcgacaacctggtaaaaggagcagcagggcaggcggtacagaatatgaaccttctgtttggatacaaggaacaggaaggtctggaactgattccgatgtttccgtaaagattccataggcagaggtgagaagatgattcggacaatgacaattgaagattatgaacaggtatatgcgctctggaagaagatacatggttttggattgcgaagtatcgatgattccagggacggtgtggaaaaatttttaaaacgaaatccgacaaccagtgtcgtggcgacagaagacggaaaaatcgtaggtgcgatcttgtgcgggcatgacggaagacgaggctgtctgtatcacgtctgtgtggatgaagcgtaccgcagacgtggaatcgggaaagcaatggtcgtacagtccatggaggctttaaaagaagaaggaatcagcaatgtatctctgatcgcatttacgcagaacgatatcggaaatgcattctggaataccatcggatggaatgagcggcaggatttgaactattatgattttgtgttgaatacagaaaatattacagcatttaatgcgcagtaaatgaggaggcatgcacgatgaaaaaaataacaggcggagtcacagcagcaaaaggatttgaagcagcggcagcggccgcagggatcaaatatgaaaacagaacagatatggcacttgtatacagcgtaaaaccgtgcaaagtggcaggaacttttacgaccaatgtagtaaaggcggctccggtgaagtgggaccgccggattgtggaatctaagatcaagtctcaggcagtgatcatcaactccggaatcgcaaatgcctgtacaggagaagaggggatgcactgttgtctggagactgcgaaagctgcagcagaggctcttgaaattccggcagacggtgttctggttggctcgacaggggtgattgggatgcagatgccgattgaaaaattaaaaaagggtattcagattctggcaaaagaaaaacagtcgggggcagtggcagcaaatgcggcggcaaaagcaatcatgaccacagatactatggaaaaagaagtggcagtgaccgtggagattggagggaagaccgttaccattggagggatggccaaaggatcaggtatgattcatccgaatatgtgcaccatgctggcttttcttacaacagatgcggtaatctccagaaaagcgctcaaagcagcactttgcgcagatgtggaagaaacgtataatatgatctctgtagacggagatacgtcaacgaatgacacagtacttcttctggcgaacggaatggcagaaaatccaaaaatcaaagaagggacaaaagaatttgaaatatttgcagaagctctgcatgaggtcaatgagacactagcaaaaaaaatggcaggagacggagaaggcgccacagcattgttcgaagtgacggtaagaggtgcagatacgaaagaacaggcgaaaacactggcaaaatccgtggtctgctccaatctgaccaaagcggcgattgccggtcatgatgcaaactggggacggatcttgtgtgctatgggctattccggtgccgaatttgatccggagaaagtagatctgtatttcaaaagcagcgccggagagttaaagatcatcgaaaacggagtcgcgctggattacagtgaagaaaaggccacagagattttatccatgccggaggtgactgccattgcagatctcggacagggagaggaaacagcaaccgcatggggatgtgatcttacccacggatatatcgatatcaatgcggattaccgcagctagtacaatgtatattcagtaaaaaagacaggcaggaggagtgagaatatgaatgaaaatatgaatcaatatctggagaaggcgaaagtactgatcgaggcactgccgtatatccaacggtttaaccggaagatcgtcgttgtaaaatacggcggcagcgccatgacagacgaggcgttaaagcagaaagtaatcgaggacgttaccttattaaagctggtcggcttcaaaccgatcattgtgcacggaggcggaaaagaaatcagtaaatgggtcggaaagatcggcaaagaaccgcagtttatcaacggacttcgggtgaccgatgaggagaccatggaagtagcggaaatggtacttggaaaagtgaacaaaagcctggtacagcttctggaaggacagggagtacgcgccatcggaatcagcgggaaggacggtggacttctgaatgtggaaaagaaatattccaacggagaagatatcggatttgtcggggagatcaaaaaagtagatgcacagattttgcatgatcttctggagaaggattttcttccggtcgtgtgtccggtaggaatggatgatgaattccatacatataatatcaacgcagatgatgcagcctgtgccattgcaagagccatgaaggcagaaaaactggcatttctgacagatattgagggagtatataaagatccgaaggatcctgctactctcatctccgagcttctggtaaaagaagcaaaacagctgatcgaagagggctatatcggaggaggaatgcttcctaagctgaataattgtattgatgccattgaaaacggcgtttccagagtgcatattttagatgggcggatcccgcactgtctgcttctggaattctttacaaacaaaggaatcggtacggcaattttacatgaagaagaaagcaggtattatgatggtgaatgagaagatcaaagcagcagaagaaaatctaatacacgtatacaatcggtttccaattgcgctggagaggggagaaggtgtttatctgtatgacacgaacgggaaaaaatatctggattttgcagccggatttgcagtgtcgggactgggatacggaaatcagaagctgaatgcggcactaaaattccagatcgatcagctgtatcatacgtccaacctgtattatcataccaattgtggagaggcagcacaaaaactgaaccggatttcggggatggaccgggtattttttacgaacagcggatctgaggcaaatgagggggctttaaaagcggcaagacgatatgcgtataataaaaaatcgggcagatatcagtttatcgccatggaaaattcgttccacgggcgcagcttcggcgccgtttccgtgactggacatactgcgtatagagaaccttttgaaccgatgctcccgggagtttcttttgcagaattcaataatctggacagtgtgaaagcgctggtgacggatcagacctgcgcaattattttagaaccattacagggggaaggcgggatcaatcttgctacacaggaattcatggaaggaatccgtaagatctgtgatgagaacgatattctgatgatctgtgacgaagtgcagtgcggaatgggaagaaccggcgcaatgtttgcatggcagaaattcggggtaaaaccagatattctgactatggcaaagggaattggaaacggtattccggtgggagcctttgccatgacagaaaaagtggcacaggcatcgttaaagccgggagatcacggggcaacttatggcggtaacccactggcatgtatggcagtcaagacggtgatcgacatttttgaggaagaaaagatcgtggagcatgtcaatgaagtgtcagaatatctgacagaacgtctggaagaactggtacaacatgtggatggcgtgctggaacgaaaaggaaccggactgatgcagggtattgtgttaaagcaaccggtcgcgcaggtaaataaccgtgccattgaggaaggacttcttgtgatccaggcacagggcaatgtactgcgtctggtacctccgcttatcattgaaaaagagcatgtggatgaaatgatcccaaaattgacaaaagcattgacagagtgataaatgaaaaaccaggattcgggaaatactaaaagaaattgagaaaaatttcaggaggtagaaaacgatgactggttttttaattgcccttctttccggggcgctgatgagtgttcagggtgtatttaatacacaggtaacaaagacaaccggattgtgggtcagcaatatctgggtgcagttaagtgcttttctggcatgtctggcggtatggtttctggcaggaagagcggatgtgacggcacttgcgaaggtggaaccgaaatatatgctcttaggaggcgtgatcggagcagggattacctggaccgtagttaagagcatggcatccttaggaccggcaaaagcagcacttctgatcgtaatttcccagctgatcgtggcgtatgtgatcgagcttctggggatgtttggtgtggaaaaatcgccgtttgcattccggaagctggcagggcttgttgtggcactgatcgggattgcaatcttccagtgggaatagagcgtcagaattgtaataaatgcgtaacaggattgtaaaaatgttattgtaattttgagcgtttttcgttacaatattactgtccaatataaaaggggattccttgcgtctgagattgtgaggaaatatgagggacagatggaaaaagaaagcttattatacagttgttatgatcttgactgcgttgtgcctgatcagcgggtgcgggcaagagtcgggggaagaacttaaggagatttctctggaggagacacagaaagaaaaagaagagtcctctgcagaagaaaagaaggttgaagacaaagaaccgaagaaagagacaaagatttttgtctatctgtgcggagcagtcggaaagcccggcgtgtatgaagtgggcagtgacgacaggctttatgaagtcattgccatggcgggcggactgacagccgaggctgcacaggatgcagtgaatcaggcaagggttgttgtggacggagagcagatctacattcccaccaaagaggagatgcagacacaggcagcagcacagccgggggcaagtccggcagaaggaacaaagccgcaggacggaaaagtcaatcttaatacggcgacaaaagaagaattgatgacgttgtccggtgtaggcgagtcccgggcggacagtattattgcctatcgggaagaaaacggcaggttccagaatacagaagagctgatgcagatcagaggaatcaaagaaggtctgtataataagattaaagataatattacagtatagcaggaagttgaaggaagaaagtatgagcaagaagaagatcttagtagttgacgatgaaaagttgatcgtgaaagggatacggttcagtctggaacaggacgacatggaggtggactgtgcctatgacggtgaggaagcactgcagtatgcaaagaactgcgagtatgacctcgtgctgctggatgtgatgctcccgaagatggatgggtttcaggtttgtcaggccatccgtgagttttccgacatgccgatcgtcatgctgactgccaaaagtgaggatatggacaagatactcgggctggagtacggagcggatgattatattacgaagccgttcaatattctggaagtcaaggcccggatcaaagcgatcatgagaaggactgcgagaaaagaggagagtgcgcagactgccaagattctggtcaaaggcaatatgcggatcgactgtgagagcagaagagtgtttatcggagagcgtgagatcaatctgacagcaaaagaatatgatgtgctggagcttcttgccatgaatccgaacaaagtctacagccgtgagaatctgctggatcttgtatggggtgtggattatccgggggatgccagaacagtggatgtacatatcagaaggcttcgggagaagatcgagctgaatccgagcgagccgaagtatgtacacacaaaatggggggtaggttattatttccagggataaattacatatcagagtaaagaatcatatatttaaaagcatgcggttctggctgatcgtgctgtttgtggtgtttgggctgatcccatgtctggcttcttatgtctggacagtgaaaacatctgagcagcgtgccatttcggtcagaacagcagaaattcagaatcaatgtactattctaagcaatcagctgaacagttatcagtatctgaccaacccgtcttcagaagtgatcgatgcaaatttaacccaactgaccaatatttataacggacgcgtgatgatcatcaaccagaacctggatgtgatcaaggatacgtatggtctggatgaaggaaagacgatggtatctgaaaatgtgatccgttgtctcaggcagggcaagagcacgagctactatgacaaaaagaaccggtacgtcgaggtaaccgcaccggtcatttcggaagaaaaggcagtgacaggagtgatgctggccagtgtttctatggatacggtcctggatgggatccgtatgctgcgcgcacagggcggcgcagttctgatcgtagtctttctggtcgtattgtcccttgggatacttgtggcaggatggtttgtacgtccgcttggaaggatcactgcgtctattgagaatgtgacagaagggtatgaaagtgaatggctgcatgtagggacattttcggagacagggcagctgtctgatgcgtttaacaagatgctgggaagattaaaacagctcaatgattccagagaggagtttgtatccaatgtctctcatgagttaaagacaccgctgacatccatgaaagtgctggcagattccctgcttgcccaggaaaatgtgccgattgagctgtatcaggaatttatgggagatatcgcaaaggagattgatcgggaaaatgacattatcagtgatcttctgacgctggtcaagatggacaagacagtacagggactgaatatcagacagatcaatatcaatgagcttctggaggcaatcttaaaacgattgaagccgattgccgataagaaaaaaatcgaggtggtactggaaagcttccgacccgtttctgcggagatcgatgagatgaagctgacactcgccatttccaatctggtagagaatgcgatcaaatataaccgggacgaaggatgggtaagagtttccctgaatgcggatcacaagtacttttatgtgaaggtgatggactccggcattggaattccggaagaggatcaggcacatatttttgagcggttttaccgggtggacaagtctcattcgagagaaatcggaggaacaggtctgggacttgccattgcccgtaatgcagtgatcatgcacagaggatcgatcaaagtttacagcagtaagggagagggaaccacgtttaccgtccggattcctctgacctatgcagcataagggggagcagatgaaaaaagtcagaaaaattctcctcatttttctgggaatctgtcttgcgtgcacgacagtttcctgtgccaaacgtacgaaggtaaaaaaaggagattcttatatttattgtttaaacagtgacaggaccgggcttcagaaagtgtcctatgagagcaaagaaaaggatccgctcaaggcggcaaaagcaatgataaaagagttgaaaaagccgtctgaggagattgagtatacgccgccgattccgaaggatgtgaaagtgaagcgttatgaactggagggaggaatcctgtatctggattttaatgcaaaatataaacaaatggataccgtggaagagactctggtgagagcggctctggtaaaatctttagtcaggatcgagggaatcaacagtgtctggatcaaagtggaaggcgcggatctgactgacagctcgggacaggtactcggatatctcaatgaagatgattttgtgcaaagcgagggcgcttcgccgagttcgtatcagacagggacgctcactttatatttttccaatgaagcaggagatgctttggtggagcagacaatggaagtccgctataacagcaatatttccagggagaagctgatcgtggaaaagctgatgaaaggcccggagacgtcggccgcaaaagcaacgatcaatccggataccaacctgctgagtgtgacaacaaaggatggaatctgttatgtgaattttgataagacctttttaaaaggtgcctatgatgtcaaaccgcaggtgacgatttattctttggtcaattcactgacacagggaaccggagtcaggaaagtgcagatatccattaacggcgaaaacgatgtcaaatatatgcagactgtagatttgagtcagccattggaggctgacctgggatggaatgaggagaagaagtagttttgagaaaacgaccgctttgtacggcggcagtggcagttctgattctgctggcagcagtgaacatctggtttgaatccgcgatttcaaatccgtgtacactgcgccggatcatcccggatgcttcacaggtgactgtgacagggcaggtgaagcggtgggaggaaaagcctgattacaggatattttatctgagagactgccaggtgctgcaaaaagagaataataccaattctgacaggcaatctgtcaacaagcaattcaaagaacaagtcaaagcaaaggtgctgcaagagccggagcttctaatttatatcgaacaggatcaaaaagaaactcaaacaatcaaacttggaaatcaaatacagattcagggggaactttcgtattttaaagaggcgagaaatcccgggaattttgatcagaaattttattatgaaaaacagggacttcacgcaagtatatgggtgaaaaactgccggatcacagatcaggaaacgtggaaattccgggaatggctggcaaaattaagaagaaactggaagagacttttagtcagtcagatgggagcacgtcacggaaacagcatgagcgcgatcttactgggagagaaaagtgaactggatgcccagatgaaagcattgtatcagaaaagtgggatcggccatattctggcgatatcaggacttcatatgtcatttatcggaatgggattttacgggcttttacgcagagtgggatgtcctgtgaaaccggcgggagtgctgggaattttgtttttgcttggctacacggttatgatcggaggcggggtatctgcaatccgggcatttgttatgtttggcatccgggtaggagcagatctgtgcggcagagcgtatgacatggctaccagtttgtctgtggcagcggcgctgattgcgctggagagtccgatgtaccttcgggatgccggatatctgctctcttttggagcggtgcttggaatggcggcagtgtatccgttaatgatgagacagggaaaaacaaagtcaaagatcctgcaaagctttcaggcgagtcttgcggtcaatctggttctttttccggtcatgctttctttttattatgaattccccccgtattctcttcttttaaatctcgtgatcattcctctgatgtctgtcgttctgggcgcaggacttctgggctcttttctgtgtctttttttcaaaccggcaggaggtgttgtatttcttttatgcaggggaattctcaatctgtatgaatggagctgcaatttgagtatgaaactgccgttttccagaattgttaccggaaagccggaagttagctggatcgtgctgtattatgcagtattgcttctggtctgtctgtactggatgcttcgaaaagagaaaacaggaaaaacctgttttgcgtggggaatgctggcagcggccggaatctgtctggcagcaagcggtcagatgaaacaccacggggtgtttcaggcgacgatgctggatgtgggacagggcgatggaatttttctgagaacacccaatgggagaacctgttttgtagatggaggcagcagcgatatctctaaagtcggggagtatcgaattgttccgtttctggaatctcagggagtaaaagagctggattatgtttttatttctcatggcgatgcagatcatatgagtggaatcgaggaaatccttcagaatcagacccttggagtacgaatcaaaaatctggtgctgccgccggtaaggcttcatgatgatgcgttgaaaaagctgggaaaaacggcaaaggaaaatggcacgaaggtatttggaatggaggcaggtcagcagatgagcctgggagagatgagtctgacttgtatggcgccttcacaggaatatcagggtgagactggaaatgcagcgtctatggtgttgtggatggaatggaaaaatctggagatgctgttaaccggagatgtggaaggagagggagaagtgcagctcacagagtggatgagagcacatggaaaaacaaagtgtgatattctgaaagccgcgcatcacggctctaagaattcgacactgccggaatttttacagcagctgacaccgaaatatgcatggatttcatcgggaatcggcaaccggtacggacatccggcaaaggagactgtagagagactcagtgaaaaaggatgcgaattgtatgggacgcaggagtacggggcagtcaccttaaagataaaaggggaaaaagctgtgatagaaacattttgcaaaaagtaaaagtttccgatataatagaaattatgaaaagtttgaatgaagatttaaaaacaggacaatttagtcagatttatctcctttatggagaggaaaactatctgaagaaacaatataaggaacgttttgtcaaggccatgcttccgcaaggagatactatgaattacgcctattatgaagggaaaggcgtggagatccgggaagtcattgatctggcagagacgctacctttttttgcagaacgcaggttgatcgtatttgaaaataccggatttttcaaaagctcgggggcggatctggcagattatgttaaggaaatgcctcagaccacatattttatttttgtggaggaagaggtggacaagcgcagcaaactgtataaggcagtgaaggcaaagggacatatcgtggagcttccatttcaggatgaaacgacattgaaacgctggatccttggcaatgtcaaacgggaaggaaagcagatgtcggaggcgtcggccggctactttttaggcaagatcggaaccgatatgcagaatatccagggagaactggaaaagctgttttgctatacgctgcaccgggatgtgatcacatcggaggacattgacgcagtctgcatcaatcagatcggaaatcatatttttgagatggtcaacgcagtggcggagaagaagcaaaggagggcattggatctctattatgaacttctggcgttaaaagagccgccgatgcggatcttgtttttgctagtgagacagtaccggatcttgtttcatgtgaaatcgctgcaggcgaagggatacggaagaaaagaaattgcggcaaaggcaggacttcatccgtttgcagccggaaagtatatggagcagacaaggtattttaagatggaagaactgcgtgccgtactggaggagagcgcggaactggaagaacgagttaagaccggacggctgacagatacgctggcggtggagctgtttttggtaaaatactcgtcctgaacgacagatattcttgtcaaaacaagaaaggcatgatagtatatctttgcacaaaaaacagaaaaacattacaatagaagcaaatagaaaaagacagagttactggaggaatgaaagtgtcatcaattgatcagaataaaatacgaaatttttgtattatcgcacatatcgaccatggaaaatctacgcttgcagaccggatcatcgagaagaccggacttctgacaagccgtgagatgcagtctcaggttctggataatatggacctggaaagagagaggggaatcacaatcaaagcacagactgtgcgtacggtatatcaggcgaatgacggggaggagtatatctttaacctgatcgatacgccgggacatgtagactttaactatgaggtatccagaagccttgcagcctgtgacggagcgattctggttgtggatgcggcccagggagtggaggcgcagacgctggcgaatgtgtatcttgcgctggatcatgatctggatgtatttccggttatcaataagatcgatctgccgagtgctgagccggatcgtgtcaaagaagagattgaggatgtgatcgggatcgaggcagatgatgcgcccctgatctcggcaaagacgggactcaacatcgaggaagtgctggagcagatcgtgaagaagattccggcaccggagggagatccgaaagagccgttaaaagcattgatcttcgattcggtttatgatgcctacaaaggggtaatcgtattctgccggatcaaagagggaagcgtgaaaaaaggaacaacgatccggatgatggcaacaggagcccaggccgatgtagtcgaggtcggttattttggtgcaggacagtttattccttgtgaggaattaagtgccggaatggttgggtatatcacggccagcttaaaaaatgtaaaagatacccgtgtgggtgatacgatcacagatgccgcacgtccttgtgcagaacctctgccgggatataaaaaagtcaacccgatggtgtactgtggactgtatccggcagatggagcaaaatatccggatttgcgggatgcactggaaaaattgcagctgaatgatgcagcgctgcagttcgaggcagagacgtccgtggcccttgggtttggattccgctgtggtttccttggacttctgcacctggagatcgtacaggagcgactggagagagagtacaatctggatctggtgacaactgcgccgagtgttatttataagatccataagacaaacggagaagtgatcgatctgaccaatccgacgaatatgccggatcctgcggagattgaatacatggaagagccgatggtaaaagcagagattatggtgacttccgagtttatcggtgcgatcatggatctgtgtcaggagcgcaggggggtatatcagggaatggagtatatcgaagaaaagcgtgcagtgattcattatcatctgccattgaatgagattatttacgatttctttgatgcgttgaaatcccgttccagaggatatgcgtctttcgattatgagatgctgggatacgagcagtcagagctggtaaaactggatattctgatcaataaagaagaagtggatgcactttcctttattgtacacagtgcaacagcatatgagcgtggaagaaagatgtgtgagaagctcaaagaagagattccaagacagctttttgaaatcccgatccaggcagcagtgggaagcaagatcatcgcaagagaaaccgtcagagcaatgcgaaaagacgtgcttgccaagtgctacggcggtgatatttcccgtaagaaaaagctgttggaaaaacagaaagaaggaaagaagagaatgcgccaggtcggaaacgtagagattccgcagaaagcgtttatgagcgtattgaagctggatgaaaattagagaaatacaaaaaacctcgccaaaaaaatggtgaggtttttgttttgccatacatttgattattctgcagcattcacaagctgtttcatcaattcataacatcccttttcctgaataaaagtaaagtcctttacaacagtttcttcgagtccggcaagtgttgttagatcttttccccagaaggacgtttcgcttaagacggcgtgaacatagtcagcggcagaatcgtctttgtgtgcgtcatagaattccagaactttcggatcgtcagaaatcggatactggtttttgccatttcgatccccggtaaaagttgcgtccacaaatccaatgcctttataaaatgccaggtaaaaagcgagggaggcactcaggcaaggaggaacctgccctgttttttccaggtatccttccagagaaggaagcacacgggctttccattttgcagtcgaattcagagaaatggagagcagtgcatgatcgataaacggattttggaagcgatccgtcacggacgcggcaaagctcatcagttcttcttccggcagagtcagtgtcggaatgatctctttatagattgcctgattcatgtaaccacggatgacatcatccttcatacagtctcttacaatgtcctgtccggcaaggtaagcaccgagtaccatggaagtatgagcaccgtttaagatgcggactttccgctgtttgtatggtttgtggtcatccgtgatcagaatcggaagatttgccgcatcacaaggaaattcctctttgatggactgcggtccttcgattacccagaatccgaagatttcaccggtgtttaacaccttgtcaatatagccgttttcctgatttaaattgtccgcatcagagcgtggataaccggttacaatccggtctaccaaagtagagcagaagaggtttgcctttttgatccatttagtgaaagtttcgcccagattccagtcggcagcgtgttttaagacgcatttttccagttcttttccgttgttgtcgatcagttcgcaggagaggatgataaatccttttttggcatctccctgaaatgcctcaaaacgtttatacagaaactgtgtcagctttgccggaaaactgtttgccggagcatcagtgaactgacaggacggatcatatacgattccggcttctgttgtattgcaggcgatgaaacgcagttcgggattttttgcacattccataactgcctcatagtcgctgtatgcatttaagcagcggctgatacaggagattacccgtttggaagagacttcctgtccgttttcggaaccgcgtaaatacagtgtgtagagaccttcctgttcattgataaaatctcccacatccggagttgtgaattttggaattggctgtaccagtacaaccttggaattaaaatttgcagtttcattcattttatcgataaagaaatcgacaaatgcgcgcataaagtttccttctccgaactgtaaaacgcgttccggagcttcgtttaataaatatccatcataatttaaatcctgtaaggtctggtaatttaactgtttcatagcaaaaattatcctttctgaaaatcatattcatctattgttacagagtcacaccctgtttgaaaatcgccatatcgtggaatcctgcttcctcggctttgaccggacgtccggaagcaatctccagaacatagtcaaaaagagcttctcccatctccgggatagagccgccgtctaccagcgcaccgcaattgaagtcgatccagtttttcttattctcatagagttttgtattactggatatttttacagtcggaaccggagaggcaaaaggagttccgcgtcccgttgtaaacagtacaatttgtgcaccggaagctgcaagtgcagtagaggctaccaggtcatttccgggagcgctcaaaagattgagtccttttgtctgcacaggctgtccataggagagcacatcagcgaccggggcagaaccggatttctgggtacatccaagagacttatcttccagtgtggagatacctccctttttatttcccggagaagggttctcgtagatggtctgattgtggcttttaaagtagtttttaaaagaattgatcaggtctactgttttatcaaaaacagcttcatccctgcagcggttcatcagcagagtctctgccccgaacatttccggcacttctgtgaggattgtagtaccgccgcgggcgatgagcagatcggaaaaagcaccaactgtcggatttgcggtgattccggataatccatcagaacctccgcatttcattccgatgacaagctctttacaggaaattttttctctctggaaggtggaggcataatcacagagctgtctgatgcaggcaagagatgcttctatttcatcctccacttcctgagcaaccaggaatttgatgcgatcttcatccacggttccgatatatttttttaattcctcaatattgctgttttcgcatccgaggccgaggaccagaacgcctgctgcatttggatggcggatcagatctgcaaggatctggcgggtgtgctcctggtcatctcccatttgagaacatccgtaaggatgcgggaatgcgacgatcgcatctacactgtccggctgaaattcttttgctctggcagcaacagaggttgcgatgctgttgacacagccgaccgtcgggatgatccagatttcattgcggacaccggcttttccgtccgtccttctgtatccttcaaagaaccgttcttcctgtggttctaaagaagtgaattctttctgataagaatactccagaagatctccaagtcctgttttcatattatgagtgtggatccaggaaccggccggaatatcttctgttgcataaccaatcggggaaccgtatttgatcacggcactcccggcgctgattttttccagtgcaaatttgtgtccctggggaatgtcttctaataaagtatacatgcgtccatccagatttaatacgctgtccttctttaaagaagtgagtgcaactgctgtattgtcttttggatgaatctgaataaaagtgtgtgttgaatccataaaaacctccataatgaaaatatagaaagaaaataaatgtaagtatttacaattaaaatacaacctttttagttacaagtcaatggaaaaatatacaaaaaatcaagaaaaatattgtgcaaaacgctaataaaagagtaattgactttttattaacaaagaaatataatttataaatgtaagggcttacaaaaagcgaggaaaataacaaatcaacaggaggaataagagatgaaaccatttatggatgaagaatttctgctgagcactcctacagcacagaagttgtatcatgattttgcagaaacaatgccgattctggattaccattgccatatcaatccggaagagattgcaaaagatgtctgttttgaaaatattacccaggtatggctgggcggagatcattacaaatggagacagatgcgttcaaacggtgtggatgagtactatatcacaggtgatgcgcctgcgcgggaaaaatttcaaaaatgggcggaaacgctggaaaaagctgtgggaaacccgctgttccactggagtcatttggaattaaagcgatattttggttatcatggcgtgctaaatggagaaactgcagaagaggtgtggaatctctgcaatcagaaattgcaggagccatccatgagcgtacggaatctgatccgccgttctggtgttactttaatctgtacaacagacgatcctgcagacagcctctactggcataaagaactggcggcagacgatagctttgaggtacaggtacttcctgcatggagaccggacaaagcaatgaatatcgaaaagccggattatgcagaatatctgaaaaaactgggacaggctgcagaatgtcagatcgaaacatttgcagatctaaaaatggcattaaagaagagaatggatgcatttgatgagatgggatgtcgtgccagcgatcatgcgttggaatatgtgatgtatgtgccggaaacagaagaaaatctggaaaagatctttgcaaaacgcaaacagggtgaaatgctgacaaaagaagaagaactgaaatttaaaacagcatttatggcatttgcagcagaggagtatacaaagagaaactgggcaatgcagcttcattatggatgtaagagagacaacaatgcagcccgttatgcacagcttggaccggataccggatatgactgtatcaataactatgcaccgtccgcacagatggcagattttctcaatgcattgaacgagaaaaacagccttccaaagacgattatctacagtctgaatccaaatgacgatgaagccatcggaacgattcttggatgttttcaggattcgggtgtggcaggaaagattcagcagggatctgcatggtggttcaacgaccacaagactggaatgatcaaacagatgacatctctggcaaacctgggacttcttggaaatttccttggaatgctgacagattccagaagttttttgtcttattccagacatgagtattttagaagaattctttgtgagctgatcggaggatgggtagaaaatggagaatacccggatgatgagcggatgctgggaaaaattatcaaagacatttcctataataatgcagtgcgctattttgggtttgagttgaaagaagtttactaaaggagaggatggaaactatgaaacagaatcgtaaaattacaccgattacccgtttcgcatatggaacaggaaatcttttgggaagtggtgccctggcaatcagtggttcctggctgctgtatttctataccacattttgtaatatgccaatcgcacaggcgacgttgatcttttcgctcgcaacgtatttagatgtgatcatgaatccactgatgggatttatttccgacagtttttataaaacaaaactgggacgcaaattcggaagaagacgtttcttcattatgattggaattccgctgatgtgtctctaccctctgctgtgggtaaaaaatatgaatttctggtattatctgtgtacctatattatgtttgaaattgtatataccggagttatgattccgtacaatacgcttcctgtagagatgaccagtgattttgcacagcgtacatacctggctggttcaaaagcgatgtttggtaagattgcaaactttttgggagccgctcttccaggtctgtttatcggaatttacggacaggattctccgacaccatttttctgtacaggacttacctatggagcaatcctgattgcttctatgattcttctgtattttaattcctgggagcgtccgtatgaggaagtggaagatgagagtgtggcaaatgtatttgaaggattcaaaaagttgttcattgacatcctttctacgcttcgcatccgtacattccgtgaccatcttggaatgtatctgtttggatttggagcagaatggcttttcacagcgacatttacatatttcgttgtatatgtactttcaagaccatctacatttgtgtcagaaatgaacagtttaagcagtatccttcagctgatctcgactttgatttttgtgaaaatcgtggcgaaaaaaggattcaagaagccgtttatctgggcgcttagcattgtaatcgcagcaatcctcggatatattggagttgcagtactcaatgttccgcatatgacagttctgatcattgcgattgtgatcgtgtttggtcttggtacaggtggtgtatattacattccatggacatcctacacatttatggcagatgtggatgaagttgtaacaaaccgccgtcgtgaaggtatttatgcaggggcgatgacaatggcaggaaagctgatccgtgcaagtattgtttctattcttggatttacattggcagcgttcggatttaaagaaggagcaagtgtacagccggagtccgcatgtaatgcaatcattggagtgatgctctttggatgttgtggactggcacttcttggaattatctgttctgtcaagatgaagctgacacaggagacacataaagtggtcattgcagagcttgatcgtatccacaatggcggaaaaatgtcagatgtagatccagaggtcaaaaagacactggaggagctgacaggagttccatatgaaaaatgctttggaaataataatatcggatataaagataaacatcataaagcagtcgcagaataaagaacaaaaaggcgtttccagatggaggcgtcttttttgttctgaaaataaagatatacaaaaaatatagagttatgtataatccaattatcaatacaacaggaacggatatggaaggagaaaaaacagaatgaaattaaaaaatatattgattgttgtgaaagatattgaaaaatcaaagcggttttatcatgatttgtttgggcttgatatggtgtttgacaatgacggaaatatgatcttaacagaaggtctggtactgcaggaagaaaaaatctggaagaaattccttgaaaaagaaattatttcagagagcaattcctgcgaactgtattttgaagagcgtgacatagaaaaatttgttcaaaaattagaaaagttgtatccatcgattcagtatgtcaatcgttttacgacacatagctggggacagaaggtggtccggttttatgatctggacggcaatctgatcgaggtgggaacgccgatgtaagtcttgtttgtgaaaaagagcagacagtgtatggtggcaagtcgcaaaaaaacattgcgaaagaatcaaagagaactggataggtaaattatgatcggggtgtcgatttatagccggatttaatcaggttatgagtcggcattttctttatcctacaaaaccaaccaaatatattgatatgataggaaataagtggtaatatgcatacaacaaaatgaaaggagaaatggaatggactgggaaattcttttgaaataccttcccatgtatgaaaaagcggcatggcttacgatataaatcggctttatgggcgtcgcaggtgctacggtactgggattgatctgtgcagtgatacagtatgagagaattccttttttaaggcaaataacagcgatgtacatagaactcagtagaaatacaccacttcttgtgcaattgttttttctttattatggactgccgaagattgggatccagacggatccgaagatttgcggaattgcaggtcttgcttttctgggaggcggctatatggcggaaacgtttcgaagtggtctggaatcggttgcggacattcagatagacagtgcgataagtctggggatgaaccgggcgcaggtgatgtggtatgtgatcattccgcaggctgtttctgtcagtgttcctgcatttgtggcaaacatcatttttttgttgaaagaaaccagtgtattcagtgcgatcagtttgatggatttgatgtttacggcaaaagatttgatcggactttattataaaacgacagaaagtctgtttttgctggttgtattttatctgttgattttgctaccggtatctgtggcaggaagtcttttggaaaggagagtacgctatgccggatttgggaattgatgtcctgctgaaaggacaaaatttcatcagattgcttgcaggtcttggcacggcgctgcagatcagtatgatatcggtagcgatcagtgttccttttggaattgtactgggagtattgatgacctggagcaatccgtttataaaagtaattttaagaatttgtcttaagattgtcaggattatgcctcagatggttttattgtttcttgtgttttttggtacgaccagagcatttggatgggatttgtcgggggaaatgcatcgattatcgtattttcgttctgggggaccgctgagatgagtgatcttgtaagaggggctttgatcagtgttcccagacatcagtatgagagtggagaagcgctggcgatgaacagggtgcagatctatcgatacattattattccgcagacagtaagaaggcgggttccgctgtcaatcaatctggtgacaagaatgatcaagacgacaagtctgatattgatggtgggggttgtagagattttgaaagtcgcacaacagatcatagaagcaaatagaatgtccagtccgaatgcagcatttggaatttacctggttgtattgttgctgtatttcatggcatgctggccgatcagtatatttgcaaaatatttggaaaagagatggaggggatgatctatggcagagacattgcttacagtaaaacatctggtcaagcaatatggtgatcatatcgttttgaatgatatcagtttggatatcaaaaaaggagaagtgattgttgtggtggggccgagtggttgcggaaagagtacactgcttcgatgcatcaatgcattagagctgattcagggaggagtcattaaattaggagatattccgatagaagcgaagagcaaatcgctgatcagtctcagacagaagatcggaatggtgttccaaagttatgatttatttccgcatcttacagtgttggataacattctgttagcaccgatgaaagtgcagaaacgaaaaaaagaagaggtaacagaagaggcaatgaagcttctgagaaaagttggattgcaggagcaggcaggtaagtttccacgggaactgtccgggggacaaaagcagagagtggcgattgttcgtgcattgtgtatgcatccggagatcctgttgtttgacgaagtgacggcagctctggatccggagatggttcaggaggtgctggatgtgatattgaatctggcggcacagggaaacacgatggtcattgtgacgcatgagatgcagtttgcacgtgctgttgcagacagagtggtgtttttggatgatggtaagatcattgaagaggaaccgccggagatattttttagaaatccaaaaacagaaagagcaaaacgatttttgagtacatttacatttcacacagtaaaacgttaaatcaagagaaattataacagatgggagattatgattatgaaaaagcagaaattaaaaaaagcagcagcacttgcagcggtcgtatccacagtttttgcagtgacagcgtgcggcagcaaagcggacgattcttcttcaaaagcagaaaaatcagatactgtttaccgcacattacaggaaatcaaggaagatggaacaattaacataggcgttttttctgataaaaatccttttgggtatgtggatgaaaatggaacatatcaggggtatgatgtatattttgcgaaccggatcggtgaggatctcggggtagatgttaactttgtatccacggaagcggcaaatctatgcaaccgctaagaatgcactggaaaacgggaatggagcagcatggacaaatgataatacagaggttatcgcgtttgccctgcaaaataaggggtatacggtcggcatctctcagcttggaaataaagatacaatcgcaccggctgtctcaaaaggaaatgaaacgttgttaaactggatcaatgaggaaattcaatctctggaaggagaacaatttttccataaagattatgatgagacgctggtagctacttatggagaagagtacaaagaagaattggttgtagaaggtggaaagacagaatagcttttaaaatgatggcagaagccttacgcgtctgccatcattttgtcgtctgcttttcaacaatatttccggaaaacatcgttctggaaggcggaatttctttctggaatacctgcatcatctgtgatacggcagtgacacacatatattcgaccctgttgtcgatggttgtgatttccggtgtgctgcaggaggcaagcaccgaattgttatatccggtcacctgaaaatcttccggaatgcgcagctgtttttttaatgcatattttacagcgccggcagccagttcatcatctgcggccagtacacagtcgaaagatgtgccgtcttcgtcgagttgttccaagatggaacatgctttgtgcaggttgccgggtgcggaaaacgcaatttttttggaaatgtccagtccgtgttccgaacaggaatccagaaagcccttgacctttttctgtccgctgtaattcaaagtacgatacagataaataggagaggttgctccgtttgaaaagatcaggtcggtcatatccttcagtgccatatagtcatcacagagaatggagtagatattttctccttttaactctccgtttaggatgaatacagggattttggaggcggcatccagaatatagcggttttcttccggggaattctcgataaaatgagaaccgatcagaagcactgcatccacgttacgggacaaaagcaggtgtaaataactctgcttttcctgcagctggtatccggtacagcagagcatggatgcataggagtttttgcgcagctcccgctccagataataaatggcctgcgcctgataaacatccgaggagtcggagcagagaatccctacagtgtgcatagagtttaagccgaggcttctggcaaatgcgttcggtgtatagctgttttcctccatgacagcaaggactttcttccgggttttgtcactgaccttgtcacttccgtttaaaacccgcgaaacagtggcgatggatactcccgctttctgggaaatgtcgtatatattcataaaatgaattctcctttaaaaagattccaggaatatgcgggaatctacggcattttcgggcgtactgttttcaatcgttgcctgcaaaaaaggagcgtatgtacgctgccagtgtaagatttccgtgtaatcaagatttccggcacttcccggtgcgcacggcgtaagagtgccgttctcaatagtataatcttttgcgtggagtaatgcaatgtcagaactgtttctttccagcatttcttgaaaaattactttctgatcggtgtgatttccttcccagagcatattgaccggatcgaagatcagttttaaatgcggggaagagataaaatccagtgccagccgggcgcgtttcgggttgtagataatatgtttccagactggttcaatggcgatcgtaacactatagtgctgtgcataatcaactaccgttttcagattttttaaaaagtaaacaagagcctcttcctcgtgtgcttcagggcagaaagagtatgttgtgttcggacacccggtctctgtgccgagaagcggtgcgcccagccagtgagcaaaccggatgttcgccttgtattcttcgatgatctcattaagctgtgtctgatccggattggcaagattgagatagcacccgtaaattgcaatattcaaattatttttctcacattcccggcggatatgcgcggcaagaccgggagtcagtccgtgacggtcaatgccgtactctttgtaaacaattttagaagccaggtgaatgcaggaaaagtcctgctcctttgcaagagcaaggcggttttccagagaagttggttccatatcgtgaagtcggattccgacttgaagattagacatccgtaaaaactcctttctttaatctgcgttctgttcgtggagcagaacttctgtataggcgagaattaaaggggcaactccttttgcatcattttttacgattggttcccgcatatagtactcaaatgttccttcgcgcatgtcaatatttccgagtcctgcaacgaggcaaatattgtcgagctgcagaacaccgtctttttcagataaatggttcttgcagattccttcaaatgcgcggtatccgtatgagtagtaggaagcgtctaaaagaccgagacggactcctttcatgatggcataagcgaagatggcagaaccagaagtttccagataatttggtttgattcctccgaggttgatcacctgataccacattccgctctctttatcctgataaggaagcatggcatcgatcagttcgcagaacatctctttcaattcgtcgcgttgtgagttcatggattccggcatgatctcccaggtgtcggcaatggccattgcaaaccatccttcggcacgaagccagaaattgttggaaagccctgttactttatcgcaccagaacatctctctggaagaatcatatgcgtggtagtacagtccgtttcgttcacagcgcatgagtttgcgtacattctggaactgtcggaagctgtccatgcaggcattgccgttacaaaaagaaagttcatactgcatatagaacggctgagccatataaagaccgtccagccagatttggtttggataaatttctttgtgccagaagtttccttcttttgtacgaggctgtccaaggagctgagaataaatggtatccatggcttttcggtatttttcttttccggtcaggtcgtacaggcggtacagtgtttttcctgcattgacattgtccagattgtattctttgggatcataatatttgatggatccgtcttcctgtacgaaataatcaatgaattcatcggcaaactgcagatagcgttcatcttttgtgatatcataaaaagtgatcagagctttgatcatgcagccgtcaatgtaattccaggtgttcggttttccagcgcggattttttcgatattccatgcaggttcctgcggtgtgctgttttcaatcaactgtttaatgtaattatctaaaattttcattttgaatacctccttaatgtaagtgctaacataggcttaaaataaagaaaaaacaggaaaataataattcgttattatgataacatatgatgtgaaaaaagtgtattgtgtatttttgataaatatattgaatattattgtacaaaatagataattgacaattaaaaaacacaatgataacatacgtttgatagggaaaatgaaaatgtaaataggtgaaaatgaataatgtaagctgttacaatatattaaaaatgtacaaaggagatcaagatggaattaaaattgatttggaaacatgcacgggcagctgtgttggaatgctgtgaaggaagtatctatgagatggcgcagccttgtcagatttatctaaacggagagttttataaagaaacaaagcaggtagtgaatgttctgtatgacctggaacctgaaaaagagtattgtgttgcggttcaaaagggagaagaaaaatcagaaatcgtgttttgtacagaggctcaggattatacgctgaatgtgcgtgattttggcgcaaagggagatggcattcaggatgatacgacatatatccaggctgcgatcatggcatgtccgaagaacagtcgtgtgctgattcccgagggagtataccggatcacaagtctgtttttaaaagatcatcttacaatggaactggcaaaaggggcagtcctttcggcatgcacagagcgtgagaaatttccggttttaaaaggaacctgccaaaatgaaaataaagacaaagaatacattctcggaacatgggagggagatgcctgtgatatgttctccggaatcatcacgggaatcggagtgaaagatgtgacgatttacggagaaggcacgattgacggaaacgcttcctgggacaactggtggtttgaggcgaaaaagatccggattgctgcaagaccgcgtatgatttttctgaatcggtgcgaggatgtgagggttgtgggaattacggtacagaacagtccgagctggaatatccatccgtatttttccaaccgcctgcaatttatcaaagtaacggtattgggaccaaaagattctccaaacacagatggattgaatccggaatcttgcgacgatgtagaaatcacaggatgtctgttctctgtaggagatgactgcattgctgtgaagttcggaaagatttccgtgggagcaaagtacaaagtgccgtcttccaatttgaggattcgtcaatgttgtatgcgggacgggcatggctcaatcactctgggaagtgagatggcggcagggatcaggaatctgcaggcaagacagtgtgtgtttattaatacggatcgcggacttcggatcaaaacgagaagagggcgtgggaaagatgcgataattgatggtgttttgtttgaagatatcaaaatggattctgtgctgactccgtttgtgatcaattgtttctatttttgtgatccggatggacacagcgaatatgtacagtgtaaagaacctcttgcagtggatgagagaactccacagattaaagaactgtgttttagaaatattcaggcagaaaactgtcatgtggcagcagtatttttctatggactcccggaacagaaaattgagcgggtggaaatgaaacatgtgcaggtcagttatgcaaaagaagcggtcagtggacagccggcaatgctggacgggatcgatgagaatatctgcaaaatgggaatttttgcaaggaatataaagacacttgtgctggaagatattcaggttacgggacaggatggagaggcaattttaatggatggaattgattctctggaatggacaaaataaacaggactgtattatactgtacctattaaaaaagaaagaggactgtatgatgcagaaattagaattatatatccacattccgttttgcgtacagaaatgtgcctattgcgactttttgtctgcaccggcaaatgatgcagccaaagcggagtatgtggatgcattaaacaaagaaatacaaagataccgcgaggttgcttcatcttaccaggtatcttctgtttttgtgggcggaggaactccgtccattttgtcgtgtgaacagatgggtgagatttttaaaatgctgagacaggtatttaccatcgacagggatgcggagattacaatcgaagcaaatccgggaactgtgacggaagaaaaactagaaggatggaaacaggcgggaatcaacaggatcagtttcggattacagtctgtcaacaatgaggaactgaaaatgctgggacgaatccatacgtatgaagaatttcgggaatcctatgatatggcacggcaggcaggatttgataatatcaacattgatctcatctcagccattcccggacagaccgtaaaaagctgggagcacacccttcgtacggtggcagaattacatccggagcatatttctgcgtacagtctgatcattgaggaaggaacccgattttatcagtggtatggaaaaggacagacagatcaggagaaatatccgcctcttccggatgaagatgcagagcggcagatgtatgagcggacagagggaattctggaagaatatggatttcatcgctatgagatttccaattatgcacgggaaggaaaagagtgcagacacaatctggggtattggagcagagtagagtatttagggatcggtctgggagcctcgtcttttatttccaataccagataccatctttgtacagatatgatctcttatatagaaagaataggatcaggagaagatctgcgggaagaaatcgaagtgctgacaaaggaagatgccatggaagaatttatgtttctgggacttcgaagaatgcagggaatctccggaacccagtttgagaactgttttggaaatacgatagaagaaatctacggagacgtgattgaaaaactggagcaggaaaaaatgttagaagtgaaagaggataaaatccggctgacaaaaagagggattgatgtcagcaattatgtgttctgcgaatttctgctgtaggaaaagattttgaagcttttaataattcagaaacaaatatcaaacattggataaacaaaagagtgctattctcataccatcaaacaaagaaaggctggtatgagaatatgaaagaaaagaacaaggcaggcagagtgtccaaaaagacgatagctacagtattgattgcaatgattggtacagttggaatcgggatgtgcatgagtattgcatggagttatgcagcaccagagattgcaaaggagttgtggatttactttgtctcatttaatttatcaaatctttaaaataaaagagtcagaaacaggtgcgtcagaagaaaaaattgaccgcaccttgttttttgtttacaatttgtacataattcacaaacaaaacgaaaacaaaaatgtgttaggatcgtcctgtattttaggaaaatgggaagagatacaaaaggagaagataaatgattcgtatacttgtagtggaagatgatgaaaaattaaatcagattgtatgtacctatctgaatgacagtggttttcaggcgaaggggtgtctgtcggcagctgcggcatatgaggaaatgtatcatacggtgtaccagctgattatttctgatattatgatgccggagattgacgggtttgagtttgccgggacagttcgccggataaatgagacgattccgatcctgtttatgtcggcaaaagatgatctgccttccaagcggaaagggtttcagctcgggatcgacgactatatggtaaagccgatagaactggatgaactgcttcttcgtgtaagggcattgcttcgcagggcaaatatagagatggaaagaaaaattacggtgggaaatctgatactggatgcggatgctatgagtgcagaaattgacggagaagagatcagtcttactacaagagaatttaatattatttacaagcttttgtcttatccgaaaaaaacgttttccagagcgcagctcatggacgagttctggggtgtggagacagataccagtctgagggctgtggatgtttatgttacaaaactcagagataaactgtcagcctgtgacggatttaagattgtgacagtccgcgggcttggatacaaggtggtgctgcaatgaaagaacgagaggaacaaaggggaaaagtaaagcaaagtttatttccggtttctttatttggaatctatattggggttctgtttctgatgtcggggatacataccggactgatcgtgtttatgaattcggcaggctggaataaagcggtgatgaccgtggtgccgatgtgttactggggaatggttgccatgggactgacgctgtttaccagatggaaggtaaaaagaacctacgaagaaccactgtataaaatggcagaggctaccagaaaagtggcgaacggagatttttccgtctatgtacctacatttcatacaatggagaaacgggattatctggatgtcatgattctggattttaataagatggtggaagaactagggagcattgaaacgctgaaaacagattttgtgtcaaatgtttctcatgagatgaaaacaccgctttctattattaaaaattatgcggaacttttgcagagggatgcgttgtcggaggaacagcgcagagaatatggggaagccattgaaaatacagcaacgcgcctgtctgatctgatcagcaatattttaaagctgaataagctggaaaaccagaaaatacagccggaggcagaagtgtatgatgtgtgcagacagttatgtgactgcattctgcaatatgaatctgcctgggagaaaaaagagatcgagatggaagtagaaatggaggatcgggcagaaatttatgcggatcaggatctgatggaactggtgtggaataatctgttgtctaatgcggtcaagtttaccgagctgggtggtgtgatcacggttcgtcagctgtcggatgagcagggggtgacaatctctgtatcggataccggctgtggtatgagcaaaaataccatgaaacatatatttgataaattttatcagggagacacgtctcattccaaagagggaaacggactggggatggcaatggtaaaacgggtgctggagcttatggatggggagattcaggtcttaagcgaagaaaaacagggcagtacgtttattgtgacactgcccatggcgggaaaggagtttggtcagttatgaaaaagacagaaaagccacagagaaattttgtggcatatgaatataaagaagtgagtgcaaacagcagtcaggcctcctttttgttagatggatatgagaattttgggtgggaaccggatgacaatctgccgcagagcagccagagtcgtcatccgggggcggagaagatgatgactctgcgattgaaacgtgatcggaaaattgtaaataaaacggagcttacaaggctgcagcgaaactttgaagcctgtgtccgggaaattcagtcgctggaaaacagtaagacatcgaaagcgacaatatgggcgctggcagcaggagtgatcggaactgcttttattgcatgttctacgtttgcggtgacagcagttccgccgaaaatccttttgtgtattatttttgcgattcccggatttctgggatggatcctgccgtatttcctttataagaaaattgtgagaaaccagacggaaaaactgacgccgatgatcgaagcgaagtatgatgagatttatgagatttgcgaaaaaggaaataagctgttgtattagaagtgaaaaaagtacagggttataaattggaaacaaggggaaatataaaaagtataaagaatatataaacatggttgacaaatacagaccatggtgctatcttaatatacggaaggtgttagcactcaaaacaaaggagtgctaataagaaaaacctcaggtgagagaaaggaaggtctgatgggattgaatacagaacttggcgagcgtaagctcacgattttaaaagcgattatccaaaactatctggagaccggagagcctgttggttcccgaacactttccaaatacacggatttgaatttgagttctgcgacgatacgcaacgagatggctgatctggaggatctgggatacattttccagccgcacacttcggcaggaaggattccttccgacaaaggctaccgcttatatgtggatatgctgatggaggagaaggagcacgagattacagagttgcgtaacacgatgcttgaaaaatccgataaagtggatcaggtgctgaagcaggctgcgaaagtgcttgctgtgaataccaattatgcaacgatggtttccgctcctgtgaacagccggaacacattgaagttcattcagctttcacaggtggatcaggaacagattgtggcagtgatcgtgatgaatggaaacgtgatcaagaacaagatcatacaggttggtgaggtgcttgccagtgagacgcttctgaagctgaatatgcttttgaatacaacactcaacggcatgtcgatcgaacagatcaatcttggtctgatcgcacgattgaaggagcaggcaggaatccacagccgggtgatcagtgatgtgctggatgccgtggcggagattattcatgtagatgatgatatggagatctacacgagtggtgcgacgaacattttcaaatatccggagctgagcgataagcagagtgctcaggagattatcagtgcatttgaagagaagcagcagctggcggatctggtgacagagacactggcaagtgaagaaaatcacgggattcaggtctacattggggatgagactccggtcaagacaatgaaagactgcagcgtcgtaacagcaacctacgaattgggagaaggcatgaaaggtacgatcggtatcatcggtcccaagcgtatggattacgaacatgtcatgaagacgctgaaaactctgcagagcgagttggatgcaatttattataaagacccggaagaataggaaggtgattgctggtggcagagaatatgagtaaagaagagatggtcaaagaagcggtggaagaagcaaaagccaaagcttacaaagaggccgaagaacaggacacagaagagactgtggaagaagcagctgaagaggctgcagagccaacagaagaaacggagggttctgaagagggatccggtttcatgaagaagtttggcagaaagaataaaaaagataaaaaagacgagaaaattgaggaactgactgacagactcacccgtcagatggcagagtttgataacttccgcaagcgtacagaaaaagaaaaatctcagatgtacgaaatcggtgcgaaagatatcatagaaaagattcttccggttgtggataacttcgaaagaggaatcgcagctgtaccggaggaagaaaagtccaacccgtttgcagaaggaatggagaagatttacaaacagctgatgactacactcgaagagattggcgtaaaaccgattgaagcggttggccaggaatttgatccggattttcacaatgcagtgatgcatgtagaagatgaagaagttggagagaatatcattacagaagaattccagaagggttatctgtacagagacagtgtagtaagacatagtatggtaaaagtggcaaactaataaggaggaaataatcatgggaaaaatcattggtattgatttaggaacaacaaacagctgtgtagctgttatggaaggtggacagccaacagttatcgccaacacagaaggagcaagaacaacaccatctgtagttgcatttacaaaaacaggagaacgtctggtaggagagcctgcaaaacgtcaggcagttaccaatgcagacaagacaatctcttctatcaaaagagagatgggtacagattataaagtagcgatcgatgataaaaaatattctccacaggagatttctgcaatgatccttcagaaactgaaagcagacgcagaaggatatcttggagagaaagtaacagaagcagttattacagtgccggcttatttcaacgatgcacagcgtcaggcaacaaaggatgcaggtaagatcgcaggtctggatgtaaaacgtatcatcaacgagccaacagcagcagcacttgcttatggacttgacaacgaaaaagagcagaagatcatggtatatgaccttggtggtggtacattcgacgtttccatcattgagatcggagacggagttattgaagtattatctacagcaggtaacaacagacttggtggagatgactttgaccagaagatcacagactatatgctggctgatttcaaggcaaaagaaggagtagacttgtcaacagacaagatggctcttcagagactgaaagaagcagcagagaaagcgaaaaaagaactttcttctgcaacaacaacaaacatcaaccttccgttcatcacagcaacagctgaaggaccgaagcattttgatatgaacctgacaagagcaaaatttgacgagctgacacatgatcttgttgaaaaaacagcagagccagtaacacgtgcgctttctgatgcaggaatcacagcagcagaattaggtcaggtacttcttgtaggtggttctacacgtattccggcagtacaggaagaagtaaaacgcctcacaggaaaagagcctagcaaatccttgaacccggatgaatgtgttgctttaggagcatctgttcagggtggtaaacttgcaggagatgcaggtgcaggagatatccttcttctggacgtaactccactgtcactgtctatcgagacaatgggaggagttgctacaagactgatcgagagaaatacaacaattcctacaaagaagagccagatcttctctacagcagcagataatcagacagcagttgatatcaacgttgtacagggagaaagacaattcgcaagagacaacaagtccctcggacagttcagactggatggaattcctccggctccacgtggaatcccgcagatcgaggttacattcgatatcgacgcaaatggtatcgtaaatgtatctgcaaaagatctgggaacaggaaaagaacagcatattacaattacagcaggatctaatatgtccgatgcagatatcgacaaagcagtcaaagaagctgctgaattcgaagcacaggataagaagagaaaagaagcgatcgatacaagaaacgaagctgatgcgatggtattccagacagaaaaagcactcaaagaagtgggagacaaactggatgcagcagataaatcttctgtagaagctgatgtacaggcgctcaaggatatccttgcaaaatctacaccggaagatacatccgatgcacaggttgctgagatcaaagcagcaaaagacaaactgatggaaagtgcacagaaactgttcacaaagatgtatgagcaggcaggtgcagcaggagcaggggctgcaggcggaccgacaccggaggctggtcctgcaccggaaggattccagggagatgacgtagtagacggagattacaaagaagtttaagagatcaatctgacgggagagagcactctttttccggagtctggaaggcatgtctttcaggctccggcggtgtgccctcgcctgtttggttatgagttggatcaaggatgaaaggtagattattatggcggagtcaaaaagagattattacgaggtgcttggtgtaagcaaggatgctgacgatgctgcgatcaaaaaggcgtatcgtgcactggcgaagaagtaccatccggatatgaatccgggcgatgccgaagcagaaaagaaattcaaagaagcatccgaagcctatgcggtactgagtgatgctgaaaaacgtcgtcagtacgaccagttcggtcatgctgcgtttgaaggcggcgcaggcggtgctggcggatttggaggctttgacttcaacggcgcagattttggagatattttcggagacattttcggcgatttgtttggcggcggcggaagaagaggcggtcgtgcgaacaatggcccgatgaaaggcgcgaatattcgaaagagcatccgtattacatttgaggaagctgtgtttggctgcaagaaagaactggaagtgattttaaaagatccatgtacgacatgtggaggaacaggtgcaaaaccggggacttctccggagacgtgtccgaagtgtggaggaaaaggtcaggttgtctatacgagtcagtctttcttcggaacggtacagaacgtccagacctgtccgaactgtggtggttccggtaaggtgatcaaggaaaaatgtacatcctgctccggaacaggatacacttcaagtaagaagaagattgaagtgaccattcctgcaggaattgacaacggacagagtgtacgcatccgcgaaaaaggagagccgggtacaaacggaggtccgagaggagatcttctggtcgaggtgaacgtatccagacatccgatcttccagcgtcaggatatgcacattttctcaacagtgccgatttcatttgcacaggcagcactcggtggagatgtgaagattcagactgtggacggagcggtgatctacaatgttaagccaggtacaaagaccgatacaaaggtacgattaaaaggcaagggagtcccgtccctgagaaattccgcagtgcgtggagatcactatgtgacactggtgatccagacgccggaaaaactcagtgcagaggcaaaagaggcactgcgcagatttgatgaactgagtggaaactcactgcatcaaaatgacagtaatccggaaaaaagcgagaaaaaaaccaaaagaaaaggtttcatggataaagtaaaagaagcctttgaaggggaagattaaaattcagaatgaagccaggcagagacagtctcatagagaggctgtctctgcttgtttcatgcctgcaaatacgataacagatcgctctcccagcaaaacagtctgtcctgcagtcggcatatcgttcccggaaaatgtctgatgcagcaagtccccggtattgactgcaatcttccagacataaccgtttggaagggatgggagcacaagttgttttgcaatccagtgtgcgttgaccgcaagaaatacaagatcttcctgtccggtcttttcatcaaatcctgagaacatcacgcaggcagtgtgagaatctgaggaaggaacaggcggctctggggtaagtctgtggctgctcatggaagggtatgaggtgtagctcggctccagatctctgcggatggatgggtgctgtttacgaaatgcgatcatatattgaaagaacgcaaacagggcctgatttttggacagcagactccagtccagccaggagatttcgttatcctgacagtatggattgttgttgccaaatcgtgtatctgcaaattcatctccggataaaaacattggtgtaccacggctgcacatcagcagtgcacaggcattttgcatcattttcagccgcaggcggaggatttcgggattggaagtttctccttcttctccgcagttccaactgtggttgtcatcacagccgtcggtattgttccagccgtttgcctcgttatgcttctggttatagctgtatagatcgcacagtgtaaatccgtcatgacaggtcagaaaattgacggaagcattttcccccccccgcggtactgcggattgtataaatccggggagccaaagatccgtttcagagcagtctcatgaagtccgtcatccccttttagaaaacgccacatgtcatcccggtagcgtccgttccattcggcccagcgtctccgggacggaaaggagccaacctgatagagtccgcccgcattccatgcttcggcaatgagttttacattcccaaggatcggatcaaaggcaaggctctgcagaaggggcggctgactcattggagagccgtcttcatttcttccgagaatggaagccaggtcaaaacggaaaccgtctacccggtagtcagtgacccaatagcgcagacagtctaaaaataatttaacgggtgaaaaatttgtgttctctggtttccggctgggttctctcaactggagtttccacagaaggttcatcagagcagtcgcaaggtgtttcggaagcctcgccgcactgaacggaagcctctccggtttcaataacggcaccaaaagcaatcgggatctggatgcagagactctgggttacagtaaacgtgcaggaggttttgctgcccggacactgtggatcagtgtggatgacaggatcgccgcagcagattgttctggcggttccgggatgtgcaaacggggagaccgttacaggaacgcaaacggtttctttctggtaaaacgtagattcacaggattctgtggaaccgcaggaaggcccgcatatggtcaggccggaagcggtctggccgccgccgaaaagacagagattgactgggccgaccgcataaggtctgacaagagaaaagcagacctgcatctcaccatccactttatccagtgggaaatcgaatttcagtcccgtacatccggttggcggatccggatgctggattgttttgagttctacattttcaccccagattacgttctgcgattttccgtcgattacgaccgtaacatccaggatatcctcctgcgtgatcgcgctgcagataccaagcaggaaatggcttaagtctgcatagagaggtgtgtctgttccaacacccgcaatatcatagcaaaatcgctggtattctcccggttttggggttaaaacggaagtctccgtattgagtgaaaaaacgaacggcaaaatccgctcgccgataacagtagaatagtctgtttcataattacatgatgtcataagaaataccttttgaaaaattttattctgtatagtatatgataaatctcaaaacatgttataattgccatgtgtttttcaaatttgggaaaaggggatggaaaaacaagaaataggaatttatgggagagaaaagatgtttatgagaaaaaaggaaaatgagctgcagattgactggaagcatttttatttgggtgtactggcactggtcattccgatggcacttcagaatctgatcaatgtgggtgtaacggctgcggatgtggtgatgctggggcgcgtaggagagacagcgctgtccggatcttctcttgcagggcaggtgcagtatattatgacgttgtttttgttcgggctgacatccggagcaacggttctgaccgcacagtattgggggaaaaaggacctgcggacaatcgagaagattttgggtcttggaatgcgggctgcggtttttgtgactgcattattctttctggcagcgcagatcatgccagagcagcttttgcggatatttacaagtgaaccagaggtgatcaaagagggcgtgaagtatttgcggattgttagtttttcttacatttttatgggaatcacacagacttatctttatattatgcgaagtgtggaacgggtcgttgtggcaacggtggtatatttgtgttccctgctctgcaacattacgatcaatgccattttgatcttcgggcttctcggaatgcccgccatgggcgtgcagggtgcggcaattggaacgctggtttccaggctcctggagatggtactggtatgtgtgtactcgaaagtgtggaacaaagatatcaagttcaggatcgcctacttttttaaaacagagcacgttttaaatatggattttctgaaatacgcattcccggtgatcttaaacgaggtgctctggggacttggaactgcgacaaatacggcagtgcttggtcatatgggaagtgctgcagttgcggcgaattcggtcgcacaggtggccagacagctcgcaacggtggtagcattcggactttccagtgcgacagcgatctatctgggcaaaaccattggagagaaaaagtatgagcatgcaaaagcatatgcaaagaggttcgtatggctcagtgtgattatgggagttgtgggaggtgtgctgatccttctgatctcaccggttatggcagagacgatgactctgtctgaaacagcaaaggggtatatgcggttcatgttctttgtaatgtcctattttgtggtagggcaggcgttcaacacaacgatggtcgtgggaaccttccgttccggcggagatacccggtttggcctgctgctggatatgtctaccatgtggggatgttccattttatttggtgcgctcgcagcgtttgtgttccactgcagtgttccggtggtgtatatgatcctgatgagtgatgagatcattaagattccgatcacctggcgccggtacaagagctataaatggctgaaggatgtaacaagagaagaattgtaggggaagctcctttctaaaaaaatcttgcaaaattatctgcaatcttataaaatgcagaagtgacttttgtaaagaattatttttaggaaggagttttctgcatggcagacatcaaaataaagaaagatcactgtccgctgatcctgacacacagtctgatcggagggaaatggaagctgaagatcttgtggcatattctgcagggcgataatcgattttcggagttaaaaaaggaaatcccgggtatttcggaaaaagtgttatattcgaatttgaaagaactggaggatgcaaggcttttatacagggaagtgatcaaggaaaagaagccgtccgtgattcgttaccgtctttcagaagaaggcgtggaggtcagggcactgatcgatgcggcacaccggtttgccaatcggtatgcaaaaaagcatatacatactaaaaagtaaggtattgcgaaatgtgagtgaattgtgtatagtctttttgtcagtagagaagacatatttttttatacatatgttagttaaaactaataagagtaaataaaaactaatggaggtggtggtatcaaaaaatatgtatcgacaatcatattggcggcggtgttgttcgtagtttctgtctgctctctgtttatcggggtgatggatgcggatctggcgtcgctgatgcagggagatccggaagtgatccggttgtttctgatttcaaggattccgcggcttctggcaattctgtgtacaggaatcggaatgagtacagcagggctgatcatgcagcagctttgtatgaataagtttgtgtctccgactacgggagcaacgatttcttcggcccagcttggaattttgctggctctggtatttctcccggagtctacacttcttggaagagcagtgtttgcgtttgtggcggcgattctgggaacctggatttttgtgtggtttgttcagaaaatccgttttaaagatgtggtgctggtaccgttggtcggaatcatgtttggaaatgtgatcggagggatcaccagcttcattgcctatcaatacgagatgaatcaggcgctgtccacctggctggtagggcatttttctatggtactgcgcgggagatatgagattgtgtatctgacagtaccgctggttgtgctggcatttgtatttgcaaaccatttcaatattgtggggatcggaaaagaattctctcagaatctgggagtgccttataatctggtgctttttatgggccttacgattgcggcaatgattacggcgtcggtggtggtagtggttggttcgatttcttatatcggtctgatcgttccgaatattgtcaccatgttcaagggtgataagatccgcggaacgctggcagatacggcgctgtttggcgctttgttcgttatcgtatgcgacatgatctcgagagtggtgattgccccttacgagctgcctatcgaactgatcgtaggaattctcggcagcatcctgtttgtaggactgttgctgtatcgactgaaaaacggaggaagaagaatacttctggggaaaggaggcagacaggatgcacagtgcagttcataagacaaacagcagaaagcttcttgttttagggatactggtggcggcagcagcaatcgcctatctgtttgtggatgtttctttttcaaatgagcgtctgtttcggtatgctatgaaaatccggattccaaagctgatggtcatgctggtggcatctgctgccatcggaggggcaacgatcgtatttcagactattattcacaatacgattgtgacaccatgtctgttgggaatgaattcgttgtatacgctgattcacacagcagtggtattctttgcaggttccggaagttttctcgctgtcaatgcgaacgtgtcttttgtggtcgatctgtttttaatgagtacaacagctgttttggtctacagctatctgttcaaaaaaacaaactataatgtgttgtatgtattgttgatcggaacggttttgacttcgtttttcggaagcattcagagtacgcttacaagaatcatggatcccaatgaatatgacagccttctggcaacgctggtagcaagctttaacaacgtcaactcggaaattattctggcagcagtcctggttctggcaggtatcgtgtttgtgttgcgaaaagaacttgcgcttttggacgtgttgtctcttggaagacatcaggcaatcaatctgggtgtggattatgaccgggccatccggaaacttctgcttggagtgacactctgtatcgcgaccgccacagcgatggtaggaccgatttcattcctcggactgatcatcgcaaatctgtccagacagtttttgaaaacataccggcattcgcagctgatcatgggatctgtcttcttcgggatgtttgttctggcggcagggcagatgatttcggaacagatctttgtatatgcgattccggtcagtgtatttattacagtaggcggaggaggatactttttgtatcttctgttgaggaaaaggaggagttagaagagtgaagatacgtggagtaaaaaaacagtatcacggaaaaaccgtggtggattccgtttcttttgaaattcaaaaaggaaaagtaactgctctgatcggtcccaatggagcgggaaaatctactgtgatgagcattctttccagactgatcgcaaaggatgaaggagtggtagagtttgaaggaaagaagctggagcactggaagagtaaagaattgtcaaagcatctggcgattctgacacagagtaatcatattgagatgaagctgacagtcagagagctggttgcattcggacggttcccgcattcgggagggcggatgaccaagcaggataaagaaatcgttgcacaggcgatcgattatatggaactaaaagagtttgaagaccggtttctggatgaattgtccggaggacagcggcagagagcatacatcgccatggtcattgcacaggatacagagtatgtctttttggatgaaccgacgaataatctggatatttatcatgcttcgaatatgatgaagatggtgcggaagttaagtgacgagctgggaaaaacagtgatccttgtgcttcatgagattaattatgcagccttttattcagattatatctgtgcatttaaaaacggaaaaatcgcgaaatatggaaccgttgaagaagtcattcaaaaagaagtcctttctgagatttaccaggtggattttgaaattttaaatatcaaaggaaaaccattatcggtatattattgatgacagaaaatggaagaaaacaaagatggaggaagaagatgagaaaattagcaaaagtattattggcaggagtggcagcactcagtctgacagcatgcgggcaggcagaaggaacaacaggaagttctgcggatacaacggcaaaggagcagaaacaacaggaaacacctgagaagatcaagatccagtctctgaatgcaaacggagaagaaatttctctggaagtaccatatgatccggaacgtatcgctgttttggatatggcagcactggatatcctggataatcttggtgttggagacaaaatagtaggttctgcatctacttctctggagtacctttctgattatgtggataatgaaaaggttgcaaatctgggaacgatcaaagaggcagatctggaggctgtgatggagtgtgagccggaagtgattttcatcggcggacgtctggcttcttcctatgacgcgctcagtgaaattgcaccggttgtatacctttcgacagatgtggagacaggtgtcgtaaaaagcgtgacaaaaaatgcagagacgattgcttctatgtttgggctggaagatgaagtaaaagaaaagacagccggttttgatgaaagaattgaagtattggcagaaaaagcaaaagggcatacagcactggtaggaatgactacaagcggaagctttaacttaatgggaaatgacggaagatgctccattatcggagtggagatcggatttgacaatctgacagctgctgaaagtacctcaacacatggaaatgaagcttcatttgaaacagttgtcgagaaaaacccagagtatattttcgtgatggatcgtgatcaggcaatcggggcagacggggcacagacggcaaaagaaattatggaaaatgaacttgttatgcagacagatgcttacaaaaatggaaaaatcatctatctggaacatccggcagtatggtacactgcggaaggcggaatcactgcactggatgtgatgctttctgatctggaggagtccctgtaaaaagttgttgtgtgcattatcctcaaattgtggtacaatagaatcagtctgaaatcctgttttcaaagatggagacagatgaatttatagaacaaagagaggtaatgaaaatggaagaacaatatacagaaggatgttccgaagagtcctgtgcaggatgttctcattccggttcctgtgaaagccagaagcagaatgcaggcaatacggcgccatccaaagcaccggcaaatgtaggttcccaggtgaaaaaagtgattggagtcatcagcggaaagggtggcgttggaaaatcgctggtaacagcttccctggcacgtatgatgatcgaaaaaggatatacggcaggaattttggatgcagatattacaggtccatccattccgaagatgtacggagtgcacgagatggcaatcggaaacgagatgggaatgcttccgtgcagcgcaccggatggaacaaggatcatgtccgtcaacctgcttttggaagaggaggacacaccggtcatctggagaggtcctgtgatcgcaggcgttgtgacacagttctggtcagatgtgatgtggggagatttggattatctgttcgttgacatgcctcccggaacgggagatgttccgttgactgtatttcagtccctgcctgtggatggagttgtgatcgtcacctctccgcaggatctggtacagctgatcgtaaagaaggcgtacaacatggcaaaacagatgaacattccggttcttggaatcgtggaaaactacagttacatcaaatgtccggactgcggaaaagagatcaaagtgttcggtgagagtcatattgacgagattgcaaaagaactgggagtaccggtacttggcaagatgccgatcgacactgcgattgcagaagcagtagaagcagaaaaattttatgaagtgacgaacccgtatttgaaagaaatcgatttgtagggggctgggaaagaaaagaaggcttgtgctggaaatgtgcggaaatatgccgtcgtctcaaagtgctgaatctttgaggcggcggctttttatcacagatttttataactgaatatttttgaacagatctccaaggcttgtaccgatctcttcggcttttggaatctcaactttttctacaacttcttcttccggttcttccaaagctttcatgctcaggctgatcttgccgtctttaataccgatgactttgacctgaacttcatctcctacattcaaaacagctgcaggattcttgacgcgtttttgagaaatctgagaaacatgtaccagtccggaaagaccgttttccagtttgacaaatgcaccgtagttctgtaatgtctctacagtaccggacataaccgtaccgattgggatacttgcgatctgtgcttctttttcttttctttctttttctttgagaagctcacgggcggacagtacaagccggttgcctgcctgatctacatcgatcacttgaacttccacatctttgagcaggtaagtctccagatcttcaatgtaagaaagggagagtttggatgccggaataaatccgcgcagtccttctaccatggcaatggcaccgccatttacgattccttcgatcttaacagggaggaccgttttcttttccatatattccaaaaccctgttccatggattggcatcgtcaaaatgatcttcgtaatcagccattgtctctgtgtgtccttcgtttgtcagtaattcttctgttcttaattcttcgctcatcgctgcacctcgactttctaaaactttaaaacaaaaatctcttaaaacagaagatttttgctttgcattaaagacagtatagcatatgttttatcaaaaagacacggaatcttgaaatttgggttgacgaaatctggaaaaaatggcaagctacatataggttactgttcacaccaataaccactatagaagaaaataagcaaaggaagtttggattgatatgaataacggagtgagtaataataaagtgtatgtagtagggcataaaaatccagatacagattcgatttgttctgcgatcgcctatgctgatttgaaatctaagatcacgggagaagattatagtccaaggcgagcgggacagctcaatgaagagacgcagtatgtgctggatcattttcaggttgaggcaccgaagctgttgtcggacttaagagtgcaggtcaaagatgtagaactgcgtaacattgaaggaatcaagggaagtgtttccatcaagagtgcgtggaaatctatgaaagagctgaatatcaagacgcttcctgtgacaagggacagcaaactggaaggtctgattaccattggagatatcgcgacttcttacatggatgtgtatgacagcgggattctctccaaggcaaggacgcagtaccggaatattgcatcgaccattgatggaaccatcattgcaggaaatccacacagctatgtgttgaacggaaaagtcgggattcttgcatcaagccgaaagctgatgtcggaatttgtggaagaaaatgatctggtgatcttaggagaccgccaggaggcacagcagcatgccgtcgatttgaatgtgagctgtatggtggtgtgtaacggagcacgtgtaggagaagagattttaaaacaggcagaagaaaaagaaatcgtgatcatttcttctccgcatgatgcattcacggtcgcacgtttgatcaaccagagtattccggtgaagcagtttatgacaagagaggggatcgtttctttccagatggatgactatgtggatgatgtcaaagatgtgatggcacgcaggagattccgtgacttcccaatcctggatgaggcaggcaatttcctgggatttatttccagaagaagattgctcaacagccgcagaaaacaggtgatcctggtggatcacaatgaaaaaaatcaggcagtggacggtgtggaagaagcagaggttctggaaatcatcgatcaccaccgtctgagcagtattgaaacgatgggtccggtatttttccgaaatcagccggttggatgtaccgctacgatcgtttatcagatgtatcaggaagagggagtagaagtagagccggtgatcgcatcactcctttgctcggcgatcatttccgataccctgatgtttcggtctccgacttgtacaccgttggatgaaagatctgcgaggaaactggcagagatcgcagggattgatattgagaagctggcactggagatgtttaatgcaggaagtaatctgaaaggaaaaacagcagaagaaatctgtttcctggatttcaaacagtttacagtcaacgatatcaactttggagttggtcagatcagctctatgagcgcagaagagctgcgtgagatcaaaacagaagtatccgcttatctggaacaggcaagaaagacacaggggctggatatgatcttctttatgctgaccaatattgtcgcagaatcttcagaacttttatgcgccggaaacggagcaagagaaaagatgatctctgcgtttgatctgaaaggaaatccggagatgatcgagctaaagggtgtggtgtccagaaagaaacagcttgtaccgacactggtttcggcactgcagcagtagaaggagcaaaaaatgggaaaacaagtatggaaagccgggaatatggtatatccactcccggcagtgatggtgagtacggcggacaagtccggaaagagcaatattctgacgatcgcatggacgggcacgatttgcactaatccggcgatggtttatatttctgtccgtccggagcgatattcgtatcatatgttaaaagagagtggagaatttgttatcaatctgacaacggagcagcttgcaaaagcaaccgattattgcggagtacgttccggaaaggatgtggacaaatggaaagaggcacatctgacaccggcaaaagcagaaaagcttcagtatgcaccggtgatcgaagagtgtccggtcaatatcgaatgtaaagttacagaagtgaaaaaactgggaagccaccatatgtttctggcggaagttctggcagtacagattgatgagcagtatttgaatgaaaagaataagtttgagctgaataagacaggactgatggcatattcgcatggagagtatctgtctctcgggaagaagatcgggacatttgggtacagtgtgaaaaagaaaaagacgaaacataagaaaaagaaaaaataagaaaaagaacatccccgtggaagcaaagtatgaaaacttttgagttctgcggagatgttctttttagtcactgtttcccgaaatctattttataaagtctcaacaaatctgtcaaatgcagcgagtccttcgtctgtgcatttgtaaacaccggcatcttccaggacctgacagaagacctttccgacttcctgttccagaatatgcgtgacattttctgcgttgatctccggataggacggtaggaaactttcggtccagtccgcgtgctttgcaatggtctcattgcttctgatgtcttttttctcaagaatataagtctttaacagctccagctcatctttgagacgtgcagggagtacagcaagccccatgacttcgatcagaccgatattttcttttttgatatgatgcagttctttgtgaggatggtatactccgagcggatgttcctctgtggtaatgttgtttctcaaagtcagatccagctcatattttccatcccgcattctggcgatcggcgtgatcgtattgtgaggctgtccgtctgtttcagcaaaaatgaaagcagcgtcatctgtatatcctcgccatgcctgcagaatgtggtctgcaaggtcgatcactctggtcacatcctcagactgcagacggatcacagagagcggccattttacgatgcctgctgtgacatcttcaaagcccttgacagtaaactcctggatgacaggcgctttttccatggcaaaggtataatgtccgccctggaagtggtcatggcttaaaatagaaccgcctacgatcggaagatctgcattggatccgaggaaatagtgcgggaactgtttgataaaatcaaacagcttgacaaaggtctggcgctcgatcttcatcggagtatgttctccgttgaacacgatacagtgctcattgtagtagacataaggagaatactggaatccccacttgctgtcattgaccgtgatcggaatgatgcggtgattctctctggccgggtgatcgaggcgccctgcatacccctcgttctccatacagagctgacatttcgggtaagccgaaacagaagcattgcgcgcagcggcaatggctttcggatctttttccggtttggacagattgatggtaatatccagtgttccgtagtctgtgtctacattccatctgcggtcctttttgatccggtaccggcggatgtaatcgctgtcctgactgaacttgtaataaaactgagtggcggattccggagattcctgataatgtctccagaagtcgttctgaacctgagccggacgcggcagcaggcagttcatcagtctggtgtcgaacagatcacgatagccgatgctgtcttcaatgatgccgcgtgtaacagcctccttaaggagatcggcaaggatgtctttcagcacaagatctgtcagatcacaggagacatcttcccagttgtcttcatggaatacatccaaaagtaagtttgtagtgtaaatacgttcacattccggagtcagtccggtatcaatgccgtactgtaccagttttttgatagattcatataacatggataaattccttctttcttagagagtctccagtttctgtgcaccgcttccgatatcaacggtgtagaattcggcttcgtgtccgaccttttctttatatgcaggtccgatagtattgatgaaagtatcgacagcgtcattttttacgatacttacggtacatcccccgaatccgccgcctgtgatacgggaacctacaacacccggaatctgccatgcaagatcgaccaggatatcgatctcttcacaggatactgcgtaatcatctcttaaagagatgtgggactgattcatcagttcgccgaaacgctcgatgttgcctgcttttaatgcagataccgcttcgatggtacgctggttttcataaactgcgtgtttcgcacgtttctgctctacaggatctgtgatcacttctttgaatttttcaaaggtatcgatgtccagatcaccaagagcgttgatatccagttcttcctgaagaagagagagcgcatggctgcattcctgacgtctctggttgtactgagagtcaacaagactgtgttttactttactgtttgtgatgatgatcttggcgtcttccagttctaccggtgcatactcataggagagtgtgccggtatccaaaaagatcgcgcagtcttttttgcccatggcaactgcaaactgatccatgattccgcagttgcatccgttgaagttgttctcagagtactgtccgatcagtgcgatgtcggtcatgcttaaggcatcaaatccgcagagatcttttgcgattactccggtcagaacttccagggatgcggaagaggacaaaccggaaccgttcggaatatttccgtagatcacaagatccattccacagtctacagagtatcctttttcttttaatgcccagagaactccaagcggatagtttgcccagttgtattccggcttgttggtcagatcgtcaagagtggcagtgatcacaccgagatgatccagattcatagaatagagacgcaagatacggtcactgcgctttttggcgattccgtatgtaccaagtgtcagcgcacatggaaatacgtgtcctccattgtaatctgtgtgttctccgatcagattcacgcgtcccggagagaaataaaaaccggcatcttctgtgctgccgaaaagttcttcaaattttttcatcaaacgttctttcatgatgttgattcctcactttccatagagactgagtatttttacaagtttattataaaaatcagactgaaaaaagtctataaaaaatacgtgcatatatatggaattatgttgtataatagaggcgaagaacagatttggggaaaggaaagaagagcgtggaacagacatacaaatactcctataaagtaggagataatcttctgagttctctttccgtttataatgtgggatatcagcagtgcggaccggagcagcagtggggaccgggaatccgggatcattattgtatccaccatattatttcgggaaaggggacctatgtggcagataaaaaagtatatcatctgggagagggagacagttttattctgtatccggatacagaggtcaagtattatgcagatccggatgatccgtgggagtacgcatgggcaggatttatgggaaccgatgcggctgtgatggtacgggcaactgattttgcgagaaaacggccggtgatcggaagggataagattccgggagatttgatctggcggcagctggagcagatctatcaggtgagaggaacgacatatgaagcggcagcagctatgacaggagctctttataccatgctgtccgtgtttattcactatgcggaaaaagaagagaaaaaagacgacctccggcaggtttatgtggagcgggcaaaggattatattgcatccagttactcctatccgatcacggtggaggatgtagcggattatacggggatcagcagaagttatctctttcgtgcatttcaagcatatcagaagcagtccccaaaagaatatctgacggaatatcgaatccgtcaggcatgccatcttctcagggagaccgggctttccgttgcatccattgcgtattcggtaggatttgaagataatctgtatttttccaaggcattcaaaaagaagatgcagatgagtccgtcccagtaccggaagaatcacatgccataaattcaggaaaagccgcatatactggcaataacgagaaaaaaggattgtgagtcaattgcgttggaaatggatggggagagtgctgacagttacctatgtttttttgttgctggggattcagccgtttgtggatattccggcagagagggaagtacagtctgtgagtgcggatgtggagcagacagaagaaatcagaccaaagatcgcactgacttttgatgacggaccgagtgcagcgtatacagagaaacttctggacgggctgagagagcgggatgtgcatgctacgtttttcctgatcggagagaatattgaaaaaggcgacaatgctctgctggtgaggcagatggcaagagacggacatctgattggaaatcacacgtatcatcatgttcagctgacgaagatcaaagaagaggaagcgctcaaagagctggaggagacgaaccgtctgatcgagaagatcacgggaaatccggtagaatatgtaagacctccttttggagaatttccaaagggactttccgcaaaaatttccatgatcccggttatgtggacagtggatccgctggactggtctgtaaaagatacagagaaaattgtcagcaaagtagtgacgcaggcaaaagaaaatgatatgattctgttacatgactgttacggaacctctgtggaggcggccttgcagatcatagacagactgaaagaaaaaggatttgaatttgtgacggcagacagattgcttctgccttagaaatagaggagatatattagatgaatgaatattccagaacagaacttttgatcggagaagaggggatggggagacttaagcaggcgactgtcatggtatttggtgtcggcggcgtaggctctcactgtattgaggcacttgcaagaagcggtgtgggcaggctgatcctgatcgataatgacaaggtttctctgacgaacatcaaccggcagtcgatcgcatatcacagtaccatcggacggatgaagacggaagtgatgcgggagcggatccgggatatcaatccggagattgttgtaaagacttatgagacctttgtactgccggataatgtggaggaattgtttgaagaaactccggattatatcattgatgccatcgatacggtaacggcaaagctggcgatcgcggaactggcgcagagaagggagatcccactgatcagcagtatgggaaccggcaacaagctgcatccggaactgtttgaaatcacagacctgtcaaagaccagtatgtgtccgctctgtaaagtgatgcggcgggaactgaaaacaagagggattcgacatctgaaagtattgtattcaccggaaaaaccagtcgatacgtccggacgtgagaccggagaggacaaaggagcgcgccgtgtacttccgggcagcatttcctttgtaccgccggtggcagggcttttgatcgcaggagaggtcatccgcgagatcagcggtgtctgaaatatacagaagccggcaggaggaagagtatggatttatttgattatatgagagaaaaaacacaggagcaggaatctcccctggcatccagaatgcgtccgcagacgctggaagaagtggtaggacagcagcatatcatagggaaagacaagcttttgtatcgtgcgatcaaggcggataagctgggatcgatcattttttacggacctccgggaacaggaaagacgactcttgcaaaggtgattgcacatacgaccagtgcggagttcaagcagatcaatgccacagtagcgggaaaaaaagatatggagcaggtggtaaatgaagcgaaagaactgctcggaatgtatcgcaaaaaaacgatcctgtttattgacgagatccacagatttaacaagggacagcaggactatctgcttccattcgtggaggacggtaccattaccttgatcggagcaacaacggaaaatccgtattttgaagtcaatggtgcgttgatttcccgatccagtgtatttgaattaaaatctctggagaaagaagatattcgcactctgttgaaacgtgcggtttatgatgagaataagggaatgggaagttttcatgcagaaatcgacgaggatgcgctggagtttctggcagatgtatccggcggagatgcaagaagtgcgctcaatgccattgagcttggtgttttgacgacagagcgcagtgaggacggcaagattcatattacgctggatgtggcgtcagaatgtattcaaaagcgggttgtgcgctatgataagggcggagacaatcattatgatacgatttccgcatttatcaaaagtatgcggggatctgatcccgatgctgcagtgtattatctggcaaaaatgctgtatgcaggagaagatatcaaatttattgcccgcaggatcatgatctgtgcagcagaggatgtgggaaatgcagatcctgtggcactcacggtggctgtctccgcagcacaggcagtggagcggatcgggatgccggaggcacagattattttatcgcaggcagtactgtatgtggcgactgcgccaaaaagtaattcggcggtcaatgcgatttttgcggcaaatgaaaatgtacggcaatataagaccacggttccgtcacatctgcaggatgcacattacaagggttctaaaaatctgggacatgggatcggatataaatatgcacatgactatccgaatcattatgtagaacagcagtatcttccggatgaaatcaaaaacgccaggttctacgaacccggcgatcttggctatgaaaaacagatcaaagagcatttacaaaagcttcgtgagcagtagggtatagatatcctggctctgggaagcccagtttccggcaatggcttcagcttctgattcggtaggaaccgtgagtttcagatcgatcaggctgaagccgttttctacaatctgacagcagacctcatattcatggttggtgttcagatagtagtcggacttgacagaaacctcttctttcagatcatacttcttttctttgagaaattcatcaatatcccgctgaatggcaggggaaatcttgtttttaaagtattggatggtgtccagaccgttgtctgtcagatgatacagagtacggttgtgggtcgtttccacgcggagcagtccggaatgttccatttcagcgagtgtttcctgaagcttaaaataagttgtgtattctttttccagaataaattcggaaatctgtgaagttgtcaatggaaaatccactttatccagcatgtacaatacgatcagtttatacagtgtataagtttcagacatagtactcctttccctgccagatatcctgttctttcaggtggctgtgaagctgatttaatacggttcttttattgcttgtccaaagaggggcgatcaaaaggtctttcggtccgtctccggtcaggcgatgaatcacgatctctggattcaaatgtgcgatacaggtgccgagaaactgaatataatcctgcatatcgggaatataaaaggggtgtttttcatagtcggctgcaaggtctgtgtgggttaagacatggagcagctgcagtttgatcccctgaatatccatatgattgagatagtggatcgtatccagcatatcgtctttcgtctcacccggcagatacagaatcgtatgaacaattaccgtgatgccgatggcgcgaagttcttttactgcctgttcaaatactgaaagctcatatccgcgccggatgtaggcgctggtttcgggatggatggtctgcaatcccagctccacccagacaggtttgatctggttgatctcatcgagcagtgcgaggacatctgctcccagacaatccggtctggtggcaatggagagaatcttcacctccggatcagcaatggcttccatataaagggcacgaagagtttccaccggcgcataagtgttcgtaaatgcctgaaaataggcaatataagagtgcaccggacgtttggaagaaatatctgcttttccctgtcttatctgttcggcgatggaaagtctggcagagccggcaaaatcgccggaaccctgggaactgcagaagatgcagccccctgttccgacatgaccgtcacggtttggacaggtcatgccgccgtttaaggcgattttgtaaactttttctttgaacatctgttttaattcataatccagagagtggtatcttttttcaccccagcgcatgatcagatcagttcctttaccgctttgctgactacgtcggcaacacgggaatcaaatgcttccggaagaatattgttttcattgagttcttcatcagaaacaagacttgcaatggcattggctgtagcaagtttcatctcttccgtgatctgtgtggcgcgcccttccagcgctcctttgaaaattcccgggaaagcgacaacgttattgacctgatttggaaaatcagagcgtccggttccaacaacgcgtgcacccgcttcttttgcaagatccggcatgatctccggcaccggatttgccatggcaaagagtatggcgtcggaattcatggatgcgaccatctcttttgtgacgataccaggagcagagacaccgacgaaaatgtcagctccacacatggcatctgccagagaaccggttttgttttccaggtttgtcacttctgtcatctttttctgcatccagttcaggttcggtgatgcgctgctgatgattccgttgatatcacacattgtaatatgttcaaatccgtaggtcagaagcagttttgtgatggcaactccggcagaacctgcaccgtttacgacaacgcggcagtcttctttcttctttccggtaactttgagagcattgatgataccggcaaggacaacaatggcagttccgtgctggtcatcatgaaagacagggatgtccagaagctcttttaagcgctcttcgatctcaaaacaacgcggtgcagaaatatcttccagattgattccgccaaatgcaggtgcaatgttgacaacggttttgataatctcttctgtatcctgcgtgtcaaggcagatcggaacggcattgacaccgccgaattctttgaaaagaactgcttttccttccataacaggcatggctgccagggctccgatattgccaagtcccagaaccgcacttccgtcagaaactacggctacggtgttggatttgattgtatatttgtaagcagcttccggatcttttgcgatcaccttacaaggctcggctacacccggtgtgtaagcaattgccagatcttctctggaattgacatgtgctttggctgcagtttccagttttccgttccactgttcgtgcatctgtaatgctttttcgctgtttgtcatagtttttacctcgctgattcttagatttcctgtgcagaacacattcttccataatcataacactgttaaggaaacggtgcaagatttcaaaaaaaactttcttttttggaaaagatgcgctataataaaaaaacaaactttacaaaattgttcaagttaagtcagttcagacaaagatccccaagagattgaaagtaaaatgaataaatgaaaagtgaattttgagaaaggcaggtaattatgacaagagaaaaatatgaatcgttaccgctcgctacattgcgggaattggcaaaggcaagaaagatgaaaggaatttccactttaaaaaaaggagatctgatcgaagcaatgctggcgcaggatgacaaagagaaacaggaagaggccaacgcacaggcaaaagaagaagtgaaagagaaaaaagagggaacggatatcgaacagcttgacagcgggcgtactgcaaacggaattttagaggtgcttccggacgggtatggatttatccggtgtgaaaactatcttccgggtgaaaatgatgtatatgtgtcaccatcccagatccggcgcttcaatctgaagacgggagatatcatcacaggaaatacgaggattaaaacacagtctgaaaaattcagtgcacttttgtacgtgtcgaccatcaatgggctgcgtccggcagaagcagtaaagcgccataattttgaggatctgactccgatcttcccgaatcagaggatttcgctggaaacaccgggagcaacgactgcaatgcggatcgtagatctgctctctccgattggaaaaggacagagaggaatgatcgtatcacctccgaaagccggtaagacaacccttctcaaagaagtggcactctctgttcagaaaagagagccggacatgcatcttctgatccttctgatcgatgaacgtccggaggaggtaaccgatatcagggaagcaatcgcgggaccaaatgtggaagtaatctactctacatttgacgagctgccggaacatcataagagagtatccgagatggtgatcgagcgtgcgaagcgtctggtagagcatggaaaagatgttatgatcctgttagacagtatcacccgtctggcaagagcgtacaacctgactgtgccgccgtcaggaagaaccttgtccggcggtcttgatccggctgcactgcatatgccgaagcggtttttcggtgcggcaagaaatatgcgtgagggcggaagccttacgatcctggcaacagcacttgtggaaacgggaagcaagatggacgatgttgtttatgaagaatttaagggaaccggtaacatggagctggtgctggatcgaaaacttcaggagaagagagtgttcccggcgatcgatattccgaaatccggaaccagaagagaagatctgctgcttaataaagaagagcaggatgcagtttatatcatccgaaaggcaatgaatggcatgaaagcagatgaagcagtggacaatctgctgaatatgttctcgcggacaagaacgaatgccgagctggtgcagacagtaattcgtcaaaaatttatctaaaatcactcttgtacgaaagaaaatacttgattctgactcacaaaacagatattatattctggttggtgtcctgcaaaatgtgacaaaatgcgggatgttcaagaatacttgaatgatgagaaactgaggaggaaatcaagatgtttcgtgaagaaattgacatggcaggaaatgcagccaaaaagaaaatccagttcctgcggcagcagacaggggcatacttcatctcagcgatgctggcgggaatgtttgttggatttggcgttcttctggcatttacagcaggtggaatgttaaaagaaggcggcgtgccgggtgtgaagtttattatgggaggctgctttggcgttgccctcagtctggttttgatggcaggagcagagctctttacaggaagtaattttgtgatggctgttgggatgtttcagaagaaagtgacatttcaggattctgtgacagtgtgggtgacctgctggctcgggaatctggcaggctctgttctggtagcaggaatgtactctctgacaggactctgtacaggaagcgtacaggcgatcatggcagatactacagcgatgaagatgtctgtagaaccgctgccgctgtttatgcgggcaatactctgtaatatcttagtatgtctggcagtatggtgcggaattaaaatgaaaacagaaacaggaaagctgattatgacgttctggtgtctgatcacattttttacagcaggatttgaacatagtgtggcaaatatgtctctgatgatgatcggtcttttgaatccggcacagtacgatatcagcatcggcggatatgcctataatctggctgttgtaaccattggaaatatggtgggcggtattttgttcctggcagttccgtatttcctgattggaaaagaaaaagcagcaaaaaattaaaaattgaaaaaagataaagttttcttattgaaaaaacttgcaaaacagaaaaaactatgctattatggtgtagctgtttagagattagaataatattttaaaatagagaggtgaaaatcatgagagaaggaatccatccagagtaccatcaggcaacagtaacttgtaactgtggaaacacatttgtaacaggatctacaaacgagagcatccacgtagaaatctgctccaaatgccatccattctatacaggtcagcagaaagctgctcaggctcgcggacgtgttgacaagttcaacaagaaatatggtattaaataggaaaagactatggcaggctgaggtgaatgtatctcagcctgtttttcgtatacagaaaaacaggagggcagtatgaagtcatcaaatataggcgggcaggcagtgctggaaggcattatgatgaaaaataagacacggtatgcagtggctgtcagaaaaccggatcagcagatcgaggtttgcgtcaaagaatacaaaggcatcatcccctggcagggtgtatataaagtgccgtttatccggggaatttttaattttatcgattcgctcgtgctgggaatgaaaactctgacctattcggccagctttttcgaggaagaagagggggaagttcttactgaacaagaggcgcaaaagcaggaaaaacaagaaaagatcatgatgggctttacggtggcattttctatcgtggcagcggtcgggatttttatggtcctcccgtatttcctgagtgatcttttgaagaattatatttcgtccagaggggtacttactgcgctggaaggtgtgatccgaatggtagtctttcttttgtatattggtttgatctccagaatgaaggatattcagaggacatttatgtatcatggggcagagcacaagtgtatcaactgtattgaacacggaatgccgcttacggttgaaaatgtaagaaaaagctccagacagcacaagcgctgcgggacaagttttctcttttttgttatgatcgtcagtattattttctgtttttttatcacagcagaatcgcaggtcttaaaagtaggaatccggattgcgctgatgccggtgatcgcgggagtttcttatgagatcatccgtctggcgggaagcagtgaaaatcctgtggtcaatgttttgagcaaaccgggaatgtgggtgcagatgatgacgacaaaagaaccggatgacagtatgatcgaagtggcaatccgggcagtggaagaggtattcgactggaaggcgtatctggaagaaaatttttctaagacagaggaatcttttggggaaaacaagtgtacacaggaggaatgtgccttatgacctggaaggaagcctggaaaagaggagcgcagagcttacaaaaagccggcgtggaagagtatgatctggacgcctggtatttattggaacatgtgaccggaattacaaaggcttcttattatatggagccggagcacccgatgcacgatcaggaggagcgagaatatctggagctgatcagaaagagaagtacacggattccgcttcagcatctgacaggtgttcaggagtttatgggactggaatttctggtcaacgaacacgtgctgatcccgagacaggatacagaagtactggtggaaacagcgttggatgtgtgcaaacaggaacagatgggagaaatccgactcctggatatgtgcaccggttccggatgtatccttctgagtctcctgcatgaattaaagccccgaacagtgacaggtgttggcgtggatctttcaaaagaagcgctgtgtgtggcagagaaaaatgctgagaagctgaagatcgatgcagagtttctggagagtgacctgtttgaaaatgtaaagggaacttatgatgtggttgtatccaatccgccgtatatcagaacttctgtgatagaaacactgcaggaggaagtaaaagaccatgatccgtatcttgcgctggacggaaaagaagatggactgtatttttaccggaggatcattgaacaggcacctgcatacctgaaaaagaagggatggcttttgtttgaaatcggttctgatcagggtgaggatgtcaaaaatctgatggaacaggcaggatatactggcgtaagcgtgaaaaaggatttggcaggtcttgaccgggtggtctttggcgtgtatgataggtaggatgagtaatagaaaggacgaggaaaaagatgtttgataaattggaggatttattgatccgctatgaggaagtcatgggcgagcttcaggagcccggtgttgcaaatgatccggagcgtttccgcaagctgatgaaagaacaaagtgatcttgctccgatcgtagaggcatataatgagtataaacagtgtaagcagaatatagaagacagcctgatgatgctggaagaagaatctgatgaagagatgcgcgagctggcaaaggaagagctgaatgagtccaaagccagagtggaagagctggagcaggaattaaagatcctgttgcttccaaaggacccgaatgatgataaaaacgtaatcgtggagatccgtgccggtgccggtggtgacgaggctgcactttttgctgcggaagtatacaggatgtatctacattatgcagagagccgcagatggagaacagagatgatctccctcaatgaaaatggaatcggcggattcaaagagtgtgtatttatgatcacagggcagggagcatactcccgtatgaaatacgagagtggtgtacaccgtgtacagcgtgtgccggaaacagagagcggcggacggatccatacctctacgatcacagtggcagtgatgccggaggcagaggatgtggacgttgtgatcgatgaaaaagatatccgtatagacgtcatgagggcatccggaaacggaggacaatgtgtaaacacaacagactctgcagtgcgtctgacccactatccgacaggaattgtgatctacagtcagacagaaaaatcacagttgcagaataaagaaaaagcattccgtctgctccgttccaaactgtatgaactggaactggaaaaacagcagtccgcagaagctgaggcgagaagaagccagattggaacaggagatcgttctgagaagatcagaacttacaacttcccgcagggacgtgtgacagatcacaggatcaagctgacacttcataaactggatacgattttgaatggagacctggatgaagtaattgacagtctgatcgcagcggatcaaagcgcaaaattggccaatatgaatgaatagaatataaaaaagaaatagaaatcggtatacagaatgaaaatgtagccgatttctgtttttttctctacggtaatactatttttggcggacttatcgtccattgtgtcaactgtaatttttttcaataacagtttccactacatcatcaaaaaccaatctgttaaaaagaaactggagaacaatgaaactttgtcagagaaggaacttatgctgcttatcattcttccacttgcaaagaaaggcaaagaagtgaagcagaaagtgattgagcaagtagtagatttggcgaaacagattgaagatgaaaacacacaggtatttgttatcactggtattttggtgagcagtgataaatttatagacagagactatgcgaagtcagtaaggaggtatttgagcatgacgaaagtattccagagtttagaagaagagaaattagaggctgtaaatattgccaaacgaaatgaacggcatgatactaatgtagagattgctaagagcctgcttcgtgacggaatagatacagtagtcattatgagagcaacaggcttttcaaaagaacagattgaagaaatccgtaacaatatgttgacaacaaaatagggtatcagaacaggctgtcatttaccgagaggtatctggcagtctttttgtatacttagcttttggaaggtgtattggggtggctctgtgtttgtccagaccttgatattgtattcgtggtgtatgattggtatccaagtaagaatgaaaagttattatatcaaacagcttttcatgtgaagaatggtgcagttaaagtggtaggtgcttctgaagctgagaagctgtacaaagagtatcacgaaaagtatccgtatgacatggaagaagttgaacgttggctacgagacttgtatgaaaactaatactttgataggggatatccgaggcaggacttgttcctgccgatatttttatgattcgctcagaccgtcaagatatgcttgaaggcgttcctgcttattcttggttaaagccctgtatttgttaatcagttcatcctcttctggtgtcagattttcattttgcagtggatataattcaaagtcaaaaaaatctgataatgtgatatttaatcctttgcaaagtttttcaagagttgcgattgtagggcaggtacgtctgtgaatgatgttgttcaaactggagtaggggatatccgcttctttcgccagacggtacatagaaaaatgctttgttttacggatatagccaatacgctcaaatactttatcttcaatcatgttattactcactttcgttaggatattatcagtataataaaaaagagtaataaaaatcagatattaaaatgagttatatattgactaatatatcagaagtgagctatactctttagagaaacatgaccagatgctgaaaaaaagaaaaagacatagcgtattatcagcaatgcctttttaacaagaagtttgattattggttttattctggttccatgttgtccaatgcgcattcgatgcattgaataactactttgttaaaagaaagattgtttttattagcgagtgcttgaactttgtctatgagatcctttggtaatcgaagtgacttgttttcgtactcagtagcttctttttttaatttaaacatacaataccacctttcatagtatctattgtattttagaagtcaatgtgttaatatatttaagatataatatattttatattataaaaaataagaaaaaacatgagaaggaaaagtttatggaaaaacctgatgcttgcaacagcactgacagttgtattggggactgcaccagtgacggcgtttgcagcagatgtagattcaacagtgacagaggcagagcagacaacaccgcaggcagacacaactgtcaaggaagaagttgctgaaccagaagtaaaggctattacggtagacgtaacaacaagttctacgacattcgatggtactcaggatatcgtaatcacatacacagtaaatggtgtgcaggatggttttgaaccatatcaggatattccgtggtttgatgggcatccacaggatgttatcgaggagaatgtttcagatacggtatacaaatttacaattacaaaggctgcacagcaggcttgtatagagagaaataatgcaactgatggacagatatttgtattcgattctaagtattctacaggttcagtagatttcccaacagtcacactgacatacacaacaggagataacggcggagacaacggaaatagcaacacaaacaaccagacaacagcaaaaccaacaacaacttctccaaagacaggagatgcaacagctacacttccagtagcaggaacaggtcttgcttcacttggagttgctctggctactgtattgagaaagcgtaaataatttcaataaaatcttaacgaagacctttactacaaacatgtggtgaaggttttcttcattttcttcagattctgtaattcctcaagattagaaatttccttcagattcaatttcgttttattgatatgattttaaactattataaataaaaagtggaaagaaggtgttacatgatgtgaaagacaggagacgtagccaagcagttgagaatatcagagaatacagtgagagactatgtcgatcgaggctggctcgcctgcacgattactcctacaggcagacgtcttttcgatgaagaggacattgaagtattcaagaagaactattacagaaagaagacaggagaaaatgagcaatgagatataaaagagtcatccttttttgcgtttcccaaaagaatatgctatactaacaagatatcagcgacatactatggaataaacaaatttagaaagaggatattatggaagaaattatttttagaagaccggcactggaagatcaggagctgatccgttcttattttgacaaggcaccaagtagaagctgtgagaggacatttgtagatgtgtttttgtgggctcgccactatgatgtgacatttgcggtcatagaggatacactggtgttccgtgacggaggggcagatccgggctttgcttatcccgcaggggaagaggtttgtgtgaaaagagcgctggaatttttgatgaagtatagtgaagaacaggagtatccgtttaaactgtacaacgtgacagcggagaattttgcacagatagaagcgtggtttccgggtgagtttgaattagaatatgacagagatcaggcagattatgtgtatgagtctgaaaaactggcgactctggcaggaaagaagctgcacggaaagcgaaatcatattaacaaatttcagaagctttatccaaactggagctatgaaccattgaatgatgaaaatatggaagagtgctttcagatggcgttgaagtggagaaaccagaacggatgtgaggaagatccgggcaaaaatgcggagatgtgtgttgcattaaatgcactgagactttataaagaactggatcagcgaggcggagtgcttcgtgtggatggacaggttgttgcatttacgattggagaagagctctgcgaagatacatttgtcgtgcatattgaaaaggcgtttgctgatattgacggagcatatccgatgatcaatcagcagttcgtacagcatgaatgtaccgggtatcagtatgtgaaccgggaggatgatgccggttcagaaggcttgagaaaagcaaaattatcatatcgtccggcatttctggtagaaaaaggaatcctgacgagaaagaatgcgtaggtcagtaaaagaaaacggggtggtatcatgatttcaaagaaaatggagcaaatggtggcgaacagttcagcaatccgggcaatgttcgaagaaggaaacaaaatggcagaaaaatacggggcggagaatgtctatgatttcagcctcggaaatcctaatgtgccggcgccgaaggcagtgaaagaagcaatcgtttccattctggagtcagaggatcctgtacgtctgcacggctacacaaacagcaatgccgggtatgcggatgtaagacaggcagttgcggattcgcttaacgcgcgttttggcacgggattttcagaacacaatattacgatgactgtgggagctgcaggtggattgaatgtcattttaaaagcgctgttgaatccgggagatgaggtgattacatttgctccgtattttggagagtacagaagctacgtcagcaattttgacggagtactggtagagatttccccggatacagagacatttcagccaagactgaaagaatttgaggaaaaaatcacggaaaagacaaaagctgtgattgtgaatacaccgaacaatccgaccggagtgatctattctgaagagaccatacaaaggatggcagcgattctgaatgcaaaacagcaggaatttggaacggatatctatctgatctcagatgagccgtatcgtgaacttgcctatgacaaaacagaagtaccgtatctgacaaaatattacgacaatacggtggtcggttattcattcagtaaatcattgtctcttccgggagagcggatcggatatctggtaattccggatgaggcggcggacagtgaaatgctgatacgggcagcgaacgtggcgacccggatcctcggattcgtaaatgcaccgacactgcagcagaagcttgtaaaatactgcctggaagaaaaaacggacatttcgtattatgacaggaatcgagaggtattgtatcaggggcttcgcaatctgggattttcgtgtatcaagccggaaggagcgttttatctgttcatgaagtctccggttgcagatgaaaagcagttctgtgaagcagcgaagaagtatcatattctgattgttccgggaagctcatttgcctgcccgggatatgtcagactggcatattgtgtatcttatgagacgatcataaattctctgccggaatttgcaaagctggcagcagagtacaaggagggtaaggatgaatcaggcaattttagataagattcgaaaagtagagccgtatgtgcccggagaacagccgaaagagcgtgtgatcaagctcaataccaatgagaatccgtatccgccggcgccgggagttgcgaaggtattaaaagagatggatgcggacagtcttcgcctgtatccggatccggcagcagatatcctggtggaagaactgtccaggttttatcgtgtcgggaaggagcagatttttgtaggcgttggctcagatgatgtgctttcgatgtgctttctgaccttttttaactcggacaaaccgattctgtttccggatattacttattctttttataaagtatgggcgcagttatacagaatcccgtatcgctgcccgaagctggatgagcagttttgtctggtaaaagaagattactatgcagagaacggagggattattttcccgaatccgaatgcaccgacagcgatttatgaggatctggatttcatcgaggatattttgcgtcacaatccggactctgtagtgatcgtggacgaggcttacattgattttgcaggaaaatctgcgctggagctgattgaccgctatgagaatcttttggttgtgcagacgttttcaaagtccagatccatggcagggatgcggatcggatttgcaatcggaaatccggagctgatcggatatctaaacgatgccaaatattcattcaactcctacacaatgaatcaggcggctctgctctgcggagcgcagagtgtgaaggaggaaacgtatttttacgaatgtgtagaccggatcgtagagacaagagaatgggcaaaacaagagcttgcagagcttggatttacatatacagattccagagcgaactttctgtttgtcacacatccggaatttgaggcatctgaactgtttgaggccctaaaacgggagaaaatctatgtgagatactggaacagcgagagaatccgtcagtatttgagaattacagtaggcaccagacaagaaatggagagtctgctggaatttttgaaaaaatatagtaaggaaagaggaaaaggtaaaaaagaatgttaaaacagattttacagggaatggtagttggaattgcaaatatcattccgggtgtcagtggtggaacaatgatggtggcaatgggattatatgatcatctgatccatgcaatcacacatttaaaaagtgaattcaaaaaaagtatgaaacttctgattccgatctttttaggagccggaatcgccattgttgtgttgtcccgtctttttgaatatttactggaggtgtatccgattccgaccaattttgcgttttgcggtttgatcgccggaagccttccgtttatttttaagaaagtcaaaggacattctgtgacagtcggaaagatcattccgtttttgatcttctttggaatcgtgatcacaatggcacttttaggagagacaaatggtgctgccgcggatgtgagctttggggttgtcaatgtgatcaaattattcctggtaggtgttgttgcggctgcgacaatggtagtgccgggggtgagcggatcgatgatgctgatgctgctcggatattatgatacgattttgaaaacgatcaatcagtttatcgatgcactgatcgcatttgatgtccagaagatcctggtgcagtgtggaattctgattccgtttggaatcggcgttgtgatcggaatctttctgattgcaaagctgatcgagtttatctttatgaaagcggaaatccatgcatattatgcgatcatcggtctgattctggcatctccgatcgcaattttgttaaaagtagactggagcggactctctgtattgacgatagtagtcggaatcgtgacattttgtctcggatggtttacagcaagtaagcttggcggagaataaaaattaaaaaagaaagggaagaatgcgcaatttattttggcatccttcccttttttgtatcctgatcttgtagaaattcggtgtattcgaaaagctgttgtctggaatccgaagacagattcagatacgcacagagcagacggtattcggaagaatccggcggaacagaaataccgttggtttcagagcctgtgagcagataatcaaccgatacgtgaaaatagtctgcaatctgaagcaaacgttcgtagtccggctgctttccttttgtctcatatcccacgattgtggagcgggtaagttttaagtgagaagccagctggttctgggtgacatgattttgttctcttaattcttttaatgtagatgaaaacttcatatgtacctcctgaataatgtgtattttaacagtttgcttccatttattgacaaaaagtgacaaatatcaacaaaatgaataaaaaagtgacgaaaagacactacttgacagaacggggaaacacattgacacctccatggaaaatccgtataatgaaattgaagaaaagaaaggatgacagaaagtatgtttgcaaaaaatgatgaagaaaaaagaaatcgtctttggaagactgcgatatcagtatccacactggttattattctgatcgcagtattctttgtgataaaattatttacatcgaatcctctggaaggaacgtgggtacgggaggacagtgatctgatgctgacgatctcgggagaggatcaggcggttgtgcagtggccggaggagtttgaatcagcagatgtaaaagtttcggtagagtgcagcgtagatacagatatgaaagtgatcactctgcatacagatgctgccgaattgcagaaagcagcagaggagtccggtgtagatacagccaaactggatactgcactgcagaagctggacggtacgtatgaatataatctggagcagaaagaactgacattgactgaacgggaatatggcagccagatgacatttacaaaaaaataaggaacagacaaagacggtggatgcggggatttttaaaaaatttctcatccgccgtaaatttaacattatttttgggagaacaggaggaaaaaatggagatgttgagaaatcgaacaaaagaaatacggattggaaatgtatggatcggaggaagtcatccggtagcgatccagtctatgacaaatacaaagacagaggatgtggcggcgacagtggagcagattctcgctctggaggaagcgggatgtgagattatccgctgcgcagtgcctacgatggaagctgcgcttgcgttgaaagagatcaaaaagcagattcatattccactcgttgcagatattcattttgattaccggcttgccattgctgccattgaaaacggggcggataagatccgtatcaatccgggcaacatcggttccaaagagcgtgtgcaggcagtagtcgagaaggcgaaagagtacaatgtgccgatccgagtgggcgtcaacagtggttctctggagaaaaatctgctggaaaaatacggtggtgtgacggctgagggaatcgtggagagtgcgttggataaagtacgcatgatcgaggaaatggggtatgacaatctggtggtgagcatcaaatcttcagatgttctgatgtgcgtcagagctcatgaactgattgcagaaaaatgccagtatcctttgcatgttggaattacagagtccggaacggtttactctggaaatatcaagtcttccgtaggacttgggatcattctgcatgaggggatcggaaataccatccgggtctctctgaccggagatccgacagaagaaatccgtaccgcaaagctgatcttaaaaacactgggaatgcgaaaaggcgggatcgaagtagtttcctgcccgacctgcggacgtaccaggatcgatctgatcgctcttgcaaatcaggtagaaaagatggtgcaggacattgatctggatatcaaagtggcagtgatgggatgtgtggtcaatggccccggagaagcaaaagaagcggatatcggaattgcaggcggtatcggagaagggcttctcatcaaaaaaggtgagatcgtaagaaaagtaaaagaagaggaattgttagaaacactgcgtcaggagttattaaattggaacaggtaaagaacgaaaagacattttttgaggttttcccgaccttgcgggcagatggagaattgaaaatgttgtttcaggatgtggaagtgaaaaagatcacgaccaattctacacgagaatttttgcatattcatatggtcagtcatcatctgatcccgaaaaaggtgatctggaaaatggagcagagtatcaaggagcagctgtttggaacggcatcggtggcaatccagatcgaagagttttatgtgttatcggagctgtatacactggagacgctgcttgcagaatacaaggagagtcttgttctggaactggaaaagaaaagtgtactggcagccagtatgtttgaacaggcagagctgcatttcgaaggggaaaaaatcgtatgtgtagagcttttagacagcattgtttcggaaggaaagaaagaatatatcgtgacgcttctggaagaggtactgagccgcagatttgggatgcaggcggaaatccgtgtactttaccgggagcaggaggaaaatcagagccgggaatatgatgagcagcgcatccagcaggaaatcaatgcgatctttgagagaagagcaagacaaaagggagagattttgcagaagccgatttcagagaggcagacggactctgcaaaagagaagaaaacagcagattccggcaagaaggagagtgcaaaatccggattcaaaaaaggagaattcagaaagaaagagttccagcgtccgcttaagcagggggatgatccgtctcttgtttatggtaagaattttgaagatgaacctctgactctggatcaggttgtcacagagatgggtgagatcactattcatggtaagatcatcagctttgatacaagggagatccgcaacgagaaaacgattctgatgttttctgtgacagattttacagacacgattacagttaagatgtttgtaaggaacgatcagctggcggagcttttgggagatattaaaaaaggggcctttgtgaagatcaaaggggtgacgaccattgacaaattcgatggggagctgaccataggttctgttaccggaattaagaagattggagactttactgtttcgagagaagatttaagcccggtcaaacgggtggagcttcattgtcatacaaaaatgagtgatatggacggtgtgtccgaggtgaagagcatcgtaaaaagagctcatgactgggggcatccggcaatcgcgattaccgatcacggagttgcccagtcgttcccggatgccaatcattatatcgagacgcttgataaggatgatccgtttaaagtaatctacggagtggaaggatatgtggttgatgatctgacagagattgcggtcaatgccggggagcagacactggatgacacatatattgtgttcgatatcgagacgacaggtttttctgcaatcaaggataagattatagagatcggggcagtgaaggtaaaagatggtgctatcgtagaaaaattcagtacatttgttaatccaaaacgtccgattccgtttgaaattacacagctgaccagtatcacggatgagatggtcttagatgcaccggatattgagagcgtactgcctgagtttctggaatttgtgggagatggtgttcttgtggcgcacaatgccgggtttgatgtgggctttatcgagcagaattgcagatatcaggagatcgaaccggattttgtctcagtagatacggtggcgcttgcgagagtgctgctgccgaccttatcaaaatacaagctgaatatcgtggcaaaggcactgggaatctctctggaaaatcatcaccgtgcggtggatgatgcaggagcaacggcggaaattttcgtgaagtttgtagagatgctcaaagacaggaatatcacaacgctcaaagagatgaaccggtttggggatatgaatgtgaatgccatccggaagctgccaacacaccatatcatcattctggtaaaaaacgatatcggaagattcaatctgtaccagctgatctcagcttcgcatctgacatattttgcgagaagaccgaggattccgaaaagtcttttgaatcagcacagagagggtctgatcataggaagtgcctgtgaggccggtgagttgtatcaggcgatcctgaaccagaaatctccgcaggctgttgcaaggctggcagaattttatgattattatgaaatccaacctcttggaaacaaccagtttatgatcgacagtgaccggtatggagatatcaattccaaagaggatttgcaaaatatcaaccgggagatcgtcagtcttggggaaaaattcaaaaagcctgtcgtggcgacctgtgatgtacattttctggatccggaggacgaagtgtaccggaggatcatcatggcaggaaaaggattcggagatgcggacacccagcctcctttatatcttcggacaacggatgagatgctggaagagttctcttatcttggttccgcgaaagccagggagatcgtcatcgacaatccgaacaggatctgcgatatggtggaaaagatctctccggtcaatccgaacaaatgccctccggtcattgaaaattctgagcagaatctaagagatatctgttacaacaaagcgcatgagatttatggagaaaatctgcccgaaccggtgcagaccaggctggagagagaactgacatccatcatttccaatggatattcggtgatgtatatcattgcgcagaagctggtgtggaaatccaatgatgacggttatctggtaggttcccgaggttctgtaggatcctcctttgttgcgactatggcgggaatcacagaggtaaatcctttgagtccgcactattattgcagtgagtgtcattacagtgactttgattccgaagaagtccgcgcatttgcgggtggatgcgggtttgacatgccggataaaaactgtccgaactgtggggccaaactggtaaaagccggatttgacattccatttgagaccttccttggatttaaaggagacaaggagccggatatcgacctgaacttttccggagactaccaggcaaaagcgcaccggtatacagaggtcatcttcggagaagggcatacgttcaaagccggaaccattggtacactggcagataagacggcatttggatatgtgaagaattattatgaggagcgcggacatcggaagcggaaatgtgagattgaccggattttacagggatgtacggggatcagaaggagtacgggacagcatccgggaggaatcgtggtattgcctcacgggcatgacatcaatgagtttacaccggtacagcacccggcaaatgatatgactacggatattattacgactcattttgattaccattccattgaccacaaccttttgaaacttgacattctggggcatgatgatccgaccatgatccgtactctggaggagtatattacatctgatgcgctggagaatgagtacaatgacgagaatccgtttgatgcgacaaagattccgctggatgataaaaaagtactttctctgtttcacgataccagtgcattgggaatcaaacctgaggatattgacggctgtaatctgggatgtcttggaatcccggaattcggtacggatttcgtaatccagatggtacaggatgccaatccgcagtctctttctgatctgatccgtatttccggtctgtcccacggaacgaatgtgtggcttggaaatgcacaggttctgatcgaatcgggaaaggcaacgatttccactgcaatctgtacccgagacgatatcatgatctatctgatcaatcagggtgtggacagcgcgctgtcatttacgatcatggagagtgtgcgaaaaggaaaaggactaaagccggaatgggaagaaaccatgaaggaaaaggacgtgccggactggtatatctggtcctgtaagcagatcagctatatgttcccgaaggcacatgcggcggcatatgttatgatggcatatcgaatcgcttattgtaagatcaattatccgctggcttattacggtgcgtattttgggattcgtgccaatgcattttcgtatgaactgatgtgtcagggaaaggataaactgaattactacatgaaagattataagcgccggtcagattctctgagcaacaaggaacaggatgtactgaaggatatgaagattgtacaggaaatgtacgcaagaggttatgagttcctgcctttggatatttacaaggcgaaggcaacaaaattccagatcattgacggaaaactgatgcctcccctctccagtatcgaagggatgggagaaaaggcggcagaggctgtggaggaggctgcaaaagacggaccgtatctgtctttggatgatttcagacagcgaacaaaggtgagcaagaccgtgatcgaatttatgtcagacctggggttgtttggaaatcttccgcagagcaatcagctttccttgtttgacttttaggcaggatatggtataatagggcaactgttactttgctgcgtcacatgaataaagtggcgtagcaaagggagagaatggaggaagatgcgatgtatgattttgaagaaataagaaaagaagatccggaaattgcagaagcgattcaggcagagatggcaagacagaattcccatattgagctgatcgcctcagaaaactgggtgagcaaagcagtgatggcagcgatgggaagtccgctcacgaacaaatatgcggaagggtatccgggaaaacgttattatggcggatgccagtgtgtagatgtggcagagaatctggcgattgagcgtgcgaaaaagctgtttggctgtgaatatgtcaatgtacagccgcactccggggcacaggcgaatatggcagtgcagtttgcgatgctcactccgggagataaagtgatgggaatgaacctggatcatggtggtcacctgacgcatggatctccggtcaatatgtccggaaaatattttgagatcacaccgtatggtgtcaatgaagaaggcgtgatcgattatgaggaagttcgaaggattgcgaaagagtgccggccgaagctgatcattgcgggagcaagtgcctatgccagaatcatagattttaagaaattccgtgagattgcagatgaggtgggagcttatctgatggtagatatggctcatattgcaggtctggtcgcagcaggacttcatccgagcccgatcccgtatgcacatgtgacgacaaccaccacgcataagacactgcgcggaccacgaggcggcatgatcttaagcagcaatgagatgaatgaaaagttcaattttaacaaagcaatctttcctggaattcagggaggtccgctgatgcatgtgattgcagcaaaagcagtgtgcttcaaagaagccctaagtccggatttcgttgcatatcaggagcagatcctgaaaaatgcgaaagcattgtgcaatggattattagagcgaggtgtgaagattgtatccggtggaacggacaaccatttgatgctggtggatctgactggaaccaatgtcagcggaaaagaactggaaaagcgtctggatcaggctcatatcacctgcaataaaaatacaatcccgaatgatccgcgctctccgtttgtgacaagtggtgtgcgtctggggactccggcagttacaagcagaggaatgaaagagcaggagatggaccagattgcggagatgattgcaatggtgatccgggatgagaaaaatgtagaacaggtaaaagaaatggtgcagaagctgacagaaaaatatcctctgtgctaaagaagacgataaaaagaatctgcctccgtatcgggaagcagattctttttataatctcgttttgttgtataacttttaaatattaaattggaattatataattaaaaggtacatctaaaatctgattaaagctttactacgtttgttgcctgaggtcctttagcgccttctgttacttcgaattcaacagcctggccttcttctaaggatttgaatccatccattacgagtcctgagtagtgtacaaatacatcatttccttcggaatcagagatgaatccataacctttttggttgttaaaccattttactgtacctgtcattgtgttacctccataaatttgaaaataaataataaagtatatcgtattg

SEQ ID NO: 7037 - DNA, 180311 bp, Unknown
  gut microbiota DNA sequence
atgaatcttgtgcaaaagaaactgaaaatgagagattgtatttacacaggatttctattaaaatagaggaagcaaaaagtgataaaggagaagccggaatatgaaaatgtctacaagagggcagtatgcactggaaattgcagtggatcttgcgctgcatctgatgccggatcgtctggaaagtctgaatgatatcgcaaagaggcgaaatctttcagaaaaatatctggagaggattatgaagcttttaaaagaggcggggcttgtaaaaagtgtgcgcggtgcatatggaggatattgcctgacgaaggagccgggagaaatttctgtattggaagtgcttcgtgctgcggaaggtcagctggcaccggtatcctgtcttgttgaaaataccgagtgtggaatggaatgcgaaatctgctctacgaaaagtacctggggtgagatgtgggagcagatactggatacggctgcagaggttacagttgcagatattgcagagatcgtaaggaaaaaagagacctgttaaaaagagtgccggagggcggttttactgcctgacggtactctttttgttatggtttcaagctgtttttggagttgctgtgttcatcttttggataaaataatttcaagaaaatatattaaacatattgacatggtaggaaaaaagaggtataacaataaaaaacattactaaatcgataggaattaaaggaggagtgccatgaaagtatcgacaagaggaagatatggactgcgcgccctggttgatatgaccattcattcgaataatgctccggtttcgcttgttcaggtcgcaaacagacagaagatttctctgaattatctggaacaggttttcggaacattgagaaaagcaggcattgtggtcagtgtaaaaggagccggaggcggatataaactggcgagagatgcagagtccattacggtcaaagaagtgctggaggcactggaaggaaccttttcaatcatagaccggattccgggagaagagcaggatgcagttcaggaggcgatcgagaagcttgtatggagcaggattgatgaaacagtcaatacatttctggaacagaaaacgttaaagatgctggcggatgaataccgggaaaaactggaacagaacgcgggcatgtactacatttaaaaacgatgcaatgaatataggaggacagacatatggcaggaatttatcagagtgtaacagaattaatcggaagaactccacttctggaagtaaagaatctggagaaagaactgaatctccaggcaagagtgctggtgaagctggaatactttaatccggcaggcagtgtaaaggatcgggcagcgcttcagatgatcacagaggcagaggaaaacggtacattaaaaccaggatctgctatcattgagcctacaagtggaaataccggaatcgggcttgcatcgattgcagcgtcaagaggatacagagcaatctttgtaatgccggaaacgatgagtatcgagcgaagaaaacttctgaagggatatggcgcagaaattgtgctcacagaaggcgcaaaggggatgaaaggagccattgaaaaagcaaaagagctggagcaggagattgaaaatgcagtgatcctgggtcagttcgtaaataccgcgaatccaagagcgcacgaaaaaacaacagggccggagatctgggaagatacacaaggacaggtggatctgtttgtagcaggtgtcggtaccggcggaacgatcacaggaaccggtgcttatttgaaatcagtcaatccgtccattgagattgtggcagtggagccggcgtcttccgcggtgctgtcgggagaaaatccgggaccgcacggactgcagggaattggtgcgggatttgtgccggatgtactcaatacttctgtttatgatcgcatcagtaaagtgaaagagcaggaggcgtacaaagcttcccgtcttctggcagaaaaggaaggagttctggttggtatttcttctggagcagcactgtcagttgcacttttggaggccggaaaagaggaaaaccgcggaaagacaattgtagcattgcttccggatacaggagaacgatatctttccacaccgctttttgactgaaaaattaggtcaaaatgttaaaaaaacgttggtcagacaaagcatatttattgcagaacacaggttgaaaaaaagcgaaagatagtatatactacaaagaaaaaaaggcaaaaggagttttagtgctatgaaagaatttaaatatgtagtgacagacgcagaaggaatccacgcaagaccagcaggactgcttgtgaaaaaagcaggagaatttacatcttccgtaacaattgcaaaaggtgataaatctgcagatgcaaaaagaatcttcggtgtgatgggacttggagtaaagacaggagaagaagtgacaattactgctgatggtgcagatgaagatgcagcaatcgcagaactggaagcattctttaaagaaaacttataattcccataaagtctgaggaaaatattatgattacaataacaggaaaaagtgtatttggtggagtgtccatcggaaaactttctttttataaaagaaatcagaaagtgatcaaaagagaacacgtagaaaatgtagaatcagagtgtgtaagatttcaggaagcaaaagccgaggggatccgtcagttaaaagaattgtacgaaaaatcgattgccgatgtcggagaagccaacgctatgatttttgagattcatcagatgatgctggaagacctggattatattgagtctatcgaaaatatcatccgttctcaggaagtcaatgcagagtttgcagtagcaacgacagctgacaattttgcgcagatgtttgcggcaatggatgatgcatatatgcggggacgtgcagcggacgtaaaggatgtttctgagcgtgtgctggatatcctctgcggagtcagcgagggaatcaagcagacagacgagccttcgatcattgcagcagatgatctggcaccgagtgagacggtacagctggataagagcaaagtacttgcatttgcaacgatgtacggttcttccaattctcatactgcgattctggcgcgtaccatgaatatcccggctgttatcggtctgggtgaaagtctgagtcctcagtatgacggaaagatggctgtgatcgacggatttacaggaacactgtatattgatccggatgaagagacactttccagaatgcagaaaaagcgggaagaagatcttgagaaaaaggcactcttggaacagctcaaaggaaaagagaacatcacaaagagtggtcagaagatcaatgtatatgcaaatatcggaaatgcatctgatgttggtgcagtcctgaaaaatgatgcaggcggaatcggtttgttccgcagtgagttcttatatctggagaatgagacattcccgacagaagagcagcagtttgcagtatacaagcaggttgcagaaaacatggcagggaaaaaagtgatcatccgtacactggatatcggagctgataaacaggtggattatttcggactggacaaagaagagaatccggcacttggatatcgtgcgatccgtatttgtctgacaagaccggagatctttaagacacagcttcgtgcactttacagagctgcattttacggaaatatttcgatcatgttcccaatgatcatttctgtttcagagattcataagatcaaagagatgatcaaagaagtgaaagcagagttgaaagagcagggaatcccatataaagaagatgtggagcttggtgtgatgatcgagactccggcttctgttatgatcagccgtgaactggcaaaggaagttgacttcttcagtgtgggaacgaatgacctgacacagtacactctggcgatcgaccgtcagaattcaaaactggacgagttctatgatccgcatcatccggcagtgctggcgatgatccgcatggctgcagagaatgcacatgcagaaggaaaatggatcggtatttgcggagaacttggcgcagatctggaattgacagaagaattcctgaagatgggactggatgaactttctgtttctccatcgatggttcttccgctgagaaagaaaatccgtgattgtgaataatcagatacaaaaaaggacattgtctgaaaagacagtgttctttttttgtactggtaatttcttaaaaaagaacttgcaaacatatgttctgaatgctataatacaaaaagaacatatgttctgaagggagcggaaatatggcggagattattcaggaaaaaatgtcaatctatgaaaaacttcagattctgaccgatgcggcaaagtatgatgtggcgtgcacctccagcggcgtagaaaggaaaggtgatggcacaggtataggcaattgcagcaaggcgggaatctgtcacagcttttctgcggatggaaggtgtatttcacttctgaagattttatttacgaacgagtgtatttatgactgcaaatattgtgttaatcgatcttccaatgacgtgatccgtacatcttttacgccggatgagatctgcacattgacgatggaattttacagaagaaattatatcgaaggattgttcttaagttctggaattttaaaaaatccgaactatacgatggagctgatctatgcagccttgtataagctgcgtcatgtctgcaattttcagggatacattcatgtaaaggcgattccgggagcagatccgattctgattcagaaagtgggatttctggcagacagaatgagtgtgaatctggaattgccgacagccgagagcttgagacttctggcaccacacaagtcaagaaaaaatattctggcacccatgcggctggtccaggagaagtccaaagagaacagacaggagctgacgctgtataaaagtgcgccgcgttttgtgcctgccggccagagtacgcagatgatcatcggcgcctctccggagacagattatcagatcctgcgtgtggcagagtcactctaccagaaatttggattaaagcgtgtgttttattctgcttttgtggcggtcaatgaggacaaggcacttccggcaagaacatcagatggaccgccgcttcttcgggaacacagactatatcaggcagactggctgctgcggtattacaagtttgaagcaaatgagctgctgaatgagaaaaatccgaattttaatatattcctggatccgaagtgtaactgggcgctgaatcatctggaatattttcctgtcgaagtgaatcgggcgtcatatgatgttttgctgcgtgttcccgggatcggttacaaatcagcgggcaggatcgtaaaagcaaggcggttcggatctcttggatttgaagacctcaggaaaatgggagtggtattaaaacgggcgctctattttattacgtgcagtggaaaaatgatgtataaaacgaaaatagaagaagattatattacaaggaatcttttgaatacgaaagaacgtttgccggacagtgttgcagggatgaattatcagcagttatccttatttgatgatgtaaattttaccgggaaccagatcgtgactatggtatgacaggagagggatatgaaaaagatttatatttgcagagatgacagaaccgagatgctttcggcaatttatgacgcatggaaagaaaaccgcaataaagaggtaggaatcgggcttttgggaaagacacagcagcagctgttctgcgaatatgcagaagttgtatcatccgaaaagaaagcgcaggcggtggaacgcctgatacgggatcatatgggagagcagacttatgaggatatttcttatgccctgttgtgtgaagatgcgatgaaagcagaggcgatactccatgtcatgcaggcagcgagacaggtaaagccaagtaaaaggattatggattttctgggcaatccctctgtggcaaaagtgtttgaaatgaaacgcagagtttcgaatgaagcccattattttattgagtttgtaagatttcgggagctggaaaacggagttttgttttccgagatagagccgaagaacagggtgctgacatgtatcgcagagcattttgcagatcgttttccgatggaaaactgggtgatctatgacaatacgcatcaggaatttctggtacatccggccggaaagcattgggtgctggtacaaggagaagtgccagagcggaatgtgacagagcagatcacggaagccgagaaggagtatgaaaaattgtggaaaggattttttaaaaccatctcgatcaaggaacgggaaaatttaaaatgccagcgaacacatataccggtcaaatatcgtaaaaatgtgacagaattccagtaaaaaactattgtataataggaggacttagtttaacataaggataacaaagtggcgttgataagagaaaggaaggagagatatggagagagaggcaatcgtctggctggcgctttttgttattcttctgattgtagaactgttgactgtgggtctgacctccatctggtttgcaggaggtgcactggcagcgttggttttagagctgctgggagtcgatctgatctggcagatcggggcgtttatcctggtttcatttgtgcttgtgtattttacgagaccgtttgcagtaaaatatgtcaatgcacatcatgaaaagacaaactatgaacaggcagtgggaaaaattgtcagaattacacagagagtagatgatcttgcacagaccggaaaaggaattttggacggaatggaatggacagtgaggacagatggtaaagaagttctggaaaaggatactctggcaagagtaatccggatttccggcgtaaaattgattgtagaaccgtataaggaggactagaggatgggattgatggtattaggagttttattggtattggtgatattgattctggcagcaaatatccgaatcgtaccacaggcacatgcgtatattctggaacgtctgggtggatataaagagacgtggggtgttggaattcattttaagatcccgattctggatcgtgtggcaaagagagtatcactcaaagagcaggttgtagattttgaaccgcaggccgtgatcacaaaagataatgttacgatgcagattgatacggtgatcttttttcagattacagatccgaagcagtatgcgtatggagtggagaacccgattgcagcgattgaaaatctgacagcgactacactgcgtaatatcatcggagatctggaactggatgagactctgacatccagagagacgatcaattcggagatgcgcacatcgctggatatcgctacagacccgtggggaatcaaggtgaatcgtgtggaactgaaaaatatcatgcctccgactgcaatccaggatgcgatggagaaacagatgaaggcagaacgtgaaagaagggaagcgattctgaaagcggaaggagaaaagaaatctacaattctggtggcagaaggtaagaaagaatctttgatcctggaagcggaggcggaaaaacaggcggcaatcctgaatgcggaagcagaaaagcagaagagaatcaaagaggcggaaggacaggcggaagcaatccgtaccgttcagaaagcatcagcagaaggaattgaatttattaaacaggcaggtgcggatgatgcagtactgactttaaagagtcttgaagcgtttgccaaagcagcagacggaagagcaaccaagattatcattccgtccgaattacagggaatcgctggtctgaccaagacgatcgcagaggttgcaagaccggataaagcagcagagtagagaacatgaaagaggaaacaatcataaggatatctgtccgcagccttgtagaatttattctgcgggaaggggacattgacaacagagtgtccggcagtatggaaaaagatgccatgctgctgggcggtaaaatacaccgcaaaatacaaagccgtatgggaacgaattacacagcggaggttccgcttaaaatacagatgccgtgcgatgggtttgttttgcagatagaagggcgcgccgatggagttttgaaagatgacggaaaagtcctgatcgatgagatcaaggggattttgcgaagtctggaacatctggaagcgcccgttcccgttcatttggctcaggcaaaatgttatgcttatatttatgcagttcagaactctttgaagtgcattgacgttcagatgacgtattgtcagatggaaacagaggaaatccgcaggttttgccaggaatttgaatttcaagagcttcagacgtggtttcaggatctggtgacacaatatgaaaaatgggcaaaatttgaaattgaatggcggaatgtacgcaatgattcgatccggcagattgagtttccttttccctatcgagaaggacagcgcgacctggtggtctcggtataccgcacgatcttgcgaaagaaaaagctgtttatccaggcgcctaccggagtgggaaaaacaatggcaactgtatttccggcagtgcgggcagtgggggaagggctgggagaaaagattttttatctgacagcgaagacgattacgaggacagttgcagagcaggcattttccctgttgaaagaaaaggggctgttgtataagaccattacgctgacggcaaaagaaaaaatctgtttttgtgaggaggcagagtgcaatccggatgcctgtccttatgcaaaaggacattttgacagagtgaatgatgcagtttttgatctgatcacacattccggcgactggagcagagaggttctggaagaacaggcgaaaaagcacatggtctgtccgttcgagatgtctctggatgtgtccaactgggcagatgcggtgatctgtgattacaattatgcgtttgatccgcaggcccatttaaagcgctttttctcagaaagtggaaaaggggaatacctgtttctgatcgatgaggcgcataatctggtggagcggggaagggagatgtatagtgcatctctatacaaagaagatttactggaagtaagaaaactggtaaaagcagaggatccgaaactggcaaagggtttgtcagaatgtaatcagcagtttttggaattaaagagagagtgtgagcattatcagattttaaaaagtgtatcgcatattgcgttaaagttgatgaatgtgctttcgaaactggaagattatctggaagaatgcaaggatgcagaaaagaaaaagcgggtgctggatttttattttgcagtgcgcagttttttaaatatccatgatatcatggatgaaaattatgtgatcttttcggaaatgatggaagacggaaggtttcaaatcaagcttttttgtgtcaatccggcggtgaatcttcaaaattatctggaacagggaaacagtacgattttcttttctgcaacactgcttccggttcattactataaaaagctgcttagtgttgagaaagatgattatgcagtgtatgcacatagttcttttccgcaggaaaataaatttctttttattggaacggatgtaagtacccgttatacaagaaggggagagagtacatatcagagatttgccagatatattgcagtgatggcagaacagaaaaaaggaaattatatggcgttttttccatcgtaccgttttttggaagaggtacatacgtgctttttggagtgtgttgatcacgaagtcgacagtatctgtcaggtttcgtatatggatgaagaacagagggaagagtttttggaggaatttgaacaggaaagagagaaaagtctggttgcattttgcgtgatgggcggaattttttcagaggggattgatctgacagatgacaagttgatcggagcagtgatcgccggaacagggcttcctcaggtgtgtacagaacgggaaattttaaagcagtattttaatgctgctgacatggatggatttgactatgcgtatctgtatccgggaatgaacaaagttctgcagtctgccgggagggtgatccgaacggaaagtgacagaggtgtgatcctgttgttggatgacagatttcgggcaatgcgataccgggaagtgtttccgagagagtggcagcagtatcaactgggaagtgtgaaaaatctggaacaagaaatacggactttctgggaaagtccgtaattgtacatcagtcaaaaaaacttaagaattcttttgctgcctttgaggtcagcacctgttcattataagcgatgacaagctcacgctctggcagttcttcttctgtctggacagcaaagagatcgcaagtctgctcagagagacagaaatttggaataaatgcgattccgagtccgattcgtgcaagatcgatcagaagatcattgctggtcagctcgatttcaggaaccagatccagttgatgctgctggaagaggcggtgcagatattcactggtggtactgtgcttgtccagcatcagaattggatattttgacagttcctgataggaaagtttctttcctttcaactctgcaaaatcctggttggcaataaaaacatcatgaaattttttgatctttttgatcgaagagacattgcttaagtagctgtttgggtagttgaccacaatgagatcgacctgtccggattccagtaattctacacatttgatggatgtctggttgacaactttgatgtgggcatttggaaatgcttcgtgaaatttctttaaatagggaaccagaaaatatcggcagatcgtatcactggctccaatccgaatctgtccaccggtagaagctgcatccagaagctgggattccccgcgctggatcagatgcatggcaggttcgatatggcgaaggaggatttctccttccggtgtgagctggactttttttgtactgcggataaaaagcacctgatccagcttgcgttccagtgttttgatagactgactgacagcagattgtgagatgaaaagctgtttggaagcttcggaaaaactcaaagtagatgccacgtgatagaataccttatatagttcatagttaatatccattattagacctcctaataagtgctccctgtattatagggcaaaaatgaatgaattacaatctatattgtggtaaaatatacaggaatcgcagaagaatggaaaaaatgacgaaagcagaaaagactgggaggtaaaatgcgtgaaaaaagtacaatggtttttgggaatcgtgttttctctggcgctgattctggtgctgctgatcaacagctttcaatttgcggcgtatggagattttggattttacgaaaaagaatataagaaatatgatgtggtctcggatcttgatatggagctgaaagatgtgatgtatgtgacctatgagatgatggattatctgatcggtgacagagaaaatctggatgtgtacacagtggtagaaggaaaagagcaggacttttttaatgagcaggacaaattgcatatggctgatgtgaaaaatttgtttcttggtggtcttatggtaagaagagtatcagcggcggtgatgctgctctgtcttttcgtactttgggtgacaaaggcgaattggaaaaagattctggcaagaggatatcagatcggtcttgggatcgccacagccggagtcgcgtttctggcaggagcgctgattgtagattttaatacagcatttacggtattccatgagatattttttaccaatgatctgtggttgtttgatcccgctgaggattatatgatccggatgctgccggaagtttttttctatgatatggcattgcgcattgggggaatcttcattatcagtatgctgatctttctggcagtcagtgtgtttctcgccagacaggccaagaaagatgaaaatgaaagaaaaattaaaagtacttatgagtgagtttaattatattaattatacttatgagaaaaaatgtggtaagattacggtaaaaagagttacttaatgtttgaaagaagtgcaaaggagattgtatatgagcaacgtaaagcgcgtatatgtagaaaaaaaggcagaatttgccgtacaggcaaaagaattgagacatgagatcagaagttatcttggaattgaaactgtgacaggtgtcagagttctgattcgttatgatgtggagaatctttcagaagatacgtttgagaaagcatgtaatgggatttttgcggaaccgccggtagatgtactttatcttgagagctttccggtatctgacaaagatcatgtattttcggtagaatatctgccgggacagtttgatcagagagcagattctgctgaacagtgtgtgcagtttatcaaagaggacgagtctcctgtaatcaaaacggcgacaacatatgtcatcgaaggaaacgtaacagaggatgaatttgcagcgatcaagaatcactgtatcaaccctgtggactcaagagagacaggaatggaaaaaccggaaacgttagtgactgtgtttgaggaaccggaagatgtgaaagtatttgatggttttgagacaatgccggaagcagaattaaaagcgctttatgattcccttgggctggcaatgacatttaaagatttccagcatatccagaattattatcacggagaagagcatagaaatccgactatgacagagattcgtgttctggatacatactggtctgatcactgccgtcacacgacattctctacagagttaaaggatgtgacattcggtgaaggagactataaagagccgatcgtcaatacatacaaacagtatttaagtgaccacagtgagatcttcaaaggaagagaagataagtttgtctgcctgatggatcttgcgctgatggcgatgcgtaagctgaaaaaagaaggaaagcttgcagatcaggaagaatcagatgaaatcaatgcatgcagtattgttgttccgatcaaagtagacggtgtggaagaagagtggctgatcaatttcaaaaatgagacacacaatcatccgacagagattgaaccgtttggtggagcggcaacctgccttggcggtgcaatccgtgatccattgtccggacgtacttatgtatatcaggcaatgcgtgtgacaggagctgcagatccgacggtatctgtaaaagagactttaaaaggaaaacttcctcagaaaaaactggtgagaggagctgctcatggatacagttcttacggaaaccagatcggtctggcgacaggactggtaaaagaaatctatcatccggattatgtggcaaaacgtatggagatcggtgcagtgcttggagctgctccaagacgtgcggtgatccgtgagaattcagatccgggagatattatcgtactgctcggcggacgtaccggacgtgacggatgcggtggagcaacaggttcttccaaagtacatacagaagaatctattgagacttgcggcgcagaagttcagaaaggaaatcctccgacagagcgcaagattcagcgcttattccgaagagaagaagtaagtaagctgattaaaaagtgtaacgactttggtgcgggcggtgtttctgttgcaattggagaacttgcagacggacttcgtgtggatctggataaagtaccgaaaaaatatgcaggtctggatggaacagagattgctatttcagaatctcaggagcgaatggcagtagtcgtagatccgaaagatgtggcagaattcatgtcttatgcaaaggaagaaaacttagaagcagtcgaagttgcagtagtgacagaatctccgagactggttttagtgtggagaggaaatgaaattgtcaatatttcccgagcgttccttgacaccaatggagcacatcaggagacaacagtagaagttgagattcctgcaaagaaagacagtctgtttgtaaaagaagaagtgacggatgtaaaagaaaaatggctggagaccttaaaggatttaaatgtatgctctcagaaaggtttggtagagatgttcgacggctccatcggagcaggttccgtgtttatgccgtacggtggtcagtatcagatgacagagacacaggctatggttgcaaaagttccggttatgaatggaacaacagatgcggtttctatgatgagttacggatttgatccatatctgtcaagctggagtccgtatcatggagcgatttatgcagtggtagagtcagttgcgaagatcgtagccgcaggtggagattatagcaagatccgttttacattccaagaatatttccgtcgtatgacagaagatccgaagagatggagtcagccgtttgcagcactcttgggtgcatatgatgcacagcttggattcgggcttccgtctatagggggaaaagacagtatgtctggaacattccaggatattgatgttccgccgactcttgtatcgtttgccgtagacatggcaacagaggatgagattattactccggaactgaaaaagtcaggaaataaactggtttggatgaagattgaaaaagatcagtatgatctcccggtttatacacagctgatggatcagtatggcaaatttgcagcagatatccacagtggaaagatcgtttccgcatatgcgctggatcgtcatggtgtgattgctgcggcaagtaagatggcatttggaaataaactgggcgtgaagatcgagcataatctggatgcgggagaattgtttgcaccggcatttggagatattattgcagaagttccggcagacaaagtgggagaactgagcattgcatacacggttatcggtgaggttctcgaagagcagaaatttgtttatgcggataccgaaattgctctgacagaagcggaagaagcatggataggcactctggagagtgtatttgcgacaaaatcttccgcagataatgatgaagtggtggaagaaaagctctatcatacatccgatattcatatctgcagtcataagatcggacagccgaccgtatttattccggtatttcctggaacaaactgtgagtatgacagccgtaaggcgtttgagagagcaggcgcaaatgtgatcacaaaggtattccgtaatatgaatgcagaggatatccgtgattctgttgccgagtttgaaaaggcaatcggacaggcacagatgatcatgttcccgggtggattcagtgcaggagatgagccggatggttctgcaaaattctttgcaactgcattccagaatgcaaagatcaaagaagcagtagaaaaactgttgaatgaaagagatggactggcgctcggtatctgcaacggattccaggcactgatcaaactggggctggttccttatggtaagattgcaggacagacagtggattctccaacattgacatataacacgattggacgtcatatttcaaagatggtctacacaaaagttgtgacaaacaaatcaccttggcttgcaggtgcagagctcggaggggtttacacaaatccggcttcccacggagaaggtcgttttgtagcgagtgaagagtggctggatcagttattcgcgaacggtcaggtagcaacacagtactgtgatccttcaggaaatatcagtatgaacgaagagtggaatgtcaatggctcctaccgtgcgatcgaaggtatcacaagtccggatggaagagtacttggaaagatggcacattccgaacgccgcggtgattctgtagcaatcaatatctacggagagcaggatctgaagatctttgaatcaggtgtgaaatattttaaataaaagaatggtttgatttgaaaaacagacttgtatttttgtgacagtctgatataatttaatttgtaattaatagcaaaggctgttactggtaatgcaggcaagaccgagaacaatgaggagcatgagattattgcacctcttgtcttggtctttttttatgaaaaaagcaggataatacagatacggccgatctgtaaacagtgcaaaaagcagccggaaaaggaggtaaatatggattataaagcaataggtaaaaaaataataagtctggttggcgggacagagaatatcaggcaactgacacattgtgcaacacgcttgaggtttgagttttataagaaagaaaaagtagatgtaaaaagtatagaaaacattccgggagtaattggagttgtagaaaaaggagggcaatttcaggtcattataggaaatgaagtgcagactgcttttcgggcaatttctgaggaaatgaagcatagtgaggagaatgatggaaacagagaactggaccgggaagaaaaaacgacgattgtcaatcggatcataagtgtgatttctactacattcacaccggtgattccggcattgattggcggaggtatgataaaggcagtactttctattctggttttggcaaaactggtagatccgtcagaatccacttatagtattttgacatttatttcagatgcaccattctattttatgccggttctattggcatatggagcagctatgaaatttaagtgcaatcctattctggcaatcacaatggcgtgcgcattacttcatccatcctggaacggtatggtggaagcgggagagtcaattactttttttgggataccagtagtattggtaaattactcatcttctgtagtaccgatcatcctgagtgtttggattatgtcttatgtagagcgatttgcagagaaatattctccgtcagtgattaaatttttcctgaagccgctgctcataatgtttattgcgatcccgattgcgcttttgggagttggaccattcggaaatttgcttaatgatattgtgcagacaggagcaactgtgttaaatgaaaaagtaagctggctgattcccatgctgatgggagcgtttcaaccatttttaacattaacaggaaccgcatgggcaatgacaccgattgcaacgggacagatttcttcacttggatatgaagtcgtcaatggtccgggaatgctggcttcgaatattgcgcaggggggagccactcttgccgtagcctttaaaacgaagaacaaggagttgaagcaaatggcggcatcttctggatttacagcagtgatgggaataacagagccttgtctttatggtgttttgttaaaattaaaacgtcctttgattgcatctatgattggtggtgcagcaggtgggatttatgcaggtatatcgggacttgtgcgttatgcgtttgtatcgccgggacttactgctattccagcttttattggagagaatccgtggaatgtagtgcatgcattgatcacaattgtaatttcctttgtggtaggatttgcggcgtcatggctgcttggttttcaagaaagtacggaagtggaaggcacttcaaaaaaagacggtgtatcaggtgaatggatcaaagctccggttacagggcgagcggcagaattgtcagaggtggcagatgatgtgtttgcaaaggaagtattggggaaaggtgcagctatatttccagaagaaggacgtgtgtatgcaccgggatctggagaaattacaatattttttgagacaggacatgccatagggatgaaactggacaatggagcagaagttttgattcatgtagggattgatacggtaaatcttcagggaaaatattttacaccaaaagtaaaagcaggaagcagagtagaagcgggcgagcttttgttagagtttgatttgcaggcaattgcagaagaggggtatgatacagtgatcccgatcattgtaacgaatacaccaaattaccgtgatgtagagttgacaacatgtgggcagaaaaaagcgggagagaacctgcttggtttggtttgatttatatagaaaactgtgtaatattcaaagaaaggaagaagatcaaatatgatttatcaaaaattaaaaccatttccgtcaggatttttgtggggtgcgtctacgtctgcttatcaggtagaaggcggagtggatgaagatggaaaaagtccgtccatcattgatatgtatgaacatccggaaggagttgccgatttttcggtggcaagtgatcattatcacagatataaggaagatattgccctatttgcagaaatgggattaaaagcatatcgtttttctgttgcgtggaccaggattttaccaaatggtgtaggggatgttaacgaaaaaggggttgcctattatagggatgtgattcgtgaatgtaagaaaaatggtattgagccaattattacgatgtaccattttgatttaccctattgtctggagaaaaaagggggatggtcaaatcgggaaactatacatgcttttgtggaatatgcggaagttctgtttcagaattttggggaagaagtaatttactggctgacaatcaacgagcagaacaccatgattttgcatccgggggcaattggacttcctaaagggcgaaaactgccaacaaaaaaggaactttatcaacagaatcatcatatgatgttggcgcaggcgaaggttatgaagttgttccatcaaatggtatccggcgggaaaattggtccggcgttgaatttgacagcaatgtatcaggaaagcagccgaccggaagatgcgattgcagcacataactgggaggtgttacgttgttggaattttgcggatgttccggtatttggaagttatcatcctttggcgtgggaatatatgaaggacagaggaattgcacctgagttgcaaccaggagatatagaatgccttaaagatgcgaaaccagattttattgcgatgaattattattctacagccacgatcgcagcaagcagaggtgatgcatcggatgtggcagccagggcaggtgatcagcagattatgttgggagaaccgggggtatatcgtccgggggaaaatccgtatgtgggaaaaacacagtacggatgggttgtagatccggttggttttaggtatactttaagaaaagtatatgagagataccatcttccgattttagtgacagaaaacggaattggagcaccggatattctggaagctgatggaaaaatacatgatgcgtacaggattcagtttattcgggagcatttacagcagatgcgtcttgcgatcacagatggagtacagatattgggatattgtccatgggcggctattgatgtggtaagtacacatcagggatatcgtaaacggtatggatttatttatgtggatcgggaagagtttgatttgaaagaattgaaacgttttcgaaaagatagtttttactggtatgcaaatgtgattttagaaaacggacagaatttataaaataaaaagctgagggtataggcgatgatcataaagaaagtactgaataataatcttcttttagtggagagtgagaatgggaaggagcagatcgcaatggggaagggactgcggttttcttataaagtaggagaacgtctccgtgaaacagatgtggaaaaaatctatatgctgaaagatgaaaaaaatacacaggattatataaggctgcttcaggatgtgcctgcaagttatgcagaagtaatccaagatgcagtacagatggtaacgtgtaaaatggcttccagattaaatgagcaaatttttgtgacgttgtctgatcatctgatctatgctctggagaggtataaaaaaggaatcgttttacaaaacaggatgctttgggaaattcagaaattttatccgaaagagtatctgttggggagtgaggttctttcttatcttaatcaggagttaaatgtcaatcttcctgaggaggaagctgggaatattgcatttcacatagtaaatgcgcagattgatgcgacagagaataaaataggaatgcagaacggaatgcttatggtaaaaatgctgaaagatttgtttcagattgttcaactgtattatcagtgggaaattgatgaagaaagtatcaattactccaggttcgtaatccatatgcaattttttttgcaacggcttttggaagataagatgttagagaatgcggatgcatggatttatcattcagtagtacagcaggagaaaaaggctgcaggatgtgtggagcaaattcgaaaatatattcggaatttgctccagaaagaaattacagaagaggaaagggtttatttgattgtacatatttccagaattaaacaaaagcaataaaaataaaaaatgtggaaaaaagtagaaaaatagtattgacaatctaaaaagtcaatagtataataatcaagcaagttgtggttgagaaaatagcagcttcaaattatggggtcttagctcagctgggagagcatctgccttacaagcagagggtcacaggttcgagccctgtaggccccatagatttaagtgaatatggcggaatagctcagttggctagagcacacggttcatacccgtggtgtcgctggttcaaatccagtttccgctacgaagagagaggtctgaatttcagatctcttttgtttttttgctccaagagttttggataaaaagaaaaaagaataagggagaaagaaaaatgttgatgagtattgcgtgtatactgttgcttggcatgatgatgggatggctttgtaaaaaagtgcatcttccggggcttttaggaatgttggtgacagggatcgtattggggccatatgctttgaatctgatcgatgtttccattttgaatatttcgtctgagcttcgaaagattgcattgatcattattctggcaagagcagggctttcactgaatctggaagacttgaaaaaagtagggagaccggcaattctgatgtgttttgttccggcctgttttgaaattctggggatgattctgctggcaccgaggctgctcggtgtttcaattttggatgcagccattatggggactgttgtaggagcagtctcgcctgccgtaatcgttccgaaaatgctgaagcttatggaagaaaattacgggacaggaaaaagtattcctcaattgatccttgcgggtgcttctgtggatgatgtttttgtaatcgtcttatttacagcgttcaccggtcttgcacagggaaatgcgatatctgtaaaaagctttgtgaatattccggtttccattggattggggattgttgtcgggatgactgtcggatatctgatggcaaagttttttgaaaaggtacatatccgggatacggccaaggtgatgatctttctgtgtgtttcgttcattctggtcacattggaggatcagcttgcggatgtgatcccgtttgcttcattgatcgctgtgatggcagtcgggatcacgctccagaaaaagcggaaaagagttgcagaacgtttgtctgttaaattcaacaaactatgggttgtttcagaaattatgctatttgttcttgtgggagccacagtgaatattaaatatgcgctgtctgcaggatttgcggctgttattttgatttttggcgtgcttgcattccggatggtgggagtatttttctgtcttttaaaaaccggtttaaacaggaaggagcggacattctgcatgatcgcatatatgccgaaagcgactgttcaggcggccattggagggattccgcttgccatggggctttcctgtgggaatatcgttctgacagtggcagttgtgtcgattcttattacagctcctctgggcgcgtttctgatcgatctgacttatcaaaaattgttgagccggtagggtatatttttggcagaaaagctgatatactagtgaagtaaattgaatgtcagaaataaggagagtgtgagatagagatgaattttcaggaaaaacagcaggaatatgcaagattgatcgtagaaaatggcgcggccatccagaaaggacaggaactggtcctgcgctgccccgcagaatgctgggagtttggccggatgatcgtaaaggccggatatgaggcaggagcaaaagaagtgatcgtacactggggtgatgatgaagttgcacgcttaagatacgagtatgcaccgatggaggtgtttgaaaatgttccgaagtggcgcgcagattccatgaacagttatgcagaaaatggagcggcatttattgcgatcacagcagagaatccgaatgcttttaaaggcgtggacagggaaaaacagatggcagctgcaaaagcgaatgacaaggcgatggagccatattacaaacggatggtgtcaagccaggtgcagtgggtagtggcagctgttccgggaaaagaatgggcaaagcaagtgtttccggaaaaaagcgaagcacaagccatggaaagtctgtgggaagcaatcttttgcgcagtaaggattcaagatggagatgcagttcaggcatggagagagcatgatgcgctgctttccgaaaaatgtgagattttgaacaagtatcagtttacagagctgcattatgagaatgaggccggaacggatttcagagtaggacttgtgaaaaaccatatctgggaaggcggttccgaggaatccggatcgggagtgcgttttattgcgaatatgccgacagaagaagtatttacaatgccggattacagaaaggcagaaggaaaggtcgtaagctcccggccgctgagttatcgagggaatctgatcaaagacttcagtctgacgttccatgaaggaaaagttgtggattttgacgccagagaaggatacgatgcattaaaacagttgctggatacagatgaaggttccaaaagtcttggagaagtagcgctggtgccgtacgcttctccgatttctgagatggggatcctgttctataatactttgtttgatgagaatgcatcctgtcatcttgcattgggagagtgttatccgacaaccgttcaggatggagagaagatgaatgaagaagaattgcatcagatcggcggaaatcattccatcaatcatgtggactttatgattggtacaaaagatatgaagattacaggaattacagaggatggaaaagaaattccagtctttatagacggcagctgggcactataaatgcagaatttgttgcaacaatttgaaaaattgcaaaaaatgtgaaaaaagggttgacattccctggtacaggtagtatactaacgaagtcggttgcgggaaacgtatccgacggatatggggtcttagctcagctgggagagcatctgccttacaagcagagggtcacaggttcgagccctgtaggccccataccatgaaagatggcggaatagctcagttggctagagcacacggttcatacccgtggtgtcgctggttcaaatccagtttccgctactgaaaaagaagtccttgaatgagggcttcttttttgttacaatcagagaatgaaaaagaaagccggaatatacggcttacaaggaggaagaagatgaataaaaagtcatggatggtattgcggatcgtggcgggattgtatctggtatttcttggggttcagatcatttcccaggtgaccagggagcagccgaacaatctggcgctgatgatatgtgccgcagttttgtttattggagtgggggttgtatatgcaggtgctgcgatcagcagcgtatggaagatgagcaggggaggagaaaaatctcaggaggatgatcttcagattgtggagaaagaggattcaatggaaacttcacaggaaacacgaagagagattccggatattcagttcaagcaggaaatgccggaacaggaagaaaaagaagagaaagaagctccgattgatacagaagaacaatcggacagccaatagaaaagaaaagcagtcagaaatagaaaggagcagataaatatgagaattggaatgggatatgatgtgcataaattagtagaaggaagaaaactgatccttggcggtgtagagattcccaatgaaaaaggactgctcggacattctgatgcggatgtgctgctccacgcgatcatggatgcgcttctgggggcggctgcactgggagatatcgggaagcattttccggatacagatcctgcgtataaagggatttccagcatcagactgttggagcatgttgccgatctcttagaagaacatcagtttctgattgaaaatattgatgcaacgatcattgcacagagaccaaagatgcgtccttatattgatacaatgcgcgaaaatattgcaaaagcattaaaaattgagtcggatcagattaatgtcaaggcaacgacagaagagggacttggatttaccggaagcggagaggggatttcctctcaggcaatctgtatgctggaaaaagtgatgaattacagcagtgtggatgtgacagcgcagacaggtggatgtgccggctgtcaggggtgcaaaaaagcatagatgggagaacgaggatggaacttcgaagactggaagaacaggagcaccaaaagacccggaagctgtgggaggaagtgttttcagacgataccagggcatttctggattattactattttatcaagacaaaagagaatgaaatctgggtgattgaagaagacggagagatccagtccatgctccagctgaatccttatcagcttcaggtggcagagcatccgtttttatgccgttatattattgcagtggccacaagagcacaatacagaagccggggttatatgagcagtcttctgcgaaaagcgatgcaggagatgtatgggaaaaaagagccgtttacatttttgatgccggcagcagaggcaatctatactccatatgattttaggtttgtatacagccagaggcaggcggtgtttgaaaaaaaggcagagacagaattgatcgaagaggaagatgcaacaatgtttcaggcagaagaactggctgcgtttgcaaaggagcggctctttggaacggctcgggtatatgcagtgagagacgcgcattactatcagacacgcgtattggagcagcagagtgaaaacggcggaatccgaatgctgaaaaaagacggaaagctggtggggatctactgctatgcaaaagaggaaacctgcgaagttttagaaccgctgatccttccgggatatgagactgtattttgggattccatatccggtttgagtgagaagccggtcaaagtactggcgtgtccggaagtgttggagccttgtgcaaggtctgtggagaggaaaccgatgatcatggtacggattctgcatcttgagaccttgttatcagtgcttacggtcaaagagggagaaagtctttcttgttcctttgcggtcattgatccgatcttgactggaaacagcaggatctggaagctgtgcagtcaggaagatggcaggatacaggtcacagagacagaggattctcagggagtgctgacaatcggtgcgcttacggaacttgtatttggctatcgaagtgcggcggatctaagaaaggatccggacgtatgtcttggcagagagctggagtgtgagctggagaaaatttcaccgctctctccggtattcttgaatgagattgtgtgaaagaagttgacaaaacagaaaattttgcataagatataatctggactaagaaataaaagcaaaggcttagaacgaaaagagtatctggtcatacgctcacagagaggaattgtcaccggctgaaagcaattccgggaaagcggccaaagaagtgcattcgggagctgattctgcgaacacacaaagaatgtcagtagcagggtacgtgtcgcatacgttacgtgcaatgagtgaaagaaccagattcttttaatagagtggaaccgcggaagaacttcgtctctaagttgtagagatgaagtttttttgttttaaaatggcagaaaagtcaggaggatgtcatatgggaatgctgtcttatatccgggaagaaatccgggtggtgaaagaacgtgacccggcgatcaaatcgagtatggaagtgctgttatatcccagttttaaggtgatcttgcgatatcgggtagcgcataaattatatctgaaaaagcattattttctggccagatggatttcccagcgtgcagccagaaaaacgggaatcgagatccatccgggcgcacagatcgggaaagggctgtttattgatcacggaagcggagtgattatcggtgagaccacagtgatcggagataacgtgactttgtatcagggggtgactcttggcggtaccgggaaagagcagggaaagcggcatcctacattggaggataatgtcatggtcagtgcaggcgcaaaaatattgggttcttttacaatcggagagaattcaaaaatcggagccggctcggttgtgctggaagaggtgccgccgaactgtaccgtagtgggagttccgggaagaatcgtaaagagagatgacaaaaaggtgcttcgaagtgaaatggatcagataaaccttccggatcctgtgctcagtgatatcagagaacttcagaaagagagcagagagcttcataatcagctgacggagatggtacagaaaatgagatgtatgaaacaatgtaaaacagaacagacgggagaggagaaaaaagatgaaactgtataatacaatgtcaaaaacaaaggaagagttcgttccattggaagaaggaaaagtaaagatgtatgtctgcggacctactgtttacaacttcatccatatcggaaatgcaagaccgatgatcgtgtttgatacggtcagaagatattttgaatataaaggatacgatgtgaattttgtatccaactttacagacgtagatgataagatcatcaaaaaagccaacgaggaaggtgtgacagcagaagagatttccaaacgctatattgaagagtgcaaaaaagatatggaagggatgaatgtcaagcctgccaccaaaaatcctctggcaacagaagaaatcggcggcatgatcgatatgatccagacgctgatcgacaagggctatgcttatgaaaagaatggaacagtttattaccgtaccagaaaatttgaagggtatggaaagctgtcacataaaaatctggacgatctgcagtccggcggacgttcccttctcgtgacgggagaagatgaaaaagaggattctctggactttgtactctggaaaccgaaaaaagagggagaacctgcatgggagtcaccatggagtgaagggcgtcctggatggcacatcgagtgctcggaaatgtccaaaaagtatttgggagagcagattgacattcatgccggtggagaggatttgatcttcccgcatcacgaaaatgagattgcacagagtgaggctgccaacggaaaagatttttccaaatactggctgcacaacggctttttgaatattgataaccgcaaaatgtccaaatctcttgggaacttctttactgtacgtgagatcggagaaaaatatgatcttcaggtactgcgtttctttatgctgagtgcgcactacagaagtccgctgaacttcagtgcagaattgatggaggcagcaaagaacggtctggagcgtatcgtgacagcagcagaacatttgaaattcctgctcgaaggcgcaaaaacagagaatatgacagaaaaagagcaggcaaagattgtaaaaagtcaggaatttacccggaaattcgaaaaagccatggatgatgatttcaatacagcagatgcaatcgcggcagtgtttgacttggtgaaatttatcaacacaaatacagacggggaaagctctaaagaatatctgcaaaacctgttgagccagcttgtcgcattgacagatgtacttggaattatcgtagaaaaagagcaggagatgctggcagacgatatcgaggcgctgattgcagagcgtcaggctgcaagaaaagagagaaattttgccagggcagatgaaatccgtgacgagctgcttgcaaaaggaatcattctggaagatacaagagaaggggtaaaatggaaaagagcgtaaattttgaattcagagatctgatggaagagatgctgcagtttgatccggtggatgtatccgcatattctccgcttgtgctggcttatattggagattgtgtatatgatctgatcatcaagagcatggtgattaatcagggaaaccgtcaggttcagaagcttcacagagagaccagcgggtatgtgcaggcatctgcgcagtcatttatgatgcgtgccatgcaggaacatctgacagaagaagaacatgctgtctataaaagagggcggaatgcaaaatccatatcccctgctaaaaaccagtctattacagattatcgaagagcaacgggatttgaggcactggtcggatatttgtatttgaaaaagcaatatgagaggttactgacgcttataaaaatcggactggaaagtctgaaagaaaatcagggagaagaagatgcaggaaaataggaaagaatttgataatacagagcatacccttgtgattgaggggagaaatgcagtgctcgaagcgtttcgttcgggaaagccgatcgataaagtatttgtgctggacggatgtcaggacggaccggtgcgcaccattgtaagagaagcgaaaaagcatgatacgatcatcaattttgtgggaaaagagcgactttcacagatttccgtgaccggaaagcatcagggtgtaatcgcatatgcggctgcctatgaatattcggaagtggaggatatgttaaaactggcagaagaacgaggggaagatccgtttttgattctgcttgataatatcgaagatcctcacaatctgggtgcgatcattcgaactgcaaatctggcaggggcacacggcgtgatcattccgaagagaagagcagtgggactgactgcgaccgtggcaaaaacttctgcaggagccttaaactatactccggtcgcaaaagtcacaaacctggcaaagacaatggaagaattgaaagaaaaagggctctggttcgtgtgtgcggatatgggcggagaatccatgtatcgtttgaacctgaaaggaccgattggtctggtgatcggaaatgaaggggaaggcgtgggacgtctggtgaaagaaaaatgtgactttgttgccagcattccgatgaaaggtgagattgattctctgaatgcatcggttgcggcaggagtacttgcttacgagattgtacgtcagagaacgatgtaaggataaaatggaggaaatgatgcagagaaaccggtatgaaatgctgacagatgaaaatttgatcgaagagctgcgcggcggggactctgcgatcacagattttatcatgaataaatacaagcccatggttcgaaagaaagcaagagccatgtttcttctcggcggagagaatgaagatctcatccaggaagggatgatcgggctttttaaagcaatccgtgattatgagaccaggcagggaacatcctttgcaagctttgccgaactgtgtgtctcaaggcagatgtacagtgcgatcgaggcatctcagagaaagaagcaccttccgctgaattcgtatgtttcattgtacgaagaatccgtggaggaaggaaagaaggttcctctgatcgataccattgaaccacaggaggaaaataatccggaagcattgtattttggaaaagagtttaccgagattttttcagaacggctgaaggagaatttaagtacgctggagaatcatgtgctggaattgcacctgatgggaacggattacaggaaaatcgcagagcttctcggaaaaagccctaaggcggtggataatgctctgcagaggattaagagcaaggcacagaaattgctgaaaaatgaattgagataaaaagaagatgaattttatgaagcaatgcttgattctattaggcatggtggattcatgaagatggaataaaaggtgaaagtttatcaaaattatataaaaaatattgacagagcttacctaattgatgtataatattagtgttgtgtttatcacataagctgctatggcgcagtcggtagcgcgtcgccttggtaaggcggaggtcgggggttcaagtccccttggcagcttgatgaaaatagcgtgccgtcaaagagttctaaacattctttggcggcacgctgtttttgtgaaaacagaaatttttgcctgtttatacaaaaagaaaaagccgggatatcatcgccggctgaaaaaagggggaaaagtatatatgaaaaagctttttgctttgtatgcatataatataggcgaaaagtgtgagtaaactgtgatggttctataaaaaagaaatgaaaaattaaaaagaaaataaaaactgcggcaatatctctgatcagacagatactgccgcaatttttatgaattttcttcctcttcttctaccagctttaaaatatcagttaaatcgcatttcaaatattcgcacagtctggcgagaattttcagatcaattctggatatcttattcttacagtagttgtttaattgggttcgttgtaaattgcagtttttgcagacggaatttttgctgattcctttttctttcattactacgtccaaatcaatgattatcttattcatatctacacctgcctttcctaaagtatatgtgcagttgtataaaaatataagatgcaatataatatagatgtagaaatatacacctgtataaaaattataatggagaatgaacgtgaaaaagaaaagagatttcaagtatatcataatcataggagttctggcagcgacggggtggttccttttccagcagaaaccggacgtgcggtctactacagtcactcatacagatggagagtacaggctttgggtagaggtgaatgcgaacagatggacgatagaaaacagagagcagtttgcagaaaagtgttgaaaatggtggatgaaaatacatttcaaaaggtgcatttcagtgaagatctggaagagccgcactgtattattttccgggtatatctcatgccgtatcattcgaactgggcatttgaggtgtactgccgcaagcagaaaaaggacacgcatcgttgggagatacgtgtccgcgagaatcatttataatgtttcagaatctaaaatgatcgtaaatggtccgtcattaacaagtgcaaccttcatatctgcaccaaattcgccggttttcacgcaggaaacagactggcggcattttgtgatgatatattcatagagggcattggctttatcaggagcacctgcttcgataaagcttggacggttgccctttttgcagttggcatacagtgtgaactgagaaaccagaagaaggctcccgtttacatctgcaagagaaaggttggtctttccgttttcatcttcgaaaatgcgcagtccgatcatttttttgatcagtttgtcagcagtttcctgtgtgtctgaatcagaaactccgatcaataccagaaatcctttctggatttttccgatggtctgatcttcgacagttacggaagcttctgatactctctggataataaatctcatctgtagaatctcctgtctgttttatttgataatccggatctctccgattttgtggatttcctttttgggcgcgtctgccggatatcccagagcagccattccgtatacgacatgatcggaaggaatttcaaactcatcaagcagagcacggacttcaggatcatcacagagtgtgcggagctgattgatccagacagaaccgattccgaaggaatgtgcagccagaaagatgttttccagggcacatgcattgtcttccataccgtgtggattttctttttggttggaagggatgataagaacctgcggacggtacatatcatagccctttcgtccaagttttcgtccgatgagttctgccagctgctggattttttcctgattgcagagaaccgtaaacttccaggtctgcttgcccataccgcttggggcatagatggcagcctgcaggatctcgtttaattcgttatccggaatttctttttgtaaaaatgcgcgggtacttctgcgggtaagcagattttctatgattgcattcatattcaacacctcctgaaataaaatactttgatttctattgtatacttgtgttccgggaaagtccagagaaacaggttgcagaaaggaatcttttgatcggaaactgatagtaacaaaacgtgtcgaaaaagatcgggaaaatggaaaacgcagaaaagattccatacggaagtatggtatacttaatgatagtgaaagtggcgttttcatacagaccaggaggggacgaaggatgaagaaaaatctggagccactgaaagatgcactggaagagttggcagattttgcacgcaaaatggaaccaacagaatatgcctacttctacaggctgatggagcgcatggagaacaatgtggaaatctgtattttagtgagagatgacagattggaaaaactggaagcaattctgagacgggactggaatctggtgaagcggatgtatggtgatatgtggaaaatggatttacagaatgagaaagagaggtatcgatttttacagctgctgacagagattgaatggtatctggagggaaaaggcctgatgcgtatggaagaaaaaaggtatggttatgcgaattgagagagcggcagatgcgaccgaaagggtggtgatctgccgcactttctgcgtgttgcgtcttaaaaacgaatttggtatgataaatagtaggaatacgggagcaaaggagatattatggacagaacgatttatgataattatgtaaaaatcttaagaaaagaactggttccggcactggggtgcacagagccgatcgctttggcctatgcatcggcaaaagcaagggaagtgctgggagagtttccggagcatatgacagtctggtgcagcgggaatatcatcaagaatgtaaaaggtgtgaaggttcctaattccggtgggatgaagggtgtggaagctgcagcagtactggggcttgcaggcggtgatccttctcaggcgctggaagtgttagaagccgtgacccagacagacatcaaaagaacgaaggaattgcttcgggaatcattttgcgactgctgtttaaaagaaggtgtggcaaatctgtatatcgaagttcaggttgtaaacggagaaaatgaagcgacagtcatcattgagcaggagcataccaatattacaaggatcgagaaaaacggaaaaattgtgtatgcgcacaagaaagaagtgtcaggggaagaaattgaggtggataaaagtctgttgaatctggcagatatccttgtgtttgcgcaggaagtggatttaaatgaggtacgagatgtgcttgcccggcagatcaggtacaattccagaattgcaaaggaaggtctggagcatgaatggggtgcccaggttgggcgggtgatcgcagaggaattcgggacgactgtacagtggaaggccgtggcttcggcagcggcaggatcagatgccagaatgagcggatgctccctgccggtcattattaattctggttccggtaatcaggggatgacctgttctctgccggtgatcgaatacggaaaagagctgaaaaagagtgaagaagagatttatcgtgcactgtgtgtatcgaatctggtagcactgaatcagaagcgttatatcggttccctttcggcctattgcggcgcagtttgtgcggcagcaggcgcaggagcagggattacgtatctgtgcggcggaaatctggaacaaatccagaatacggtcgtcaatacgatcgcggatgcaggcgggatcgtatgtgacggtgcgaagccaagctgtgccgcgaaaattgcaacatctctgcaggctgcaatcttaagtcacaagatggcaatgcgcggactggtgtttggcagtggagaggggcttgtcatggactgcccggaagatacgatcaaggcggtcggatatgttggaagagcgggaatgaagcagacagatgtagaaatcctgaatcttatgatcggaaagacaaaaatagaagatatcgaaaaataagagaaagatcagcctcatgtaaaaaggggctgatttttgtaagtaaaagaaaaacagatgaaacttttcagaaggaaatccggtctaatgagtgtaaagcagttcaaaacagcaggaaagcggggtgagaggtgatgaaatatctggtaaaaaaggcacagaagaaagacgatcaggcatttgtggagctgatggagcgctgtaagagcggaatgtataaagtggcaagaagttatttaaaggatgatgcagatattgcggatgcgatccaggagacggtgatcaattgctatgaacacatcgggcgcctgaaaaatgcagattattttaagacatggctgaccaggatcttgatcaataactgtaaggatatactggcagcaggaaagcgggtgtatcctctggagcagattgaagaacaggagaatacgtgtatggagatgcagaattatgaatttcaggaattgatgaactctctggatgaaaaataccggatcgtgcttcttttgtattacggagagggatttaagatcaaagagatcgcacaaatactggagatggatgagaatacggtgaaaacaaggctgtccagaggacgaaagaaatttgagcatgcgtattccatgtgttaaagaaggaggcagtgaaatgaagaaagactattctgtagatgagatgaaaaaaattatgggaaaggatatggaggttccgaaatctgtggatgagggaatgaaaaaagcgtatgaacagcttggaattcagaccacgagaagacacaacagaaaatataaactttggacaggtctggcagcggcagcagtactgacggcagggctttccatcacggcgtttgcggtgacaaaatatctcaatgtaacgcgaagtgaggagggggacacactccagtatcagattgaagtggatacaaagcagaaagaggcgcatcagatcaaggtggagccgacctatatgccggatgggtatgaatatcaggaagaaggtccatatggcggaaagtggcataataaagagaccaacagtgggatttccatcataccgtataatgcggcagagctttacaagatgtccagagtggatgaagattcttttcggaaattccgtaaggaaagccgggtaaagacatcagatacagaggataccaaactggatctgtttttgatggactcggaatatgtggacagtgagaagacagagaaaatgttatatcttttcaatgaagaagagggatatggaatttatatccacaatacgagcgatcttccacaggaagagattgaaaaagtggcagaagggttgaaggttaccgttctggatgagactgtaccatatccttcggaggaagagatccagacggaaatcgaagaaaagaaatggctggaagaaatggaagcgcaggcgggaaatacgattccggcagaaggcgtgcgttcaatcggtgaggagatcaaaaatccgttcagagatgagaattcaacagagtttgaagatatccggtttacggtcaaggatatcaaaattcaggatacgctgccggtcgatcagtttccaagagaaaactatgcccagtatgaagatgaggttgctctgtgggtgcatgaagacacctctctgaaaccgcatgagagatatgtgctcgatgcaggagaatggggtacaacggatgcaatggcaaacaaagaggcagaaacggtcaattccaagtatgtagttgtaaagatgcaggcagagaattgttctgatttccagacagagtggaatgcaagcgggggaatcagcatcgctccggatctggcatacatgaagaccaatgaggacggaagcctgtcaagggcagattatcagctggtgggagcgaatgaaaattataacctgcagtggacagccggaaacggggcatctttcccgatttattttgacaagatctactatacagaaggcgtgcagagaatgaaagatgcattcttccggccgctggcagcaggagaaacactggaatatacactggtttatgtggcggatgaggatcagctggattccttatatctggatatatatccgggatatggaaacacagaggaaggtgtagccgctccatatgtaaaagtaaaataagtggtttagatttctttacagaaaatggaaaaacgcctatactgttaggaaaagaaggattcggacaggaggcaaaaacagatggcggcgtttttaaaagaaattgaaaaattttacgggacaaaagagaaaaaccggcagggtgaggatctggagacgtttctggagcattatgatccccgcaaatatgagacaccgagctgtaccacagatgcggtaatcttttctataacaggagagcttctggaggtgaatcagctgaaagtgcttctggtgcgaaggagcaatcatccaagcatcgggttctgggcgctgcccggcgggtttgccgaaatgagggaaaatctggaggatacagcaagacgggaactggaagaagagaccggagtaaaagatcttccattggaacagtttgcagtatatggagattatgacagagatccgaggacccgtgtgatcacaacggcatatctgtcgcttgtgaacgagcaggacatcacggtacgggcaggggatgatgcggcggacgcggcatggtgcagcctctgcctgaaagaaaaggaagtccacacaggagaagtcagcagaaaagtctggcagcttcatgtgtcaaatgaagagaaggggctggatacccgggcggaagttgaagagacatgcagggaagggctgattcgggagcgaaagtttcaggtgctcacaggcggagagattgcagtagatcacgcggcgatcattgtacaggcaatgtgtattctggcagaccgccttttagaaaagagataaaaagacaaaaaagtactggtatcggcagtgtgaaaaagtacctgccgataccagttttttatgattttttctgttttttccggctgctggaaatatatgcgataaatccaagacaacccagtgcgatcagcatccagatcacaaaaatagtcgttccctgcgggcggaacatgtcgtaatagcctttcagatagatcacgactacgacccacggcaggatatgtgtcatatagaagcgagcttttgccggaaactttaagccgtctccgctgtttgcttcctgaatgaaatttttccagccccatccgtttttgtgcgtacagaacaaaagatatacaactgagccgagcggaaggatattgttggatacaataaagtcttccagatccataatgtttgtgcctgcgccaagcggctggaaaccggaccatacgctgaatccgaggatacatggaatacttaaaactgtgatcaggagaatattgatccccacggctttggttctcttccatccaaacagatccatccagaaagagacaatgttctcgaagactccgacaatggtggacagtgccgcacagaataaaaacaggaagaataaagagccccagatccgtcctccggccatctgtgtgaaaatgttcggcagcgtgatgaatacaagtcccggtccggcatctggttctacgccaaaagcgaagcaggaaggaatcacgatcagcccggccatcagtgcaacgcaggtatccagaagcacaatgctcagagattctccggcgagagagcgtttcttatccaagtagctgccgaagatggccataccgcccattccgatactcaacgtaaagaaggcctgactcatagctccaaagatcacatttccgataccgtttttggccatacgctcaaagtccggcaccaggaaaaagcgcagcccttcggaagagccggtcagtgtcacggaacggatcgtcaggataaccataattcccaacagacagagcatggtgatcttcatgatcttttccacacctttttgcagaccaatgctgcagattccaaaggaaagtacgatcaccagtaccgtccagaacatcagcgtcggaacggaagagagcattccggtgtatttttcagagacttcagaagctgtcactgaggcaaattctccttttgccatgcgaaagcagtagtagagcatccagccgcctaccatagaataaaacatgaccagaagataatttccggcaatggctgcccatctggcgtaatgccacctggtgtgcggcggttccagtgcattgtaggatgtggcaatacttttctgacttgcccttcctacactgaattcacatacaatgatgggaagtcccaggatgacaagaaagagcaggtataccaggataaaggccgctccgccgtattttccagccatgtagggaaacttccagacgttcccgagcccgatcgcacatcctgcagataccaggataaaaccgaggcgggaaccaaactgttctcgtttcataaaaacctccataaacatataatattatttctccccgcgggagttttctttggaaactttgttagtataccacgttggcgcggcaaagtaaagaaaatgttgggtatgtaccttgtcggaaatgcggatttatgataagataatcggaagaatgtttgtacacgaggaggaatttatggaaaacgaagcagtttcaaaaaatttcattgaacaggaaatagacaaagaccttgcagaaggcgtttacgatcatgtgtgcacccgtttcccgccagagccgaacggatatctgcacatcggacatgccaagtccattcttttgaattacggactggcaaaaaaatacaatggaactttccatatgcgttttgacgataccaacccgaccaaagaaaaagtggagtttgtggattcgatcaaagaagatatccagtggctgggggctgactgggaggatcatctttactttgcatccgattattttgagcagatgtacgaatgcgcagtaaaactgatcaaaaaaggaaaggcatatgtgtgtgacctgactccggaagagatcagagagtacagagggacactgacagagcctggaaagaacagtccgtacagagaacgctccgttgaggaaaacctggagttgttcgaggcaatgaaagacggaaaattcaaggatggagagaaggtgctgcgcgcaaagattgatatggcatctccgaatatcaatatgagagacccgatcatttaccgtgtggcacatatgacgcatcacaatacaggagacaagtggtgtatttatccgatgtacgattttgcacatccgatcgaggatgcaattgagcatatcacacattcaatctgtacactggagtttgaagatcaccgtccgctgtatgactgggtagtcagagagtgtgagtttgagatgccgccaagacagattgagttttctaaattatacctgaccaatgttgtgaccggaaagcgttacatcaaaaaactggtagaagacggtgtggtagacggatgggatgatccgcgcctggtttccatcgcagcacttcgccgcagaggatttacaccggagtccatcaagatgtttatcgatatgtgcggagtatcaaaaagccagagctctgtagactatgcgatgctggagtactgtatccgtgaggacttaaagctgaaaaaaccgcgtatgatggcagtactggatccgatcaagctggtcattgacaattatccggaagatcaggtggaatatctggatgtgatcaacaatctggagaatgaggagcttggtatgagaaagattccgttctgcagagagctgtatatcaacagagatgattttatggaagaaccgccgaagaaatatttccgtctcttcccgggcaatgaggtacgtctgatgcaggcatattttgtaacctgtaccggatttgaaaaggatgaagacagcaacatcacagtggtacactgtacgtatgatccacagacgaagagcggcagcggatttaccggaagaaaagtcaaaggaacgatccactgggtaccggcaccgtatgcagtaaaagcggaagtgcgcctgtacgagaatctgatcgatgaagaaaaaggcgtttataatgaggatggttccatgaacttgaacccgaactccctgacagtcttaaaagactgctatgtagaaccgaattttgaggatgcaaaagcatatgacagcttccagtttgtaagacagggatatttctgtatcgatgcaaaagattccagagaggatgcactggtatttaaccggatcgtgtcactgaagagttcgtttaaactgccgaaataagcagcgtgaaattatgaatgaattgactataaatcttcacacagcatctgagacaccgctgtatgagcagatttatcagcatattaaaagagagattcaggagggaaggattaccagcggggaaaaacttccctccagtcgttctctgtgcaaatatctggaagtcagcagaagcacagtggagcttgcctatgaacagctgatctcggaagggtatgtggaagcagtaccgtgtaaagggtatttcgcggcagaactggaagggatgtatcgtctggatgtcgttcctgctttggtgggagcagaagaaaagacagagaaaaaagagtggaaatataattttacaccgaacggagtcgatctgaacagtttcccgtataatgtctggcgaagacttgcgaaggacagtctgttagatgaccgggcagagatgttccgtctgggagattctcagggggagtacggactgcgaagtgcgatcagcagatatttgtatcaggcacggggagtgaatgcacatccggatcagatcattatcggagcaggaaatgactatcttctgatgctgctttccacagtgatcggccagaatcataaagtagctctggaaaacccgacctacaagcaggcataccggctttttaaaagtctgtcttatgatgtatgtacagtggatatggatgagaaaggaatgaaagtggccgatctgaaaagttccggagcagatattgcgttcgtgatgccttcccatcagtatccgctgggaatcgtaatgcccatgaaacgcaggatggaactgcttaagtgggcagccaaagaccctgcacgctatattatcgaggatgactatgacagtgagtttcgatacaaagggaagcctattcccgcgctgcaggggtatgaccgatgggaaaaggtgatctatatcggaacgttttcaaagtccatcgcgccttcgatccgtgtcagctatatggtgcttcctgcgccgcttttaaaggagtttcagaaaaaaagcagttttttaagttctacggtttccagggtagatcagctgattttacagaagtttatcgaggacggacattatgaaaggcatctgaaccggatccggacattgtacaagagccgtcatgatacgctgatgggctgtttgaaaacatttcagaaaatctgtacgatatcgggggagaatgccggagtacatatgctgctgcattttgccggtgatatgacagaagaagaattgattcgaaaagctgcggaaaaaggcgttcgagtatatggactttcgcaatattatatcgatcctcctgacgggctaaaaccgacgatcatgctgggatatgccaatatcagtgaagataagatgaaagaagcagtaaaattgctggaagaagcgtggaagtgagaatattcatccgggtaaccagcagcacatgtctgcggcggacggactttgttcgataaagtaaaaaacaggaactgttcaaaagtggccagttcctgttttgcattattcttccgattcagtatcagttgcttgtgtttcttgggaaggttcttcttctgtatcagcagtatcggatgctgctttgttcagatgcacatatccgcgttccgataccggttttaaatcattgtccagatcaaaatcctcttcttccatatcttctgtacaatcatactcggaaactgcgtcactgtctttgcagaaataagcaatgatcagaccgatcgcagtaccgacagccgcaagaccaagaaaccatttcaaaaactttttcatcgtaaaaatctcctttccagcagatgttatgaatcgatatccattgtaatacttttcgccgttaattacaagacctttgagagttactgttcacagtaacttttgagaagctgtattgtggagaaatacaaagtgtgctacactggggatattgaaaaaagcaggggtgaaacaaaaagatggaacataaagcagtgaaaaaagcgaagaaagggttgttcagcattgtttttggccgtacagcactgatccttatgcttgttctgatccagctgatcgttctggttggagtggcaacgatactgaatgactatgccgtctatgtgtacggcggatttacagttctggcagcagtgatcgtaatttatattatcaatgaaagaggaaatccggcatttaatatgacctgggtacttttgatcctgatttttccggcatttggatgccttttctatatttgggtaaagtctcagcttggaacaagatatatcggaaagcgattgtgtatgctccggcttgatacagcaaaatatatgcagcaggagcctcaggtgattgaagccttgcgtgagagcaagccggccaatgcaaaccttgcgcattatatgcagtatcagctgaattttcctacttatcggaatacacaagtgcaatattttgcatgtggagaagaaaaatttccggtgcttctggaagaattgaagaaggcggaaaaatttatctttctggagtattttattgtagaagaaggatatatgtgggggtctgtgctggaaatattaaaagaaaaagcagccgcgggcgtagaggtacggtttatgtatgacggaatgtgcagcatttcgctgcttccgcccgattatccgaaaaaaatccgtcggttcgggattcagtgtaagatgttcagtccgatccggccggtactttcgacgacacaaaataaccgggatcacagaaaaatctgtgtgatcgacggaaaaacaggatttacaggaggtatcaatctgggagatgaatatatcaaccggaaagaacggttcgggtactggaaagatactgccgtcatgatcaagggggatgcggtgcagagtctgacgatgctgtttttgcagatgtggaatgtttcagaattaaaaaaagagaaatttgagccctatctgacgacgatggcaaaggaattaaaaccggagaccggatttgtgctcccctacggggacagtccgtacgatcatgaaaacgtaggggaggaagtgtatgtgcatattttgaatcatgcgaaaaaatatgtgcatattatgacgccgtatctgattttggacaacggcatgctggatacactgacaagagcagcaaagagcggaattgaagtctgcatcatcatgccgcatattccggataaatggtatgcgtttgcggtggcgaagacatactatcgggaattgatcgaagcaggagttaatatttatgaatttacaccgggatttgtgcatgcaaaggtatttgtctcagatgatgatacggcaacagtaggaactgtgaacctggattaccggagtctgtatctgcattttgaatgtgggatctttgtgtatgacaatccggtggtacataaaattgaaaaagattttcaggaaacactgaaaaagagctgtaaagttacagcgtcagatatcggaaataccggtatttttatgcggatctgcggaagagtgctgcgtctgatcgcacctctgatgtagaaaaaagaaaaagtgttttacagaatgagaaaagtatagtataattcatagggcagtgattcataagaactgctaattaagagttaaaagcgatgaatacgcaggaggatttgagatggtaaaagcagtagtaggagctaactggggcgatgaaggaaagggcaagattacagatatgctcggaaaagaagccgatatcattgtccgttttcagggtggagcgaatgcaggacataccattgtaaatgattatggaaaatttgcgctgcacactttgccgtcaggagtattctatgaccatacgaccagcattatcggaaacggtgtggcgctggatattccgagattgttcggagaggtgcagcagattgtaaaacagggcgtaccgcagccaaaacttcttgtttctgacagagcacagatcgtgatgtcttatcacaagaattttgatgcttacgaggaagagcgtcttggaggcaagtcttttggttctacaaaatcaggaattgcgccgttttattccgataaatatgcaaagatcggattccaggtgagcgaattatttgatgacgagcttctgaaagaaaaagtggttcgcgttgcagagcagaagaatgtgattctggagcacttataccataaaccgttgatcaatcctgacgacttatataaagaactgacagagtacagagacatggtagcaccatttgtatgtgatgtttctctgtatctgcacaatgcaatcaaagaaggcaaagagattcttctggaaggacagctcggttctctgaaagatccggatcacggaatttatccgatggtaacatcttcttccacactggcggcatacggtgcgatcggagcgggaatccctccgtatgagatcaaacagatcatcacagtatgcaaggcatactccagtgcagtaggagcaggtgcatttgtcagcgagattttcggcgaggaagctgatgagctgagacgccgcggaggagacggcggtgaattcggagcgacaacaggacgtccgagacgtatgggatggtttgactgtgttgcttccaaatacggatgcaggatgcaggggacgacagatgtagcgtttacagttctggatgtacttggatatctggatgagattccggtatgtgtaggctatgagatcaatggagaagtgacaacagagttccctgtaacacatctcctggaaaaagcaaaaccggtattgaagacacttccgggatggaaatgtgatatccgcggaatcaagacatacgaagaactgccggagaactgcagaaagtatattgaatttattgaagaacagattggatatccgatcacaatggtcagcaacggaccgggaagagacgatatcatttatcgcaaaagataaaaggtgaacgaaggtgttccgtatctgccagcaaaagctggcagcggagcatctttttttgtgaaaaaatgttaagagatttttatgaaaaactttagaaatcagccacatcggcgtcacaatttgacagtaggataaaagagtgtcaggggacaaaaaaagttctgtcaagcaggcagaaaaatgacatatttcagagggcagtatcataaaataataaggctgaggccggaaaaaggaggtattttatgcgtcagaatagtatacagaacagattacagatgatatcgatggaagaatacctggagaaaagacagaaaattcgagagaccgaaagaaaaagagacaaaaaaacagtctgcaggcagcaggaactggatgctgccgttgcgatggcagagctgtatgtttaacagaagaacattactcgttcgagtcggagtcatccgtatgagatgtacgggaaaagagtgtatagatatataacagtacaggcagtaggatcgtggcggcaatggcagccatcagaagcttctgagagacaacgctgtctataaaagcaaagatgagtgtgctgacgtaaagaagaaccagcaggattgctccgatcagtgccatgatacgttttgatttcttcatattagattcctttcttttatctttttataaatctgccggagcatctttttgctccggcagatttattatatacaaaagatagaaagattgcaatatagcggtaaaattagtagtttactgacagagaaaagtgttatataatagaaccacgattgaatttctaagaaaaaggagtttttacaatgagtgaaaaatgtttattagatcaatggagagatatggcatacgacagagaactgtccaaagagcagttagagaagttctggggtcgttatttcagcattgaaagaggaatttatgagcagcttttgacagagcctgatgtagaagtgaaaggtacggtcaaagagctggctgaaaaatatggacaggaagttctgacaatggtaggatttctggatggaatcaacgacagtctgaaagtgccgaatccgattgagacgatgacagaggatacggaagtgaatctgatctttgacaaagagctgttatacaaaaatatgatcgatgcaaaagcagactggttatatgaactgccacagtggaatgctatttttgacgaagaaaagaaaaaacagttataccgtgagcagaaacagtccggtacgatccgcaaaggaaagaaaatcggaagaaatgatccatgtccatgcggaagtggtaaaaaatataaaatgtgctgtggaagaaatgcatagcagtatatcgtatgagagggagctcggatgagtctcccttttatgtttcgaaaaaagaacaggagatgagcatggaaatttatttgatcacggcaggggcgctgtttctcttttattatggaatcctctgtttctataccggaaaatgggactctacgtttgccagattctggctggtggcggggatcgggcactttttgatgattcctgcgacaaaagaagaagtgacgcgaaagcttttgttcttctgtgtggcgggaatatggatcctttttcttgcggtggagttttttattgtacgtgccatgaggcctggaagaaagaagaactgccggtatctgatcgtgcttggtgcgcaggtccggggagagcggatcacagattcattaaagagaagactggatgctgctttattgtatcatcaggtctgtccttcggtgaagatcatcgtatccggcggtcagggaaaaggtgaggatgtttcagaggcttatgcgatggtacaatatttgcgggaacatgaggtaaaagacgagcagatcatgttggaggatcagtcgcggacgacgagggaaaacctgcggtttagcaaagcttatctggaggagttgaaaacaccggttggaattgtgacaaataattttcacttgtttcgggcacttttgatcggacgaagtgaagggtatgagaacctgacgggaattgcggcaggatgtaaccggattttgtttttgaactatatggtacgggagttttttgcggttgtgtggctgtggattcagagaggaaaaaagaaatctggttgacaaaacaaaaagtgatgttataatgaggattaggttgagaatataatatttcaatacaatgacgagacgagtaggatgtggaagaagacagagaagggagtcgcaggctggaagctcccgcttacggaagcatttgaaaactacctctgagtggctgaaaacagcccggtgatcccgttatcatcacaaatgagtggttccggtatttaataccggttcaaacagggtggaaccgcgagtatgatctcgcccctttttgcaggatatgcaaaaaggggcgttttttaattctgaggtctcgtggttgtgcagtaagagaaaggagccagaaagatggagtgtaattcgaattatcgtattttgaataaccaggtcaagattccgtgtgctgcatttggaacttataaagccgcagaaggaaacagcgcggatatcatcggtactgcaattcgtgccggatacaggcattttgatacggcttctgtttacggcacggagaaatatgtggcagaggctattgaaaagagcaggattccaaggcaggaattttttttgacatccaaggtctggaaagaggatatgggatatgaacagacaaaggctgcatttgcgaaaaccttagagcagcttaacacagattatctggatttgtatctgatccactggccacggcccacgttggactgcaaaaactggaagaaactggatttagagagctggagagcaatggaagaattgtatcatgcaggaaagatccgcgccattggggtgagcaattttctgccgcaccacattgagaacctgatgcagaatgccaaggtgactccggcggtcgatcagttggaatatcatcctggatatacacaacaggcagcagtagactattgcagaaagaaccagattcttgtggaggcatggagtccgatcggacgaagacgagtgttcgaagagccgctgattcttgagttgtctgagaagtatcatgtatcaccggcacagatctgtttgcggtttgcactgcagaatggcgtgataccaatgccgaaatcctcatccatggagcggatgaaagaaaatcaggatatcttctcatttgagatatccacagaagatatgtatcgtctggagacaatgcctcagattggatggtccggagagcatccggacagagaacgggtttatttttaaaatccggcgaggcaaaaagaagagaaaaggagagagattatgaagattatattaaaagacggttcctttaaggaatatgaaaacagcaaatcagtgattgaaatcgcagcagacatcagcgaaggacttgcaagagtggcgacagcaggagaaatcgacggagaagtggtagatttgagaacggtggtagacaaagactgtgaactcaatatcctgacattcaatgatgaaaaaggaaaaggtgcgttccgtcacacagcctctcatatcatggcacaggctgtgaagagattatatccggagacaaaactggcgatcggaccatctgttgcagacggattttactatgatgtagacagagagacaccgtttacagcagatgatctggaaaagattgagaaagagatgaaaaagatcgtaaaagagaatctcccgatcgagcagtttacaaagcctagaaatgaagcaatcgaatatttcaaagaaaaagaagaaccatataaagtagaactgatcgaagaccttccggaagatgagacaatcagcttctattctcagggagagtttacagatttgtgtgcaggtcctcacctgatgagtacaaaatatgtcaaagcatttaagctcacaagccttgcaggtgcatactggagaggaagcgagaaaaataaaatgctgcagagaatctacggaactgcattcccgaaaaaagcagagctggaagaatatctgaacatgttggaagaagcgaaaaaacgtgatcacagaaaactcggaaaagaactgggactctttatgatgagagacgaaggaccgggattcccgttcttccttccaaacggaatggtactcaaaaacgttcttttggattactggagagagattcacagaaaagccggatatgtggagatttcaactccggttatgttaagccgtcatctctgggagacatcgggacactgggatcattacaaagagaatatgtatacaactgtgatcgatgaggaagactttgcaatcaaaccgatgaactgtccgggaggaatcctggcatatcaggcggagccgcgttcctacagagatcttccgatccgtatgggagagctgggactggttcaccgtcatgaaaaatcaggacagcttcatggtctgatgagagtgcgctgcttcacacaggatgatgcgcatatctttatgacaccggatcagatcaaggacgagatcaaaggcgttgcaggactgatcaatgaagtttacagtctgtttggatttaaatatcatgtagaattgtccacacgtccggaagacagtatgggaagtgacgaagattgggaaatggcaacagacgcacttcgcggtgcgctggatgatctgggacttccgtatgtagtcaatgaaggagacggagcattctacggaccgaagattgacttccatctggaagattccatcggaagaacatggcagtgtggaacaatccagcttgacttccagcttccacttcgttttgaactggaatacacaggagcagacggagaaaaacacagaccaatcatgatccatcgcgttgtatttggttccatcgagcggtttatcggaatcctgatcgagcactttgccggagcattcccgacatggcttgcaccggttcaggtaaaagtactgccgatctctgataaatatctggaatatggacagagtgttctggatcagttgaatgcagccggaatccgtgccgagatcgacacacgtgccgagaagatcggatataagatccgcgaagcacagatgaagaagatcccgtacatgctggttgtgggagcaaaagaagaggaagagaaaaaggtttctgtaagaagtcgatttgcaggagatgaaggacagaaaggtctggaagaatttattgctgcaatcatggaagagactgcaaaaaaagaaatccgtgaagtgacaaaagaagaaaaataaatttttttgaaaatccggataaaagaattggaaatgggcatgatgatactgattttgtaaataaaaaggaggtattatcatgccagaattaaaatgtacagtacagacatgtatgcacaatcaggatttcctctgccgtctggattccatccaggtaggtggttctcaggcaaaggcttcaaaggagacctgctgtgacagctttgaggagcgaaaaacacaggggatggaaaattcctatacgaacgcatatggaaaccatgcgacagcgccttcggatcgttgcggaatcgattgtaaagcaactgactgcatgtacaatgaacagtgtaaatgtgaagcgggaaaggtcagcgtggaaggttcctgtgcgtgtcataaggacggcacagagtgcgccacatttcagtgcagataagaagtgaaagagaagaagcggtgcttggctttatggccgggcatcgcttttttgaaggttgacggtcttcctgttacaggggtataatggaaatacttgcaaaaccagaaaggaatgagatacatatatgaacagagagggagaaaaacctgaaaaagaggggaaaaaggagaatgactattatacgtcgcagccttcatttggaagcaaaaagacatccagattctggcatcagatcagcagggacgtacggatatttgtggtgatcgcagcctgcatcgtgttttattttgcattattgcgcatgacaaatatttcggaagtttttgggaaaatataccaggtgttaaagccgattatttatggtcttgtcattgcgtatttgctcaacccgattgtaaagctggtggatacgcattttgaaccctggatcaagagaaaatttccacgcattaagaatgcgggcggcatttccagaggggcaggaattttgcttgcaatcgttgtaatgtttgcgttaatcgtggcgttgtgcaatatgatgataccggaactctaccgcagtataagagatatgatccttactgtgccgagccagctgaatcgttttatcgggaagatgacagaggtgatgagtacagatcaatcgactattggacagatggcagaggcagtcctcaaagaagcaagtgatgcactgcagacatggatgcgtacagaccttctcaatcaggtcaatgtactgatgtcgaatctgacagtgggagtgatcaacgttgtcaaggaattgtgctatgtactgatcggagtgatcgtatctgtttatgtgctgttcagtaaggagaagtttgcaagccagtgcaagaagcttgtatatgccatcatgcgtccgtcaagagcgaatatggtgcttcatctgacgatcaagagcaacgagatcttcggcggttttattatcggaaagatcattgattctgcgatcatcggagtattgtgttttgtcggactttccattttggatatgccgtatacgatgcttgtgagcgtgatcgtaggagtaaccaatgtgattccgtttttcggaccatatatcggagcaattccaagcgccgtcctgattttgttgtcagatccgaagatgggaatctattttattatttttgtatttcttctgcagcagctggatgggaatatcatcggaccaaagattttgggggattctacgggattgtctgcattctgggtggtattttcgattttgtttggcggaggaatgtttggatttgtgggaatgattttgggagttcctacatttgcagtcatctattatattgtaaaaatgctggtgaaccatcagctggaaaatcatacgctgcctacagataccggtgcgtacgaccagttcggttatgtaaataatgaaggcgagtatgcaagagttgatgaggcgacagaaaagaaagaagaaaaaggggaataaattatgccaatacgtgtacagaacgaccttccggtaaaagagatactggagcatgaaaatatatttgtaatggacgaataccgggcagcacatcaggatatccgtccgatcaagatcgggcttttaaatctgatgccgttaaaggaggatacagagctgcagatactgcggtctctctcgaacacaccgcttcaggtggatgttgtatttgtccgtgtatcaggacatgtatcgaaaaatacatccaccagtcatctgcataagttttatcagtcttttgaagagatcaaggagcagaagtttgatggatttatcattacaggagctccggtggaacagattccgtttgaagatgtggattactgggatgagttgaaagagatcatggagtggacgaagacgcatgtgacttccacgctgcatttgtgctggggtgcacaggcggggatttattatcactatgggattgataagacacagcttccagagaaaatgttcggtgtatttaagcatcatgtgagaaacagaagaatcccgcttgtgcgtggatttgatgatgcgttttatgcgcctcattcccggcatacggagattccgttggaacaggtggaggcagatgagagactgacgatactggcagattccaaagaggcggggcttttcctctgtatggcagaggaaggtcgtcagatttttgtgatgggacatccggaatatgacagaatgacattggatgcggaatataagagggatttgagcaaaggtctggatattcagatgccggtgaattattatccggacaacgatccggatcagaaaccggaactgatctggagatctcatgcaaataacatttatacgaactggctgaattattatgtatatcagacaacgccgtatgatctggaggggacaccgttttaaggaggaatcagagagaggaacgaagagaatgagaaaaagaaatgtgagggggatttgtgcttttttatgcaccatccttttgggatgtctgattccggccggggaggtacaggctcagcgtgcgctggatgtggcaagagagaggggctatcagcttgaggaacggtatcagcctgcaggttcgatcattacggagatcaataccggacaaattttatggcaggaaaatgcacagaaacagtggccgccggcaagtatgacaaaattgatgaccattcttctggcatatgaggagataaaagccgggaatctggaacttgagagtacggcagaggtaaatgaaagatatacagatattgcaggcaggtatgcgctcagcaacaataaaatgcagccgggagccagttatacggttgcagagttgatggatctgatcattgtgccgtcttctgcggcggcaacgtatatgcttgcggatatggtggagtcggatccggacaggtttgtggagcgtatgaatcaaaaggcacaggagcttggaatggtcaatacgaagtacttcaactgtgtgggggttactaacaatctgctgcagccgtatcatccggtgagccagccgcttgatggagataacattacaacaccggaagattatgcgatgctgtgtacttatctgataaagacctatccggatattttaaatcacacaaagtatccccagatcaccgtaaaagaggggacaccgtatgaggagcattttacatcatatcagatttcactggaaggggcaaagtatggtctggagggcacagacggcttgaagacaggttccagcgatacggcagggtttaactattcgtccactgcaaaacggggggacacgcgtctggtggagattgtgatgggtgtgtctgactggtcagatcagactggggaagagctccgtcatctggtcggaaacgcgattatggagcaggcatttgaacggtttgaatataaaaaagtactttccaaaggggtgcatactattgatggaaagaaagtagagatttcaaaagatttatgggactgtgttccaaaagggaaagaagctccgcttacgatcaaggacggtaaagtgctggtagacttggaaagagaatatctgccgggatttcaggcaccggcagtttcgtgcaaacaggtggcggcagtggagaagaacgaacagaagggactgccgctgttcttgaaggtgctgcttgtactcgctgcagtgtttgtgattcttgtgggagcaagaatctcttatgtggcatatcggaaaaagcagagaaggaagcgccgggaagcacagagaagaagacgtgcaagaggaatcagagaattagaggagaagtaagacagggaggaaacaggatgagagagcagcagttttcagcgatggtaaatcagtttcagccgggaatttttaccgcgctgaatgacaagaaggaagagatgattcaggcaggaaaacgggtgttcaatctgtcagtgggaacaccggattttgcaccggcaccgcatgtgatggaggcacttacagaagcgtgcaaagatccggagaactataaatatgcactggcagatctgccggagcttttagaggcagtccaataccggtatgcgcatcggtttggagtggagattcagacagatgagattatgtcagtttatggatctcaggagggaatggcgcatatcggaatggcattgtgtgatcccggggataccattctggttccgaatccgggatatccgctgtttgaaatgagcggaatcatggcaggtgcgaatgtggaatattatgaaatccgtgaggagaacggatatctgccggatctgaaaaatatcccgggagaggttttggagagaaccaaatatatggtagtctcttatccgttgaatccggtctgtgtctgtgctccggatcatttttatgaagaactgatcgcatttgcaaaggagcatcatattgtgatcatccatgacaatgcatattcggatattatttttacaagagaacaggggcggtcctttttatcctttgacggtgcaaaagaggtaggggtagagttttattcgttgtccaagtcctataatcttacgggtgccagaatctcatttgtggtgggaaataaagcgattgtagagaagtttaaaacgctgcgttctcagattgattatggcatctttctgccgattcagaaggctgcgatcgcggcgcttacggggccggacgatttcatcgaaaagcagaggcaggagtatgcaaaaagaaactgtgcgctgtgcggcggtctgcgaaggatcgggtggaatgtaccggacagtcaggggacaatgtttgtgtgggcaaagattccgaaaggctatgcgtcgtcctttgatttctgtatgcagcttgtggagaagaccggacttctggtaacgcctggaagtgcgtttggaagcgcgggagaagggtatatcagaatggcgctggtagttgatctgcccgtgatcggggaaattcttgaagtgcttgagaaatcggggatgttttagaaaaaagaggaggagacgagtatggactatcagaaagtgatcgaacaggcaaggacatgtatcggaccgtactgtaaagcgtgtgcagtctgtaacggcagagcgtgcaaaaatacaatgccgggacctggagcgaaaggaatcggagatgtggcgatccgaaattttcagaaatggcaggagatccgtatcaatatggatacgatctgtgaaaagaaaccggctgatacgacagtgactctgtttggaaaggagttttcctacccgttttttgcaggaccggtaggtgctgtgaagctgcattacggggagaaatatacggatcaggaatataatgaaattttactggcaggatgtatggaaggaggaattgcggcatttacaggtgacgggtcagatgcacgggtaatgcaggaagccacagcggcagtccaaaaactgggaggtctgggaatcccgactgtaaaaccgtgggatatggatacgattcgtgacaaaatggaactggtcaaacggtcaggggcttttgctgttgcaatggatattgatgcggccgggcttccgtttcttcagaatctgaatccgccggcgggaagcaaatctgtggaagagttaaaagaaattgtgaaaattgctgaaattccatttattctaaaaggaatcatgacggtcagaggggcgaaaaaggctctcgaggccggtgcacaggcgattgtggtgtctaaccacggaggaagagtactggatcaatgtccgtctacagccgaagttcttccggatattgtgaaggcagtggatggccggatgaagatttttgtggacggcgggatccggacaggaacggatgtctttaaagcactggcaatgggcgcggatgcggcactgatcgcccgtccgttcgtgaccgcggcatatggtgcgggagtgcagggtgtgagtgcatatactgcaaaaacaggtggtgaattaagagataccatggcaatgtgcggtgcatttgctgtcaaggaaattacagaggaaatgctctggtaaatgagagactttttgtgaaagtttccgtattgactctgactgctcaaagtgataacatattcgttgctgacacatgatatagtttatcctgtgtgataaaaacactaaatatagataaaacaaaagcgaagggagcagaagttgtatgatcagagtcatcaagaaagacgggacaaaggaagattttaacgtgcagaaagtagttgtggctgttaataaatctgcgtaccgtgcactcattaaattcacagatgaggagttggactatatctgtcgtttcgtagaagaaaaggtacagacattgggaattcaggacgtcccgattgcagagatgcataatgtggtagagggagccctggaaaaggtaaatccggtggtggcaaaaagttatcgtgattatcgtaattacaaacaggactttgtacagatgctggatgaagtatataaaaagagccagtccatcatgtatatcggggataaagaaaacagcaacactgacagtgcgctggtatcaacaaagagaagtctgatctttaatgagctgaacaaagagctttataagaaattcttcctgacagtagaagaaatccaggcgatccgtgaagggtatatttacattcacgatatgtctgcgagaagagatacgatgaactgctgcctttttgatgtgaaaaatgtattaagcggcggatttgagatggggaatctctggtataatgagccgaagacactggatacagcatttgatgtgatcggggatatcgtattaagtgcggccagccagcagtatggtggatttacagtgccaagtgtggatgagatcctggaaccatatgcagaaaaatctcacaaaaaactgattgaaaaatacagagcgttgggtctggatgaagaagctgtacaaaagatcgcatggtcagatctggaaaaagaaatggaacagggattccagggatgggaatacaagtttaattcggtatcttccagccgcggagactatccgtttattactgtgacagccggaacacggacaagtatttatggaaaactggcaacgatcaagatgctggaagtgagaaagaacggacagggaaaagaaggtcacaaaaagccggtactctttccgaagatcgtatttttgtacgatgagaatctgcatggaccgggaaaaccgctggaagatgtgtttgaagcagggattgaatgctccagaaagaccatgtatccggattggttaagcctgacaggagatggttatgttccgagcatttacaaaaaatacggcaagatcatcagcccgatgggatgtcgtgcatttctttctccatggtatgagaggggcggcatgaagccggcagatgaaaatgatacaccggtatttgtgggaagatttaatatcggtgcgatcagcttacatcttccgatgatctatgcaaaggcacagcaggaaggaaagccgttctttgaagtgctggattattatctgaatctgatccgcaagctgcatcagagaacgtatgattatctgggtgagatgaaagcctctacgaacccgctggcatattgtgaaggaggattctacggcggaaacttaggattatatgacaagatcaagccgctgttaaaatcagcgacagcttcctttggaattacagcacttaacgaactgcagcagcttcacaacaaaaagtcccttgcagaggatggggcatttgcggtggagacactggaatacatcaacaaacgtgtggaagaatttaagaatgaagacggacatctgtatgcgatttacggaacaccggcagagaatctctgcggagttcaggtgcagcagttccgcaaaaagtatggaatcattgaaaatgtatcggacagagaatatgtcagcaacagttttcactgtcatgtaacagaagagatcacaccgattgaaaaacaggacctggaaggacgtttctggaacctgagcaacggcggaaaaatccagtatgtaaaatatccgatcagttacaatgtggatgcgatcaaatctcttgtgagacgtgctatggcaaaagggtactatgagggcgtcaatctgtcgttgtcttattgtgatgactgcggtcacgaagagctggatatggatgtatgtccggagtgtggaagtaccaatcttacaaaaatagaaagaatgaacggttatctctcttattccagagtcaaaggcgacactcggctcaatgacgcaaagatggcggagattgcagaaaggaagagtatgtaacatgcagtatcacaatattacaaaagatgatatgctgaacggagacggacttcgggtagtattgtgggtggcgggatgcactcacggatgcaaggagtgtcagaatcctgtgacctgggatccaaacggcggacttttgtttgatgaacgcgcaaaagaagagctgtttgagcagttggaaaaaagttatatcagcggaatcacatacagcggaggagatccgttgtatgtggggaacagagaggcgattaccgcacttgcaaaagagatccgtgaaaagttcccggaaaagacacagtggctgtacaccgggtatgagtggaatcagattcaaaatgaggcgatcataccgtatctggatgtagttgtggacggcagatttgaagtggaacaaaaggatacgaagctgcactggaagggtagcgcgaatcagaaagtgatcgatgtgcaggacagtctgaaaacaggaaaaattgtgctgcatgatgcataaaaccgaacagaaaaggaagagacaatgaaaagaattgcaaaatttcacaaggtaagtctggagcagtttaaaaaagactggattgatacgttcggactggatgaagaagcaaatatcgaagagatttatgaaaatatcaaactgccaagaagagcgactgcaggttctgcagggtatgatttctttgctccggtacgtttgatcctggagccgggagagactttgaagattcccaccggaattcgcgtggagatggatccggagtgggtgctgaagtgttatccgagaagcggactgggattcaaataccgtctgcagctgaataatacagtaggcatcattgacagtgattatttttattcagataatgaagggcatatgttctccaagattacaaatgataccaatgaagagaaaaccattgatatcgcgcagggagaaggttttatgcaggggatttttgtggaatatggaatcacggtggacgatgatgtgacagatgtaagaaatggtggttttggaagcaccacaaaatagaaagaacaaaaccttacaggattgtaagtaaatttaagaaaaatgtaagaaaatattatggaagaatacagttgaattctatatactggacgtagaaactaagagttacttcagaaaaaggatggtacagtatgaaatggatcaagagactgtgttctttcatttttttatgtttgtttttggttgttgcatttatgctctggcgagggtatggagactgtcaggatgcattaaagaaaatgagtgtacaacaaatgggtgcacagatacaggcaaaagaggattacacgacactggatcagctgccaaaggattatatcgatgcagtactggcggtagaggataagcggttttataagcatccggggatcgatccgcttgcgatatgcagggcattgtacaatgatatccgtgcaggatcatatgtagaaggcggaagtacgatcacgcagcagcttgcgaaaaatcagttttttacacaggataaaaagatcagtcggaaagtggcagagatgtttatggcatttgagattgaaaaagtctatgataaggatacgatattggagctgtatttaaattccatttatttcggaaacggttataactctgtggcggaagcctgccgtggatatttcgggaaggaaccaatggaaatgaattttgatgaatgtacaatgctggccgggattccgaatgcaccgagtgcatacaatccgctggtaaatccggatctggcgtatcaaaggcagcagcaggtgatccgaaagatggaaaaagcagggtttttgaataaatagaaaagaatcgggaaatctaaccatagaagcaaaccggaattgcacgagactgtgttttgtggcagtccgggaagggaaggacagacattctatggtaattaagaatacaaaaaagatcagtgactcatttatggaaaatatttcctatatggatcggacattgcctgtgggaaaaagttttgatctgataaaacggacaatcgagattggtgaaagaaaagcagttctttattttattgacggttttgtaaaagatgaagccatgctcaagctgatggattcttttatgggcgtgacaaaggaggcaatgccaaaagaggcagaaatgttttctcagaggcatgtaccatatattgaggttgatgtgctgaaagattttgatcaggtgctgcggaacgtgttatccggagtgacctgtctgtttatagaaggatatgccgcctgtattgcgattgacacaaggacatatccggccagaagtgtggaagaaccggacaaagataaatcgcttcgaggctccagagatggatttgtggagacaatcgtatttaatacagcgctgatgcggcggcgtatccgggatgaacatctgattatggagatgacggaagccgggcagacttcccgcacggatatcgtgatctgttatatgtcagaccgagttgacaaggaacttcttgccaatgtaaaatcaaggatcgaaagcctgcatatcgacgatctgaagatgaaccagcagacgcttgcggaggcaatgttcaagagaaaatggttcaatccgtttccgaaatttaagtttacagagagaccggataccgcggtggcgtgtcttctggaaggcaaagtaatcattttagtagataattccccttctgctatgattcttccgacttcgattctggatatgattgaggaagcaaatgattattattttccaacagtgacagggatgtatttgaaggtttccagagcaatcatcacgattctgacggtgtttatgacaccggtatatctgttattcatgatgaacccgtcctggatcccgagcatgtttgaatttactgccgtccgtgatgtgatcaacgtcccgcttgtgctgcagtttttgattctggagctttgtattgacggattgcgtcttgctgcgctgaacacaccgagtatgctcagtacaccactcagtgtgatcgcaggtctggtgctcggagagtttgcggtgcagtccggatggttcaactcggaagtgatgctgtatatggcatttgtagcggtggcaaactatacgcagccgaactttgagatgggatatgcattgaaatttatgcgtctgatcctcctggttctgactgcagttctggattggatcggatttttacttggatgtttattcatcctgtgctttttgatatttaacaagactctgtctggaagaaattatttgaatattaagttgaattagaaaacaggccggggattgcggcaaaatgctgcattgtccggtctgttctgttaaaaagcagaaaaggaatgaaaaaaattttgcgaaatgcaaaaaaaaatgatatgattaagaaaatcagacaacaggagggatgaaggaaatgcgggactatattattacagtgaacagtacagtggatatgccgaaggaatggctggcggaacggggcgttccggtgattcctctgaagtatacaatggaaggaaaaacctatacagatatggaaggcctgacaccaaaagagttctttggcaaactcagagaaggaaagatgtctgtgacgtcccaggtgaatccggaagaggcgaaagagatgttagagccgtttgtgaaagaaggaaaggatgtactgcatctgagtttttcttcggggctgagcggaactgccaatagtatgaggatggcggcagaagaactctcagaagaatacccggaaagaaagatccttgcagtggatacgctttgcgcctgcatgggagaaggacttcttttacataaagcgctgcagttaaaagcagccgggaagacaatggaagaggttgcacagtgggtggaagaaaataaacttcatatctgtcataatgtaacggtggatgatctccatcatctgcaccgtggaggaaggatctccaaagcaacggcagtgcttggcagcatggtgcagatcaagccgatcattcatgtagataacgaaggcaggcttcaggtgatcgggaaagaacgaggacgtaagaagtctctgaataagattgtcgatatggcagcagaacaggcaaaaggctgggaaaatgatctggtattgattacccacggtgattgtatcgaagaggcagaatatgtggcaggacgagttcgtgaaaaactgggtgtagatcatattctgatcaataatatcggaactgtgatcggaagccataccggaccgggagttgtggctgtattctgtatgggtgagaaaagatagaacaaaaagaaagtaaatagagaaacggtaaaaaagagttgtcaagaaacagcgaaaatcccgcggatgcaataatccgcgggatttttattacatggtgataataccaaacgcattcagaatagaactgatcaaaatcgcgatcaggaagattggagcaatccatttgatcatgactgtgaacatttttttgcttttgaatgcgccgttatcagaagcttctacttcatcaatgatggcctgcggcttgatcacgaatcctacgaagacgcaagtcagtacggcaacgatcggcatcagcacactgttactgatgaagtccatagcatccagaatggacattcccagaggcttgataaagtcaagtgctccaaatccgagggaagtcggaattccaatcagcagtgaataaacagcgaccaggatgcaggtaaaccttcttgaccatttgaatttatccataaaaatggaaacgatagtctccatcaaagagatggaagaggtcactgcggcaaaaaatacaaggataaagaacacggttccaagtacggttccaagaggcatgcttgcaaataccttcgggagagtgatgaacatcagtccggcgcctgcattcaaggcagattcatctccgcctgagaagataaatacagatggaacgatcatcaatcctgcaaaaaaggcaaatccggtatcgaaaatctcaatctgtcgtacagagctttccagatttgtagatttcggcatataggatccataagtaatcatgattcccatagcaagtgacatggaataaaaaagctgtcccattgctgccagaacggtcatgactgagaagtttgacatattcggaagcagatagtattttaatccgtccatggcaccgtccatggtcaggacataaattgcaatcccaacagtcagaacagcaagaatgggcatcatcactttgctgactttctcaattcccttttccacaccgaagagcacgacaagtgctgtcagagcaatgaacagtgagaaccagagaatcggggatgctgtgcttgcagtgaattcggaaaaataagaatcaccggatacagtggcagcaccttctgtgataaaagcataaaagtattttaaaacccatcctccgattactgaataataaggaaggatgatgattggaacgattgcggcaaggatgcctaaaaagccaaatcgtttatccagtttttggaaagcgccgatggcactcaaaccggtcttgcgtccgatggcgatctctgctaccattagtgtaaatccgaatgtgaccgctaatatgatgtagcagatcaaaaaagaacctccgccatattttgctgccagatacgggaatcgccagatattcccaagccctacggctgatccggcagcggcaagaataaaaccgatcttgccggaaaaattacttctgtttgttttcatatagaaacctcctcaactctttcactttagccagaacactaaaaatagattgcgctctgttattaagtggtattatgccatggatagtgaaaaaaaacaagttaaattagtgaattaaagtgaaaaagcagtaaagtttttaaaatagagaaaagatgttgacagaagcaggaaagtatggtaaattatattttgcgcaaagcgaaaaacaaagtagagtatccactctcaccatagcacaagtgagtgactattggtctgatattgttacatgcagaaagtttcctgtataggctctgttatgtagtgagattgggtggatatgagattcactctttttttatgcttgtgcgaagggaaacctaagggaaattcatttgacggaggtatacgaccattagcgatttaatgattaacgagcagatcagagacagagaagtccgtctgattggcgaggatggggaacagttaggaattatgtcatccagagaggcaatgaaacttgccgctgaagcaaatctggatcttgtaaagattgcgccgactgcgaagccgccggtatgcaagattatcgattacggtaaatacaagtacgaacagacaagaaaagaaaaagaagctaagaaaaagcagaaaactgtagaagtaaaagaagtgcgtttatcaccgaatattgatacaaacgacctgaatacaaaggtgaacaatgcgaagaagttcatcggaaaaggaaataaagtaaaggttaccttgcgtttccgcggaagagaaatggcacacgtacagtcaagcaagcacattctggatgattttgcggcattgcttgaagatgtggcagttgttgaaaaaccggcaaaaatggaaggacgcagcatgagcatggttttaactgaaaaacgttaaaataaaaaaatacggacatatgtccagcagggcagtacattaaaggaggaatttatcatgccaaaaattaaaacaaatagagcggcagcaaaacgcttcaaaaaaacaggtacaggaaaactgaaaagaaataaagcttacaagagccatatcttaacaaagaagtctacaaagagaaagagaaatctcagacaggctacaattactgatgctacaaatgtaaagaacatgaagaaagttttaccatatctgtaagatttgtaaaagtaataagaggaggattaagaaatggcaagaattaaaggcggaatgaacgctaagaagaaacataatagaacattgaagttagcaaaaggatacagaggagcacgttctaaacagtacagagttgcaaaacagtctgtaatgagagctctcacatctgcttacgcaggaagaaaagagcgcaaacgtcagatgagacagctttggattgcacgtatcaatgcagctgcaagaatgaatggattatcttacagcaaatttatgcacggactgaaagttgcaggcgtagatatgaacagaaaaatgcttgctgagcttgcagtaagtgataaagaaggatttgcaacattagcagagcttgcaaaatctaaacttgcttaatagaaagacaaaaaagatgagagatcgatggaaaaagtcgatctcttttttgttcgaagaagaaagtgacactgtcagatgagaaattgcaaagaggaattgcgcagtttctaaaagtctgattataatgaaaaagagaaataatataaattattcaaaaaattagaaaaatttaaaaaaatcagttgacatttttgcgtatcagtagtattatactaaatgtagcgtgtggtgaacaaaacaggctatggtaagcggaagtgtcggaactggcagacgagcaagactaaggatcttgtgatcaatgcgatcgtgtgggttcaagtcccatcttccgcataatgagagaagcatttacaggaaactgtaagtgcttttgttttatgggattaggatatctaaggttactggtaggagaattacaaaggtattgacggctggaaactaccttttgccatagaaggagagaagagtatctttgatgggttggaaatttcaaaagatacaaagctttgtgaagcgtatatggggaaatatccggttatttcaatttcccttaaaggaatcaatgctgctgcttatgaggatgcatttgattttgcagttcagattatgcaaagaacagcggaagaattccagtttctatcagatagtgaatacctgagcgaacatgataaatctgtatatagagaacttttggacagtaatatgagcgaaactgtattttgcggtggactgaaaatattgtcaaaattattagagaagcattatagattaaaaggttttcttttaattgatgaatatgatgttccattagcaaaggcatttgaaaatgggtattatgagcaaatgatatttcaagactatgtaaatgtgtttccggaaaactattggatcaacaccagcagtaatgatgccgtcaagaaatttattcaaatgtccgacaatcttaaaaccaagcgtgagattgaaactctgcttgccggcggggaaatcataaaagagattcatcaggagctgatctatccggaaatgtatcagtctttagagaacgtctggagtcttttatttatgacgggatatttaacgcagcgtggaagtggaagggttgatgcaaagccgtagcgttacctggagtatagaaaaactcctatgttataatttgttgaaactattaaaaacaaagaacatgaaaattataaacaaaaaaggtatgattccgaacatggaatcatacctttttataatatgcggaagatgggacttgaacccacacaagcgcaatgcttacaagatccttagtcttgctcgtctgccagttccgacacttccgctcattgcgatgaaaaacttacgtgaagcacatcacttttagtataatactatagagtttttaaaatgtcaactataaatttgaaaaaagtgtgtgatataaaattgacaattctgtgaaacgtgatatactaatagaaagtttacaagtaaacaaatggaggtggaaaaatgagcgcagagatgacagtggaaggtatgatttctgtgtttatgaagatcaggaaagtgtatgcagatgagtttgggagaatgttgggaaatgagacatattctccgaatgaaatatcaattttgctgtttttggcaaataatccttcaatcaatacgaacagtcagttatgtacatgtctcggcgtttccaaggcgcttgtatgcagaagtgtagatgcgctgctggggaaggagatgatcatcagtgtggcagatgaccatgataagagagtgcagcatctaaagctgacagaacatgcacttcctgtgatcgaacagcttggaggaatcaagcggaagatcgatcaggagatccttgaggggattcccgaagaggatattgcaaatatggccaatacaatggagaagatttttgcgcgatttgaagaacgggcaaaagggaaggagtcatcattatgaaactgaaaatgtcaaaagaggtggatctggggaaggagccgatcggacacttgttattcgtactggcagtgccttctattatctcacaggtggtcaatgcactttataatatggtggacaggatgtatatcggacatattccgggagagggtgcggcagcacttaccggacttggtgtatgttttccggttattatgatcgtctctgcatttgcgtcactgatgggaatgggaggcgcaccaagagccagtattctgatgggaaaaaaggataatgagggtgcagagaagatactgggaaactgtttttctgcactggtgattaccgctgttgttttgacagctctggtgcttgtatttaagcgtcctttactgatgatgtttggcgccagtgagaataccatcggatatgcagaaagctatctgaatatctatgcggtaggaacaatctttgtacagctcacgctgggactgaatgcttttatcgcagcacagggattttccaagatcagcatgatgactgtggtgatcggagcggtgacgaatattgttctggatccgatctttatttttggatttgatatgggagtacagggagccgcgctggcaacagttctctcacaggcgatcagcgcagtctgggcgatccgtttcctgtctggaaaagatacggtcctgagactgaaaaaagagaattttaagatcaaaaaagagatcatgctgccttgtatcggcctgggagcagcgccgtttatcatgcagtctacagagagtatcctggtattgtgttttaattcttcgttattaaaatacggcggggacctggcggtaggtgcgatgacgatcctgtccagtgtgatgcagtttgcgatgctgccgctgcagggactgacgcagggaggacagccgatcatcagttataacttcggagcgaataatgcagaacgtgtgagaaaaggcttccgctttctgctgatttctgcggtagtttatgcggcaggtatctgggcagtttcggagcttgctcctggcgtgtttgtgacaatttttacaaatgacccgcagctggcagagtttgcaaaatgggcgatgcgtatctacatggcggcagtggtactgatgggagcgcagatcgcctgccagcagacatttattgcatttggaaattctaaaatttctgcatttctggcaatgttcagaaagattattgttctgatcccgctgatctatattcttccggtatttctggaggatcatgtacaggcagtatttctggcagagccgatcgcggatgtgatcgcagtggtgacaacgctgctcttgttcagaaagaattttaaaaaagtactttcagagatgaaacagaaatcagaaacgcaagatgtctgatttttgagcaaaatcagcatggagggtgatcgtcagccgttacgaaaagaaaaaccacatggattttatgaaatacagtgtatttcacagaagtccgtgcggttttttctggtttcaggataaaaaagaaacagatgggaaaactaagacagaaaggatcgggagggcaaatcatgttagaaaaagtagatttgacaatgaagatggaaaaaagtgaatacaaggcaaaaatgactgctttgaagctgcagatgggaaaacttcagagacagtgtaaggaaatggggcttccgatcatgattgtatttgaaggatttgatgccgcaggaaaaggaatgcagatcggaaaactgattcagagtctggatccgaggggatttgaagtatttacggtgaaagaggagacaaaagaggaagcgatgcacccttttttgtggcggttttggacgaagacaccgcaaagaggccggatggcagtatatgatggaagctggtatattaaggtgctcagtgaccggtttgaaaagaaaatgcgagaatcggaaatagaaaactgctatcgctcgatctgttcctttgaaaaacagatcacggaggacgggacacttctgattaaattgtttttggatatcgatcaaaaggaacagaaaaaacggtttgataaactcatggagtctaaagatacggcgtggcgtgtgacaaaggcagatctgaagaaaaatgaaaagtatgatcagtatcaggaaatgatagaagaaatgctgcagaggacagatacggaatatgccccctggacgattgtggaggctacagacagacgctatgcaacagtcaaaatctacaccgtgatcacgcagatgctgacagcagggattgacaacaggcgcagggagattgcaagggagacggcggcagaggtgatccgggaagcggaaaaagaggcgtctgagaatagaagtctgatagatggagcaacaaaagggtttcaggaatctgtgctggcaaaagtggacttaagtttgtgttgtgacaggaaaacgtatcggaaaaagctcaaagaatatcagaaaaagatcgagaagctgcatggagagctgtatcagaagcgcattccggtggtaatcgggtttgaaggctgggatgctgccggaaaaggaggagcgatcaagcggctgacagaaaagatggatgccaggggatatgtggtgaatcctacagcggcgccgaatgatctggagaaagcacatcattatctctggagattctggaaaaacatgccaaaggacgggcatatcgcaatttttgacagaacctggtacggcagggtgatggtagagcggatagaagggttttgtacgcaggaagagtggaaacgggcgtataaggagatcaatgatatggaaaaggatctcgcggacgcaggggctgtagttttgaaattctggatgcagattgacaaaaaagagcaggaaaagcgattcagacagcggcaggaaaatccggaaaagcagtggaagatcacagaagaagactggagaaaccgtgaaaaatgggagcagtatgaggaggcggtcaatgagatgctgatccggacttccacagaatatgctccatggatcgtggtagagggaaatgataaatattacgccagattaaaagtgcttgagacggtgatcgatgcactggaaaaaagaatttcaaaaaaataaaggaaaagagatgtgaccgcagaatataataagtgtaggggattttaaatgctcaaaaatgaaagagaagtaagaggcagacatgtattattcggaagaagtaatcgaagaagtaagaacaaaaaatgatattgtggatgtgatctcaggatatgtgagactgcagaaaaaaggtagttcctatttcggactctgtccgtttcacaatgaaaagtccccctctttttccgtaagcagagaaaagcagatgtattactgctttggctgtggagcgggaggaaatgtatttacatttctgatggattatgagaatttttcatttgtggaagcactgaagtttctggcggacagggcaggtgtcgtactccctgagatggagtattcaaaagaagcaaaagccagggcagacagaaagacacagcttcttgagatcaacaagctggcagcgcagtatttttatgtgcagctgaagtctgaacagggaaagacggcgcacgcatatctgaccggcaggcagttgtcagaggagacgatcaaggcatttggtctcggatattccagcaagtacagcgatgatctctttcgttacctcagaaaaagggggtatacggaagatctgatccgtcaggcggggctgatcaataccgatgagaaaaatggtgtttatgacaaattctggaatcgggtgatgtttccgatcatggatgtgaacaaccgggtcatcggatttggcgggcgtgtgatgggagacgcaaagccaaagtatctgaattcaccggagacagagatctttgacaagagccgtaatctgtacggactgaaccgggcgcgcacatcaagaaagccgtattttctggtgtgtgagggctatatggatgtgatcgcgctgcatcaggcgggatttaccaatgcagtggcgtcactgggaactgcattgacgaccgggcatgcggcattgatcaagcggtatgttcaggaagtatatctgacctatgacagcgatgaggcagggacgagagcggcgcttcgggcagttccgatcttgaaggaagccgggatcactgcaaaggtgatccggatggatccatataaggatccggatgaatttatcaagaatctgggcgctgaggaatttgaacgcaggatcggaaatgcgagaaacggatttatgttcggactggagatgctggagaaagagtatgatatgaattctccggaaggaaagactgcatttttccaggaggctgcaaggcgtctgatcggctttgaggatgaactggagcggaacaactatattgaagcggttgcgggtacatatcgggccacagttgagagcctgcaaaaactggtggcaaagatggcggtgagagaaggaatggcaaagccggtggagcgtccgaagcaggccacaggcagcgagaagccgaaagaagacggggcgaagatttcccagaaaattctgcttacctggatgatcgaggacagaagactgtttggaatcattcagaagtatatcagtccggaagattttccggaacctctgtaccatacagtggcagaatttttatatcaccagtatgaggaaggagaattaaatcccgccaagatcctgaatcattttacaaaggaagaagaacaccgggaagcagcttcgttgtttcatacgaagatccagaagctgacgaccaaagaggaacgggaaaaagcactgcaggagacaatcgtaaaagtcaagacacacagtatcgattacaggaccatgcatctggaaccgacagatatcatcggacttcagaagctgatggaggaaaagcgaaaactggatgacttgaagaaactgcatatttctattgaataaggataaaataaaacaagacagtctgcgtttgctgcagacagaggaaggatggacacatggaagaaaacattcagaagtttacggagagactcagagaactggtagcacagggaaagaaaaagaaaagtatactggagatccaggagatcaatgacttttttgcggatatggaactggaagcagaacagatggaaaaggtatttgagtatctggaagccaacaatattgatgtattgcgtatcagcagtgacgatgatctggacgtagacatggacgtgatcatggcagaagaagcggatgatgtagatatggagaatattgacctgtcagttccggacggtgtcagcattgaagatccggtcagaatgtatttaaaagagatcggaaaagttccgctcttaagtgcagacagagagattgagctggcgcagagaatggaagaaggagatgaagatgcaaagaaagagcttgcagaagcgaaccttcgtcttgtagtcagcattgcaaaacgttatgtaggacgcggaatgctgtttctggatctgatccaggagggaaatttaggactgatcaaagcagtggaaaaatttgattatcacaaaggatacaaattcagtacgtatgctacctggtggatccgtcaggcgatcacaagagcaatcgcagatcaggcaagaacgattcgtattccggtgcatatggtggagacgatcaacaaactgatccgtgtgtccagacaacttctgcaggagctcggaagagagccgctgccggaagagatcgcaaaagaactggatatgccggtagaacgtgtgcgtgagattttgaagatttcccaggagccggtatctttggagacaccaattggtgaggaagaagacagtcatctgggagattttatccaggacgataacgtaccggtaccggcagaggcagcagcgcagacactgctcaaagagcagcttgatgaagtgctggatacactcacagaaagagaacagaaagtgcttcgccttcgtttcggaatgaatgacggacgtgccagaacgctggaggaagttggaaaagaatttgatgttacccgtgaacgtatccgccagattgaggcaaaagcactccggaagctgcgtcatccaagccgcagccgcaaactgagagactatctggactaagatatgaggaatgaattatcaaaaagactgcaggcagtggctgaccttgtgacagtcagggagtgtgtggcagatatcggaacggatcacgcctatattccgatttatctgatagagcataaaaaagtaaaaaaagcgtttgcaatggatgtgaacgaaggtccgctgatccgggcagaagagcatgtaagagaagccggattaaaagagcagatcaagatgcgcagatccaatggcctggaaaaactgtctccgggagaagtggaagccgtcattatcgcaggtatgggcggcggacttgtgatgaggattctgacagagggacaggctgtggcagagacattacaagagtgcattttgcagccccagtcggaaatcgcaaaggtgcgggaatttcttctgcagaacggctatcagatcgtgcaggaagagatggtactggatgaaggaaagtactatccgatgatgcgtgtggttccttcaaaggaaagcgaaagagagaagtgggatgaaacccagcttcgatacggaaaattacttttggagatgcgccaccccatactggagcagtatttaaagagagaagaacagttaaaagcagagattctggaaaaactggatcatcagagaggggaacatatcacaaagagacaggcagaactcaaagaggagcttgtctgcatcaggaaaggactgaagtattatgcagtgtaaagacattatggcaatgattgagggtacatatcccaagagtgctgctctgggatttgacaatgtagggctgcaggcgggaagaagtgaaaaagaagtccgtcggatttatctggcgctggatacaacagatgcggtcattgaggaggcgattgcgcaggaagcggacatgctcattacccatcacccgctgattttttcgccgcttaagcatattacggatgaagattttatcggccgcaggctgttaaagctgatccgcagtgatatttcctattatgcaatgcataccaattatgatgtgcttggcatggcagagctttccggacagattctgggactgacagataccgaagtgctggatgtgaccatgaatacacagacaaaagaagaggggatcggaagagtgggatcccttccaaaagagatgacactggaagaatgctgtgtttatgtgaagcataaattaaaactgggatcggtcaaggtgtttggagatatgaagcagccggtaaaaagacttgcggtttctccgggatccgggaaaagtgccattgctccggctgtctcaaaaggagcggatgttcttgtaaccggagatatcggacaccatgaaggtctggatgcggcggcacagggcgtttcggtgattgatgcgggacattatgggacagagtatatttttatggaagatatgaaacggtttctggaagagagacttcctgcagctaaaatcatcaccgcaccggtcgtgcatccgtttcaggtattgtaagattccagacgggagggcaggcttatggagaaagaattttgtaccgttcagacaggggacaaggtaaagtgttacgagagaggaattgcctacaagaagatcgcagaagaatttcaggaagaatacccggccaaaatcgtactggcattggtggacgggacacgtcttcaggaattgaacaaacgattaaagcaggattgtaaaatcgaatttgtgacagtgaaagacccgatcggttatgagacttatcgtcgaagtctctgttttatgcttgtcaaagcagttcatgatgtcggaggacatgacaagatccgcaatgtgaagatccatttttccgtcagcaatgggtattactgtacaattgacggagatgtcgttctggatcagaagtttctggatcagattgatgcaaggatgcatgaacttgcagaagcccaaattccgatcgagaagcgttctgtgcatacatcggatgcagtagagctttttggcagacacgggatgtatgacaaggaaaggctgtttggataccggagggtttccaaggtaaatatctaccggatgaatgagtttgaggattattactatggatatatggtgccggattccgggtatttaaagaattttgcgctgcatctgtatgatgaaggatttgtactccagatgccgttccgaaaggaaccggatgtagtcccggcctttgaaccgcgtgaaaagctgtttcaggtattaaagagcagtgtgcagtggggcgaccttcagaatattgagacagtcggagcactcaatgacatggtcacaaaatatgatatgcgtgagatcgtacttgtgcaggaggcttatcaggaacggcagatcgcacagatcgccgcgcagattgccgcgaagccggaaacaaagctggtgatgatcgcaggaccgtcttcatccggaaaaacaacgttttcgcacaggctctccattcagcttcggacgcagggaatgagaccgcatccgattgcagtggacaattattttgtggatcgggaaaaaacaccccgggatgaggatgacaattacaattttgaatgtctggaggccattgacatcgagcagttcaataaggatatgcaggcacttttagccggagaggcggtgcatcttccaatctttgattttaagaaaggaagcaggagctatgacacgactccgacacagctgaaggaacaggatattcttgtgatcgaaggaattcactgtttgaatccggagctttcccgtcagctttcatcagaccggaagtttaagatttacatcagtgctctgacacagttgaatattgatgagcataaccggatcccttctacagacggaagactgatccggcggctggtgcgggatgccagaacaagaggaacttcagcacagaaaacgctcgcaatgtggtcgtcagtcagaagaggtgaggaagagaatatttttccgtatcaggaagaagcggatgtgatgtttaattcttccctgttgtatgaactggctgttttaaaacagtatgtggagcctcttttgttcggagtggaaaaagattcaccggaatatcttgaggcgaaaagacttttgaaattttttgactattttatcggaatcggaagtgactatgttccggcaaattcgctgctcagagaatttatcggaggcgggtgcttcccggtataagagaaaagaagggaagagacatgggacagaatcgtaaaaagatcaatggaaaagagcttgtactggatatttcttatgatattgtgggaagtgtattatatgcccttgggatttatacgtttgcaaaaacggcagattttgcaccgggcggattatccggtctggcgctgatcatgaatcatttatggagatttccgattggtattacaacccttgccctgaatattccgcttatcattttgagctttaagctggtagggcggaggtttatgttcaaatcagcaagaaccatgattgtttgtacgatatttctggatcttatttttccgtatacaaagccttatacaggggagccgtttatggcggcactgttttccggtgtctgcctgggagcagcgcttgcgttgttctatatgcggggatcctcctccggcggtaccgattttctgactatgtcgatcaaagcgatcaagccgcatttgtcaatcggatttgtaaccatggcgatcgatcttttgattattctgcttggatggccggtattcggaaatgtggacgcagttctctatggtctgatctcggcatttgtgacatctgtcgtgatcgataagatcatgtatggcatgggagccggtaaactgatcctgattattacgataaaggcggatgaggtttccaaaaagattgatcagatcagcggaagaggttccacagcaatccgggcgatcggaacctatacaaaagaggaaaaggatgtgctgctctgtgcctgctccagctctcaggcgtactccctcagaagtgctgcacatgaggtggatccggatgcatttgtgatgctgacagagacgagcgaggtgttcggtgaaggatttattgatacaagaaaataaaagataagacaaaatgagcgtgtttgccacatggtttggaacacgctcatttttatttatcggacgtaagtccgcccgccgcaggcatgcattacgggatgcccggagggggatactatttggattttacttcccgccacaattggttgtagattgcatcgtatttgtccccgaggaaacggaatgtttcgcagttgacaagatcttccggttccggaaacgcaatcttgctgttgcggatggccggatcttcgatgagttctcgtgctccggtattcggagtggagtaggtaatgtagtcgaagttcattttggcaatatcaggccggcagaggaagttgataaatttttctgcattttctttgtgctgtgcatttttcggaattacccaggaatcaatccagagattcgatccttcttttggaattacgtactccagatttggattctctgcctgtgtatagatggcttctcccgaataaatgacaccgatggcggcttcgtttccgatcattttgtcacgcacctgatcaataacatatgcctgcacaagaggtttctgatcaatgagaagctgctttgcttcctccagttcatttaaatccgtggagttgagcgaggcgccgatgtattttaatgccactgcaaatgcatcacgaacactgtcctgcatcagaatgttgtctttatatttttcatcccagagtacggaccagctgtcgatcggttcatctaccattgtcttgttgtataagataccgacagttccccagcagtaagggacagagtaaaggttgtccgggtcaaactggcgggactgttccagataagtgtcgccgatgtatttgatattcggaatatggtcaaaattgatcttggcaagcagatcattttcaatcatacgctggatcatatagtcggaaggacagaccacgtcataagcgatggcgccggactgcactttgggatacatgatttcatttgtctcgtattcttcataaacgacctggataccggtttccttttcaaacatcgggattacgttcggatctaaatattcgccccagttgtatacgatcagctgattgtctccgccggtcactccgtttttggatccgtaataaaatccgccggcggcaatgacaaggatcatggcagccggtactacgcgcttgaagatgatatggctgatgctctgatgccttctgcgcttagaagcggctgatggggaagacttcttctgctccggtgtaaagttgatcaaaaacagcagaacaagtactgtcataaacatgattgtggaaagtgcatacatttccggtttgattcctttacgcacttcactgtagatcttggtggaaagggtatccacccccggtcctttcgtaaaatgtgtgattacaaaatcatccagtgacattgtaaatgccagaagaaaaccggaaatgatccccggcatgatatccggcagtacgactttgaaaaatgcgtagatcggagaagctcccagatccagtgcggcttcataagtactcttttttgtctgctttaattttggcatgacactcaatattacataaggaatattgaatgtgatgtgtgccagcagtaccgtggaaaatccaagggtaaaacgaaatgcaacaaagagcagcatcagggaaattccggttacgatatctgcgttgagcatcgggatgttggttacgcccatcataaaggtgcgcatcttcggtttcattgcctgaatcccgagagaggctacggttccgatcaaggttgcaatcagtgcagaaagcaatgcgatgatcagagtcgtataaagtgcattcataatatccggattctggaacagtgaaatgtaccatttcccggtaaacccaccccattttgcccgggttttggaattattgaaggatagaacgaccagtgttatgatcggtgcatataataaaatgaggatcagaatcaggtaaatccgtttggctgtattcttcatcaaaatgcggttccctccccttctttatcgtattttgcaatcattgccatgctggcaataataaagatcatcagcacaagagaaagaccggagccggtattccagttgctgccctgtttaaattcctgctcgatcacatttccgataagcaggattttactgccgccaagcaggtcggaaatgacaaatgtggtcagtgatggtacaaagaccatggtgattccgctgataatgcccggtacgctcaaaggcaggatgatcctcaaaaaagtctgcaggttgtttgctcccagatcccgggctgcagatatgacgtcccggtcgatcttggaaagtacattgtagatcggcagcaccataaacggcaggaaattgtataccatgccgagaatgatcgcaaacggtgtgttgatcagcgcaagctccggaagatggaaaaagcgcagaaccatattgatgacaccgtttttttccagcagattctgccatgcgagtgtccgcagcagaaaattcatccacatgggaagaatgaagatcagtacaatgaaactggtctgattgacatttttttcggacaggatcatggcaagcgggtaagcaaggatcaggcagatgagcgtactcacgaaagagagcagcagtgccagtcccagtgcttttaaattttcctgggtggtgatctgtgccagattcatcagtgtgaaatttccgtttttgtcagtcagtccgtaatacagaatcatcaaaagcggaatgatgataaaggaggctgcccagaacaggtatggaccgctcaataattttctactcttcaattcctgccgcctccgcatcttcagattctggttttttcataatctggatatcaaatggatccacacggataccgacctctgtgccaaccgggaacatatcggtactgtgtacgagaagctcgtaattgttggcaagtacctccatttcataatgaacacctttgaagatcagatgggtgaccacaccttcgataattccttcttcaggcttgaccagatcgatgtcttccgggcggatcaccgcatctaccggtttgttgcgtccgaatccaacgtccacacactgccaggtggctcccagcattttgacaaccttatcttccaccatggtggcaggaagaatgttgctgtctccgataaagtctgctacaaaggcgttctgtggttcgttataaatatcctccggtgttccgatctgctggatatatccctgattcatgacaacgatcgtatcggacatggtcagagcttcctcctgatcatgggtaacgtagacaaaagtaatacccagttcgtttttcagacggatcagctcatactgcatgtcctgtctgagttttaagtccagtgctccaagcggttcgtcgagaagcagcactttcggttcgtttacaattgcgcgggcaattgcgatcctctgctgctgaccgccgcttaaagaatccggataccggtctttaaaatcctccagattcacaagtttcagtgcatatttgatcttgtcatcaatataatgtttggactttttcttgatcttaagaccaaatgcaatattttctgcaatggtcatatgggtaaagagcgcatatttctggaacacagtattgagctgccgtctgttgggcggcagcttgttgatgttcttcccgtcaaaaatgatatctccggaatccggagtctcgaaaccacccagaatccgaagcagtgtggtcttgccgcagccgcttggaccgagcagtgtcagaaattcattttcacggatataaagatttaagtgatccaaaatgacgctctcatcaaaagattttgtgacattcacaatatcgatcagcttattagacatctttctcctcctggtaaaagtttttgatggaatccagacggctgcacatattgtacagaagaagatctgcgagtgtaagtgcagtcatggattcaactaccaccacggcgcggggaacgatgatcggatcatgtcttcccttgatagaaatctcaatctcttccttatctatatttaccgtggactgagggcgggcaatggaaggcgtcggcttgatggcagcgcgtacgatcagctcggagccgtcgctgataccgcccagaaccccgccggaatggttggttctttttatcatctgtccgtcctgaacggcaaatgcatcattgttcgtgctcccgtttgaggcagcagcaagaaatccatctccaatctccactgcttttaccgcaccaatggacatgattcccttcgaaagctgagcatccagtttatcaaataccggttcgccaagcccgacgggaagtcccgttacacgacattcaatgattccgccgcaggaatctttctgttccatcatctcattgagatagtcggctgcttttttggccaacccattgtttggcatgtaaagcggattttctgtgacctcatccaaacgatattcggattccggtacagttacgggacctatggattttgaaaatgcagtcagtttgatccccagtgtctttaagagggcagaagcgactgctccggcagctactctgccgatcgtctcccggccggaggtgcggccaccgccgcggtaatcccgaaaaccgtatttgttctggaatgtatagtcagcatgtcccggtctgtaacaggaagcaatctccccataatcccgggagcgctgatcctgattgcgcaccaaaagagaaattggggttccggttgtctttccttcaaagataccggagagaatctctacctgatcggtctcactgcgcttggtcgtatagcggctctgtcccggacgtctgcggtccagaaaagcctgtatatcagattcgcttagggaaagtcctgcgggacagccgtcgatcacaacaccgattgctgcgccgtgagactctccccatgtagtaatgcgaaataaagttccaaatgatgaaccactcatatgtcaaaatctcctttcttttgcatataaaactattatataagaagacatattatcgtgcaatccttaattttatgcaactgcccggtcagattatgaatggcagaaccgatcagatagaagcgtaataaatttatttgaaattcctatgttttttctgtacaattcaggaaaagcgtaatataatgaggactagatactggctgaaaggagaacggcaatagcagatgaaagaaaaaatcagaaaaaaaacgaaaagaccgcagacagaagacatgatttttacagaagaagactttgaagatgtttctgaagagacgaaagcaaattccccaaaacacaggaaaaggtctcgcaggacttcaggtggatttccggccagaaaagcggggatcatcgcaggcggagtcatcggagtgctggtgcttttatatcttggaatttctgtattttttatgagtcatttctatataaatacaacgatcaacggaaaagatttttcgggaagatcggcatcatctgtggaggcatatatcaaagagcaggtaaaagactacaaactgaccattaaggagcaggacagtaagtcagatgtgatcaaaggaagtgatatttctcttcaatataaagagagcgatgagattgagaaagcgttgaaaaagcagaatggttttgcatggccgctggcgctgttttcaaagaaatcagaaaagatttccattgctgtttcattcgatgaaactgctttaaatgaaaagattcagaacctgcaggcagtgacagcagagcagattccggcagaaaacgcaaaaccggagcttcagggcgatacttatgtgatcaaagaggaagtatatggaacggcagtagatatggatgtactgaaggaaaaagtgaaccagtatatttccgaatttcgatcagaactggatatggagaaggaaggatgctatgcacgtccgaaatacacaaaagattccaaggaagtgcaggctgcctgtgatacgatgaacaaatatctgaaggcaagcattacctataccatgtcagaatctgttgttgtggataagactctgatttccacatggatcggcgtagatgacaatatgaatgtggtttttgataatgatgccatgaaagcatggtttacagagtttggtgacaaatacgatacggtagggactacgagaaatctgacaacaccgaccggcaaggcaacgactgtaacaggcggtacatatggatggtcgattgatgaagatacagagcttgtcaatctgcagaacagcatcaaaaacggtgaagtagtcacaagagagccggcatactataccggaggtgcagcaaaatctcatggagaacaggactggggcactacatttatcgaggttgatctaagtacccagcacatgtggtatatcaaagacggaagcgtggcaatggaaacagatgtggtgacaggtgttccggttccggagaggatcacaccggaaggggtgtatgacattctggagatgaccagagatgaggtgctgatcggagagaccgatccaagtacaggaaagccgatttatgagacaccggtcaactattggatgcgcgtgacctggacaggaattggttttcatgatgcaacctggcaggctgcatttggcggaacgcgttataaggacggagcagggtctcacggctgtatcaatatgccgctggatcaggcagcagctctgtttggaatgatcagtgtgggaacaccggttgtgattcattactaatcataacagatatagaaaaaagacaaaaaggggcagcgtgagagagcgcggtcccctttttcacgaagataaaggagaagaaattatgtatgagttgatcaaaaaagacggacgggcaaaacgggggcgttttcataccgttcacggaacgattgaaacgccggtatttatgaatgtaggtactgctgcagcaatcaaaggagcggtatcgacagatgatctccggggaatcaagacccaggtggagctttcaaacacgtatcacctgcatgtccgtccgggagatgaagtggtgaaaaaaatgggaggacttcacaaatttatgaactgggacaagccgattctgacagattcgggcggatttcaggtgttttctctggcaggtcttcgcaagatcaaagaagaaggtgtgcattttaattcacatattgacgggcgaaagatttttatgggaccggaagagagtatgcagatccagtccaatctggcatccaccattgccatggcatttgatgaatgtccatccagtgtggcagacagagtgtatatgcgggattctgtggcaagaacgacacgctggttgaaacggtgtaaagcagaaatggaccggctcaatactctgccggatacgatcaacccacaccagatgctgtttggaatcaatcagggcggaatttacgaagacatccggatcgaacatgcaaaacagatcgtggatctggatctggacggttatgcagtcggagggcttgcagtcggagagagtcatgaggagatgtaccggatcctggacgcggttgttccatatctgccggagcagaaaccgacctatctgatgggagttggaacaccgatcaatattttagaggcagtagacaggggagtcgatttctttgactgtgtttacccgagcagaaacggacgccatggacatgtatataccaaccatggaaagctgaacctgttcaatgcaaaatatgaactggatgacagaccgattgaggaaggatgtcagtgtccggcatgcagaagctacagcaggggatacatccgtcatcttctgaaagcaaaagagatgctggggatgcgcttatgtgtactgcacaacctgtatttctacaacacgatgatggaagaaatccgtgcagcaatcgaagcgggagagtatcaggcatacaaaaagaaaaaaatcgaaggaatgacgtccggaaaatagacacttttccaaatgtttatagaaaatttacttgaagtatcatgattttttgtgtacaatggtaatattgtcggacgcaggaaagcgtgtgagacaaaatgaagagtatatcacggtaagtggaggtgtgctggtaagatgttaggtgttattgtaatttatgtagtattattcggaggtctctggtggttcatgatgcgtcctcagaaaaaggagcagaagagaatccaggcgatgctggcttctatggaagttggagatactgcattgacaacaagcggattttacggtgtgatcattgatatcacagatgacgatgtgatcgtagagtttggaaacaataagaactgccgtattccgatgcagaaagctgcaatcgcgcagattgaaaaaccaaacgcagaataagaaaaaagagaagctgttttatggccggaggctgtagaacagcttttttgactttttaccagatatcaaaaatttaataccacatatagaaaaagtatagattttaggggttgaatcaattaaaatagcgttaaacagggggtgatattttgcaagttgatgtaaaaatcgacagtacggttgatgagatgaaaattctggtcatagcagacaaggagggacatacagttgacacatttgtcgattatatacgtgattatgaacgaaagcaagttacgaaactaatggcatataaaggggatacggcatatttgatcaatatttctgatattttaaggatttatgcgggaaatcaaaaagtgtttgttgaaacgcagcagaatgaatatattgtcagatatcggttgtatgaattggaagaattactggaaaagaaaacatttcttagaatctccaattcggaaattgtcaatacgaatcagattttaaacatagatttaagtattgttggaagaatttgtattcgttttccaggaaatattcaaacctatgtatcaagaaggtatgtacctaaaattaaaaaatcattagggatttgaggtgttatgtttgaaaggtaaaatattgaaatattctatggaaggattgttgtgtggtagctttgtttatcttgttttttcaattctgctttcgttgagattgaatactggtgatttttatttagtacttcccgcgttagcagaggactataaaagtgaattgtttgcaacaatgattcaaatatttgtattctgctggtttgggggattttgtggtattgcatatttttttagcgaatgtgtagaatggtcgtttcaaaagcaagtaatcgggtatatattttcgctgacaacagggatggtaccgcttgcttttgtaggacattggtttgaacatttggctattgggctgtttagctatcttcttatacttttagcaataacctttattttatttgttattagctggtttaaattgaaaagtgatgttaataaaattaaaaaagaaattggtatccggaaaaacaaaatgagaaatgttcaagtgtcatcaaaatggataatcagatggttatgggtgaattatggtattttcgttttgggattttttacattgggatttttcagtgataataaaattgtacgaatcaatttcgtattagatgtcttaatatgtatcatttctttgatattaaattttctattatttcggaaaagatatcaaatcacatttctggggaaaattacgttgctgtttcttacattttgtttcatggcatttacgtattttgcatttttaacttcagggaacggattgcccccagcattgtttatgtgaagaaagttgctctttgaaaagtgccgtacaatcagagagaacaatatagagttcgctctgttttttggcacttttgtgtggtaaagggttgaaatgagaaaagaaatgaggtattatttagaataacactttgaaaattggaaggatgagtattatgaagttgaatatcggagtgatcaaaggagacggaatcggaccggaaattgtgacagaagcgatgaaagtactggatcgaatcgcagaagtttatggacatgaatgtgtgtatacacagcttttgatgggcggagcatccattgacgtacatggtgttccactgacagatgagacgatcagcaaagcgaagctgtgtgatgcagttttgatgggctcgatcggcggagatacgaggacttctccatggtatcaactggagccttcaaaacgtcccgaagccggactgttaaaaatcagaaaagaactgaatttatttgcaaatttaagaccggcagtattgtatgaagaacttaaagaagcgtgtccgctgaaagaggagatcatcaaagacggatttgatctgatgatcatgcgggagctcacgggcggcctgtattttggggagcgcagcaccagagaaatagacggggtgatgactgcctgcgatacacttacatataatgaagaagaaattcgaagaattgcgaagcggggatttgacatcgctgcgaagcgtagaaaaaaagtgatcagtgtggataaggcaaatgtgctggattcctccagactttggagaagcgttgtggaagaggtggctaaggaatatccggaagtgactctggagcatatgctggtggataattgtgccatgcagctcgtgaaggatccggcacagtttgatgtgatcctgactgagaatatgtttggggatatcctttcagatgaggcgagtatggtgactggatcgattggaatgctttcttctgcaagtctcaatgagacaaaattcggactttacgagccaagcggcggttctgctccggatattgcgggaaaaggcattgccaatccgatcgcgacgattctgtcagcagctatgatgcttcggtttacatttgatcttgacagggaagcagatgccattgaggaagcggtacagcgtgtattaagagacggttaccgcacgatcgatattatgtcagagggaagcatacagatcaatacccgcgagatgggtgacaggatctgtgcatatatccaatagaaaaaacagaaattcaaaaaaaggaaagaggatgatagaagatgagaagtgatactgtaacaaaggggatgcagcaggcgccgcaccgttccctgttcaatgcgctgggaatgacacaagaagaactggaccggccgttgatcggaattgtgagttcttataatgagatcgtgccggggcatatgaacctggataagattacacaggctgtcaaaatgggagttgctatggcaggaggaacaccgatcatggttcctgcgattgcagtctgtgacggaattgccatgggacatattgggatgaaatattcgcttgtgacaagagatctgatcgcggattctacagaagcactggctatggcacatcagtttgacggacttgttatgataccgaactgtgataagaacgttccgggacttctgatggcagcagcccgtgtgaatattccgacgatttttgtcagcgggggaccgatgctggcgggtcatgtgaagggaagcaagaccagtctttccagcatgtttgaggcagtcggttcttatgcggcaggaaaattttcagaagaagatgtgtgcgagtttgaagaaaaggcatgtccgacctgtggttcctgttccggtatgtatacggcaaacagtatgaactgcctgacagaggctcttggtatgggactgaaaggaaacggaaccattccggcagtgtattctgcaagactgcagcttgcaaaacatgcgggaatgcaggtgatggagctggtaagaaagaatatccgcccaagagacattatgacaaaagaagcgattttaaatgcattgacagtggacatggcactgggatgttccacaaacagtatgctgcacattcctgcgattgcacatgagatcggaatggattttgagattgattttgccaatccgatcagcgagaaaactccgaatctgtgccatcttgctccggcaggacatacatacatggaagatctcaacgaggccggcggagtttatgcggtgatgaatgagctgaacaaaaaaggacttcttcatacagaatgtatgactgtgaccggaaagacactgggagagaacatcgaaggatgtgtcaataaaaatccggaggtaatccgcccgattgacaatccgtacagtgagacaggcggtctggcagtactcaaaggaaatctggcgccggacggaagtgtggtaaaacgttctgcagtctgtgcagagatgctggtgcatgaaggacctgcaaggatttttgagagtgacgaagaagctacagaagcaatcaaatccggaaagatcaacccgggagatgtgattgtgatccggtacgagggaccaaaaggaggtccgggaatgcgtgagatgctgaatccgacttctgcgattgcaggatatggccttggatcttcggttgcgctgatcacggacggccgcttcagcggagcatccagaggcgcatctatcggacatgtgtcaccggaagcggccgttggaggaccgatcgcgcttgtcgaagaaggggatatcatcaagatcaatattccggaattaaaactggagctggatgtatcagaggaagaactggaaagacgtcgtgctgcatggcagccaagagagccaaaggtcaagacaggatatctggcaagatatgcgtctatggttacctccggaaacagaggcgcaattctggagatcccgaaaaataattaggaggagagcatcatgcagttaaatggagcagagattgtgatcgaatgtctgaaagaacagggtgtagatactgtattcggatatccggggggagcaattttaaatgtatacgacgctctctatgagcatagtaatgaaatcaggcatatcctgacttcccatgaacagggtgcggcgcatgcggcagacgggtatgcaagagcaaccggcagagtgggagtgtgtctggctaccagcggcccgggggcaacgaatctggtgacaggaatcgcaacggcctatatggattccattccggtcgtagcgattacctgtaatgtaggggtttccctgcttggaaaagacagctttcaggaaatcgatattgcagggatcaccatgccgatcaccaaacataactttattgtcaaggatgtggaaaaactggcagagacaatccgcaaggcattccggatcgcgcgcagcggcagacccgggccggttctgatcgatatcccgaaagatattacagcaaacgtgacagaatatcttccccgggaagcagagttcccgccgagaaagacggaaaccatcacagaggaggcactttcacgtgctgtggagatgatcgaagcatcccaaaagccgtttatttatgcagggggcggcgttgtcctttcgggggcgagcagagaattgcgtgaattcgcagaaaaggtggatgctccggtgacagatactctgatgggaaagggagcatttccgggaacagatccgcgttacacagggatggtcggaatgcatggaaccaagacatccaactatggagtcagtgagtgcgatctgttgattgcggtaggagccagatttgatgaccgtgtaacgagcgatacagaaaagtttgcgaagaatgcacagattttgcagattgatatcgatccggcagagatgaacaaaaacgtgttgatcgatcatggaatcgtcggagatttgaaagaagttttaatgcggttgaatgcaagacttgaggaacagtcacatccggagtggatggaacagattgcagcgtatcagaaagaatatccgcttcagtatgaggatggaaagctgaccggtccgtatatcgtagaagagatttacaggcagacaaaaggagatgcaatcattacgacagaagtaggacagcatcagatgtgggctgcacagtattataaatataaagagccaaggacgctcttgtcatccggaggacttggaacaatgggatatggacttggcgcatccatcggagccaaaatgggctgtccggaaaagaccgtagtcaatatcgccggagacggatgtttccgtatgaacatgaatgagatcgcaacagctgcgagatatcagattccgatcgtacaggtcgtggtgaacaatcatgtgcttggtatggtacgccagtggcagaatctcttttacaatcagcattattcccagacaatcctggatgatgcggtggattttgtaaagctggcacaggcgcttggagcagaaggaatccgtgtgacaacaaaagaagagtttgcagacgcttttgcaaaagcagtaaagatgcagcgtcctgttgtgctggactgccagatcgaccaggatgacaaggtgtggccgatggttgcgccgggagctgcgatcagcgaagtgtttgatgagatggatttgaacgaagaataaattttctttgtttcaatataaaaatgaaattcaggaggaaaagaagatgagtagagtgtacaatttttcagccggaccggcagtgctgccggaagaagtgctaaaagaagcagcagatgaaatgttagattacagaggaaccggaatgtcggttatggaaatgagtcatcgctcgaaagccttcgagacgattattcaggaagcagaggcagatctcagagagctgatggatattccggacaattacaaggttttatttttgcagggcggagcatctcagcagtttgcgatgattccgatgaatctgatgaagaaccgggtggcagattacattgtgaccggtcagtgggcaaaaaaagcagcggatgaggcagaaaagtatggaaccgtaaaccggatcgcatcttctgcagacaagactttttcttatattccggactgttcggatcttccggtttcagaagatgcagattatgtatacatctgtgagaataatacgatttacggaacaaaatttaaagaactgccgaatacaaaaggaaagacgctggttgcagacgtttcttcctgtttcctctctgagcctgtagatgtcacaaaatatggagtgatctatggaggcgtacagaaaaatatcggaccggcaggtgttgtgatcgtgattatccgggaagacctgatcacagaagatgtgcttccaggcacaccgacgatgctgaaatacaaaacgcatgcagatgcggattctctctacaacactccgcctgcatacggaatctatatttgcggaaaagtgtttaagtggctgaagaagatgggcggcctttctgcgatgaaagagaaaaatgaaaagaaagctaaactgttgtacgattttctggacgaaagtaagttgttcaaaggaaccgtggagaaaaaagaccgttctctgatgaatgttccatttgtgacaggagacaaagatctggatgccaaatttgtgaaagaagcaaaagaagccggactggaaaatctgaagggacaccgtactgtaggcggaatgcgtgcaagtatttacaacgcaatgccgtatgaaggagtagaagctctcgttgcgtttatgaagaagtttgaggaggaaaatgcgtagtatgtatcagtatcattgcctgaatccaatctctcagattggactcgataaatttacagagaactatcaaaaaacagaggctgcagaggcggcagacgcaattttggtcagaagtgcatctatgcatgagatggaactgccggagaacctgaaagttgtggcaagagcaggtgcaggtgtgaacaatattcctctggatcgttgtgcggagaaagggatcgtagtattcaatacacccggagccaatgcaaatggtgtgaaagaactcgtaattgcaggaatgcttctggcagcccgtgacattatcggaggtatcaactgggtgcaggagtacgaagaagacggagatatcgcaaaaatcacagaaaagaagaagaaagcttttgcaggaacggagctggaaggaaaaaaaataggagtgatcggtctgggagcgatcggagttctggtggcgaatgcagcgacacatctgggaatggaagtatatggatatgacccgtacgtatccgtagatgcggcatggaagctttccagaaatattcatcatgcaaaatccgtggatgaattgtacaaagagtgcgattatctgaccgttcatgttccggcactggacgatacaaaaggaatgatcaacaaagacgccatcagtctgatgaaagacggggtagtgatcctgaattttgcgagagatgtactggtcaatcaggaagatatcgtggatgctttagtatctgagaaagtgcgcagttatgtgacggacttcccgacaaaagagatcgtaggtgtcagaggcgcaatcgtgattccgcatttgggagcttccacagaagagtctgaggataattgcgccaaaatggcagttgcagaagtgatggattatctgcagaacggaaatattacacattctgtaaattatccggactgcgatatgggagtgaaaggaagcggagcaagaattacaatcctgcaccgcaacatcccgaatatgctgggacagtttacagcacttctggcaggcgagggaatgaatatttccctgatggcaaataagagtaagaaggaatatgcttatacgatgatcgacgtagaatccgaggtttccggacagattgcgaaagcactggaagcagtagaaggtgttctgaaagtaagagtgatcgtgtgagaaaaaggcagatgttatctgattgaaaggatcagggcatctgccttttgcagttatagtaagaaaaattactattgacaatacatgtatgagtgtatacaattatacaagaacttttactaagtagagtgttaaagagtggacggaggagaaaatcatggaaaatagaaaagtacgtttgaatcagcacacaaatcttctggaactggaagaacacatgtatccactggtggatgtagatacgccgaatgtgttccggaatctgttccattatgatgaaatcccaaagattgcattcaatgaccgtattgtgccgcataatatgccggatgaaatctggatcacagatacgacatttagagacggacagcagtccagagctccttatacaacagagcagattgtgacgatttatgattatttccatcgtctgggaggtcctaacggaaagattcgtcagagtgagtttttcctgtacagcaagaaagatcgggatgcggtctacaaatgtctggagagaggatatcagtttccggaagtgacaagctggatccgtgccagtaaaaaggattttcagctggtaaaagatatcggtctcaaggagacagggattttggtcagctgttccgattatcatattttttacaagctgaagatgacgaggcgggaagcgatggaacattatttatctgttgtgcgtgagtgcatggaaaccggagttcggccgagatgtcatctggaagatatcacacgttctgatatttacggttttgtgattccgttttgtctggaactgatgaagctgatggaagagtatcagatcccggtcaagatccgtgtctgtgatacgatgggatatggggtgaatttcccgggtgcagtgattccgcgttctattccgggaatcatctatggtctgatgacacatgcgggcgtgccaagtgaactgatcgaattccacggacacaacgatttctataaagcagtcaataattcgacgacagcgtggctttacggagcctgcggagtgaactgttccttgtttggtatcggagagcgtacgggtaatacacctttagaggcaatggtatttgagtatgcacagcttcgaggaacactggatggaatggatacaacggttattacagagctggctgaatattatgagaaggaaatcggatacagagtgccatcgaggacaccgtttgtcggaaagaattttaatgtcacaagagctggaatccatgcggatggaatgctcaaaaatgaagagatctataatatatttgatacagacaaattcctgaaccgcccagcgctggtttctgtttccaatacatccggagcggcgggaatcgcctactggatcaatgcctactataaacttccgcagggcagtcaggtggataaaaattcagaactggtcagccgattgaaagagtgggtagataaggagtatgaagaaggtcgcgttacagtcttgacagatgacgaattaattgccaaaatagatagtatatgtaaggaactgcatataaaattgtagctgggaggctgacagatagaaaatgggcgaatatcaggataattctctgggaagccgtgtgttccagagactccgcgaagacatactgagcggaaaatataaagagcatgatgaactgcgggagaatacactcggaaaagagctgggggtaagccggacaccagtcagagaggcactcaggcagctggagctggaaggactggtcacgatcataccgaacaaaggagcgtatgtgaccggaatttcatccaaggatatcagagatatctatatcctgcgttctatgctggaagggttgtgtgccagatgggcaacagagcatattacggaggaacagctggatgagctggaagaagtgattcttctatcagaattccatatgaaaaaagtaagtggaaataatgcagaccaggtgacagatctggatggcaaattccataagattttgtatgaagcatcggacagccggattttaagccatgtcctgatggattttcataaatatgtgcagcaggcaagaagaaactctgtcgtttcagaggagagagccagaaagtcgatcagagagcacaagcagatccttcgtgcgattcgagacaacgatgcagatctggcagagcagcttgcaaacgaacacatcctgcatgtgatgcagaatttgaaaaaacagggatacgaagaaatttaggaggatacggaacatggaaaaaattaagatgaccacaccaatcgtggaaatggacggggacgagatgacaagaattctctggaagatgatcaaagaagatcttctggagccatacattgacctgaatacagaatattatgatctggggctggagcaccgcaatgagacgaacgatcaggtgacagtagattctgcaaatgcgacgaaaaaatataaagtggcagtcaaatgtgcgacgatcactccaaatgcggcgcgtatggaagagtatgatctcaaagagatgtggaagagtccaaatggtacgatccgcgctattttagacggaacagttttccgtgctccgattgttgtaaaaggaattgagccttgtgtaaaaagctggaagaagccaattacgatcgcaagacatgcatatggggatgtgtataaaggatccgagatgaagattccgggtgttggaaaagtggagctggtctacacagcagaagacggaacgcagacaagagagctggttcatgagtttacaggcgcaggaatcgtacagggaatgcataatgtcaatgagtcgattgaaagttttgcaagaagctgtttcaattatgcactggacacaaaacaggatctctggtttgcaacaaaggatacaatttccaagaaatatgaccatacatttaaagatattttccaggaaatctacgatgcagaatatgatgagaagtttaaagcagcgggaatcgaatatttctatacattgattgatgatgccgtagcgcgtgtgatgaaatcagagggcggatttatctgggcatgtaagaactatgacggtgatgtgatgagcgacatggtgtcttcagcatttggttctcttgcaatgatgacatcggtattggtttctccggaagggtattatgagtatgaagcggcacatggtacggtacagcgtcattattacaagcacttaaaaggggaagagacttctacaaactctgtggcaacgatctttgcatggtccggagcgctgagaaaacgcggagagctggatggaaacaaagaattgatggagtttgctgacagactggaaaaagctacgatcgatacgattgaggcaggagagatgacaaaagatctggcactgatcacaacaattgagaatccgacagtcttaaacagtgaaggatttatcaaagcaatcgcgaagagattgtaaaagaaaatagaaaagtggggtgaaaaatcttacatcggatttttcaccccgttttttataccccgggtgagagaatgatcacgagataaaacagggcaaaaaaacaattttgtaaagtatgtatttttttatataataaaatgaaaagatttgtaacgttttagaatgtgagcagttattaaggtgaaaggagggggagatgtggagttcgaaaaaatatatcagctgtattttcgggaagtttttctatatgttcgcagcctgacgccggatgaagtgacagcagaagaaattgcgcaggagacgtttgtaaaagcattaaaatctctgaatcaatttgacgggagaaaggatatcagagcctggctttttacaattgcgaagaatacatattttagctactgcagacgaaaaaagcatgatgcagattggacagagtatgaaaacatagtagatgtaggagttcattttgcagaaaatctggtgaatgaagaaaaggcatttttgattcacaagttccttcacaatatggaagaaccatataaagaagtgtttaatttgcgggtgtttggagaactttcttatgaaaaaatcggaacattatttcaaaaaagttccggctgggtgagagttactttttatagagcgaaaaagaaaattgaagagtatatggaggagcagggatatgagtaaaatcagttgtaatgtaatacaggatatcatgccgctgtatgtagatgaaattgtgagtgaggatacaaagaagctggtagaagaacatttgaaggaatgtgaagactgcagaaaagaaatggaaaaaatgcgggcaaaaataatattgccgaataagaaaaaaatcaatcaggcagaaaaagaactgtttcagaaattaaaacacagattgatcaaccgtaggatcgcagcagcaatacttggggcgattcttgtgtgcgcccttctggcaggagtttatacaattctggtgcttccgaaagagccgatcccgtttgatccacagaaaatggaagtggaaatagtcggagaggatgcctatttatcctatgcaggaagtgattcggcaggctctgttttttgtaaccctgtaacagtgggagagggagcagaaaaaagggaaattgcaatggtttatttaaatcgaaacctgtggtccacatatatacaacctcatttgcaagagcagaacgaagatgagatgatctatctcggaaaagctgcggatatggatatcatatactatggaaagtttgatgtggaaaatttttatgaaaaaataccggagatattaaaagaaatgactcctatctggaagaagtgatattagaaaatgaaatggaaaggactcgcagattattctgcgagttcttcccatttttcgtacagttcttccagttcggtattgtttgcatctttttccaatgcaagttcctgacatttgacagaattggaatagacttcttcctgcgtcatcagctcgtcgatttccacatttcgttcttccagaacagcaattcggtcttccgtctttttcagttcattttttcgttttcgttcttttgcctgcagttccttttgttcctgccagcttagtttggagtctgaaggtgccgattcggtggtattttgaggaactgtctgatcagcagccggggtggcgtatgcggcggtcagttcttcttttttctccagatagtaatcatagtttccgatataattgacaaaagtctggttgaccagttccagaatccgggtggcagtctggttgataaagtaccggtcatgggatacgtacagaaccgtgccggtatattcgttgagtgcctgctccagaatttctttggaagtaatatccaggtggttggtcggctcgtcaagaatcagaaaattggcttctgaaagcatcagttttgcaagagagacacgtcctttttctccaccgcttaaatcccggatcagcttgtagacatcgtctccggtaaactgaaatgctgcaagagtgtttcggatctgcgtattggtgagtgtcggataatcgtcggaaatctcgtcgaaaatagttttttcattgtgcagcacatgatgttcctgatcgtagtatccgatctgaactttagaacccagtgtaaaacttccggaatccggttctacgacctgattgagtattttcaagagtgttgtttttccggttccattgtctccgatgatcgctacgtgctctccgcgcttgatttcaaagctgatatcatggaataacacctgactgtcaaaacgtttcccgagggattcgatacttaaaacgtcatttccactgacttcggaaggttccagtgtaaagtgcatctctcttgccgcttctgcgggtctttcgacaggtgtgattttggagagcattttttccctgctttccgcgcgtttgattgatttttcacggttgaaagagcgcagtttttcaatgactgcttcctgatgcttgatttcacgctgctggtttaaatattctttgagctgcgcatcccggatcatctgttttttctgtgcatagtctttgtaattgccggtatacatgcgtacagagccgttttcaatctcgatgacctttgtcacaacgcggtttaagaaaaaccggtcatgggaaacaatcagaactgcacccggatagttcagaagatacgtctccagccagctgatggagttcagatccaggtggttggtcggttcgtccaacaacaggatatctggttttgtgagcaaaagttttccgagagataccctggttttctgaccgccggaaagggtgtctgtgggttttgagaattcttcttctgtaaagccaagaccttttaaaacaccggtgatctcactttcgtaggcgtaaccgtttttcgattcaaattctgacatcagccggttgtaagtgtttaaacggtttgtcagttcctctccggaaagagattttaactccagttcgatggcgcggatctgggcctccagagcgataatatcagattttgcagtttttagttcttcatagatcgtgtttgtagtatccagattctgatgctgggcaagatagccaagcgtctttccttttgtcagaataacgtctccttcatccagaggcagttctcctacgatcattttgaagattgttgattttcctgcaccgttgacgccgacaagtgcagctttttcacggtcttctacatgaaaagagccatcccggacaatgagatggtcgccgaatgatttatttaaattatgacatgcgagtatcatgaaattcctcctgtattttgacaataactgattatttcgaatcatcaccatttcattataacgaaaacacggcaaaatacaatataaaagtttgacttatctttcacaattctatataataagaaaagattaaaattggagggtacaatcagtggaagaaagaaaaatatcccgtgcagttatcagcaggctccccagatattatagataccttggagatttgatggaagatcaggtggagaggatctcatccaacgatctaagtaagaagatgcatgtcacggcatcccagattcgacaggatctcaataatttcgggggattcgggcaacagggatacgggtataatgtaaaatatttatatacggagatcggcaagattctcggactggacagaagccacaatttcattatcataggtgcaggtaatctgggacaggctcttgctaattatgcctcttttgaaaaaggcggatttattttaaaaggactttttgatgtgaatccccggcttgaaggagttgccatccgcggaattccggtacggatgatggatgagctgcaggaatttcttcagaacaatgagattgagattgcagcactgacgattccaaaatcgaaagcaaaagaagttgcagagttattagtggacaatggaatccaggctatctggaattttgcacatacagatctgaatctgccaaaagatgtgatcgtagaaagcgtacatctttcagacagtctgatgaagctgtcatataatgtcagtcgtcaccgggaagaacaaaacaagtaagaataactcagttcatgtgcaaaggcgtgtggtcggaaaatatctggctgcacgtcctttcttttcaggagcagaagggagatcgggtatgagatatttaccagacggagcgtggatgcagagagcggatgaatatacgattcaaaagatcgggattccttctctggtattgatggagcgggcagctctgaaaacagtggaagtgatgaaagagaaaggaatcagtctggatcactgtcttgttgtgtgcggaagtggaaataatggtggagatggattcgccgttgcaagacttctttatctggagggaaaagatgtgtgtgcggtttttgcagggaaagaaacatccatgagtgaagaatgcagacagcagaggcagatcgcatccaatctgggtgtttccgttgtcacaaacattcccccaaaagaatatactgttgtcatagatgctgtgtttggtgtaggtttaagcaggacgatcgaggggcattataaagatgtgatcgaagaaatgaaccagatacatgcagagaaagtggcaatcgatattccgtcaggaatcagctcttttgacggacaggtgctgggaacggcatttcatgcggacttgacagtttcttttgcatgtgagaaactgggaactgttttgtttccgggatccgattatgcgggcgaggtaatccctgtggaaatcgggatcgggacaaaactttttgaagaaaatccggaagtctgttacacattggaaaaatcggatctttccaaatttcttccggatcggaaaaagaattcccacaagggaagttatggaaagattctgatgatcacgggcagtaaggggatgtctggtgcggcatacttaagtgcacgtgcagcttatataagtggtggcggtctggtacagatctatacagaagaatcgaaccggacgattttgcagcagctcttaccggaagcgatcgtatccacctatacagaatatgaggaagaaaaactgcaaagtcttttgaagtgggcagatgtaatctgtatcggatgcggacttggaaaaagcaggaccgccgggcagatactttcttatttgatgaaatatgcagaggtcccatgtgtgatcgatgcagacggtttgaatcttttggcggatcatatggaacttcttccaaaagaaaaaaagccatttgtactgacaccacatatgaaagaaatggcaggacttttggggtgtaccatcccggaacttgggaaaaacagatttgctgcgttaaaagaatttacagacagctatggtgttgtttgtgcactgaaggatgcacgtacgcttgtggcaggaaaagaccggcagatgtttctgaatactgctggaaacagtgcgatggcaaaggccggttccggcgatgtgcttgccggagtgatcacagggcttctggcgcagcatatgaaagtgtatgaagggactgtgctgggagtgtatcttcatgcctgtggaggagatgcagccagagagaggagaggcgcttacagcgttctggcagaagatctgacagaggggatcgcagcttgtatcaaaaagacagaaaaggggagataatgatggaaaaacacagcagagtgtatgcagagattgatctggatgcaatttcatataacatggaacagatgaaaaagagggttggagaaggcgcaaaatttattgccgtagtgaaaacagacggatatggacatggtgcggttccgattgcctgtatgctggatgacgatccggatgtatggggctatgcgactgcgactctggaagaagcagtggagcttcacagagcgggaattcaaaaaccgacgatggtgctgggatgtgtgttcccggaccagtatgaagaaatgataaaagaagaggtgcgcgccacagtatacacactggatatggcacatgagatttcgaatcttgcccgaaagttgggaaaaacagcgtattttcatatcaagatcgatacagggatggaacggctcggatttccggcaacagaggagagcgcagatctcatcgggcagattgaaaaacttccgaatgtatgcctggaaggaatgtttacgcattttgcaaaagcagatgagctggataaaacattttcagaagagcagtacagaaaatttgtatggatgagaaatgaggttgaaaagcgggggatttcgatttcgcaataccattgcgataacagcgcgggaatcattgattttccacagtggaaacaaaatctggtccgtgcgggaattgcgttgtacggactgtatccgtcagaggaagtaaaaaaagagacggtggacttaaagccggcacttcgcctggtcagccacgtcagctttgtgaaagaagtagagccgggagcttccatcagttacggagggacttttacggcagataagaaaatgaaagtggctaccattccggtaggatacggggacggttatgcgagagggttatctaatcgcggagaagtcctgattcgtgggaaaagagcacggatactgggacgtgtctgtatggatcagtttatggtagatgtgactgatattccggatactgtatttatggatgaagtcgttctgatcggaagagacggagacgatgagatcacggtggaggaacttagcgagatctgcggtcgtttcaattatgaatttgtctgctgtcttggaaaaagaattccccgggtttataaggggagcaatcttttggaaaaataaatgtcagttgaatacatccgataaaagcgggaatactcaagtatacttccctgagggggagaaaattgaagtataagaatcggagtgtgaatagaacgtgacagtcagacgaggggatatttattatgcggatttaagtccggtgatcggttcagaacagggtggtgtgcggccggtgctggttatccagaatgatgtgggaaataagcacagtcctacagtgatctgtgcagcgatcacatccagaatgaacaaagcaaagctgcctacacacattgaaatcagtgcaaaaaaataccggcttgtgaaaaattcagtggtacttctggagcagatcagaacattggacaaaaagcggctgaaggagtatatctgccatgtggacggaacatttatggaagaagtcaatgaagcgatccgcatcagcctggaacttcctacataacggaaatgggcggggaatgtcagcgttacaactttacagaacgaaaaaagagtgataaaatggaacaacgagtttatgagataaaaggagaattgagcaatgtcaggacattcaaaatttgcaaatattaagcacaaaaaagagaaaaatgatgcagcaaagggaaagatttttacgaagcttggtagagagcttgcggttgcagtaaaagaaggcggcggtccggatccggcaaacaacagccgtctgcgtgatgtgatcgcaaaggcgaaagcaaacaacatgccgaatgatacgatcgacagaaacatcaagaaagcggcaggagaaggttctggagacaactacgaacacatcacatacgagggatacgggccaaacggaacagcgatcattgtaaagacactgacagacaacaagaaccgtactgcatccaacgtaagaaatgcattcacaaaaggaagcggaaatgtaggaacaccgggatgcgtctcttttatgtttgatgaaaagggacagatcatcgttgcaaaagaagactgcgatatggatgcagatgaactgatgatgatggctctggactttggggcggaagatttttcagaagaagaggagagttttgagattctgactgctccggaagatttcagtgaagtgcgcctgaaattagaggaagcaggaatcgtcatggcagatgcggaagtgacgatgatcccgcagacttatgtggagctgacaagtgaagaggatatcaaaaatatccagaaaacactggatcttctcgatgaggatgatgatgttcaggacgtgtaccacaactgggatgagtaagcacaccttacatagattttaaatagtgataatgaaaccataataaacatacattagaatggtatcagaagttgtttatcaatggtttggaggtatcactatggtaaaagaaagaagaagtgcaaaacggattaaatatgatatggttcgtgtttactccaaaatggagactcatgtagatgggaaagcaaaaagtgttttcaaaagaaagccttatgctctcgcaaaataagaataaagaacaggtctgtcggtatctggaaatccggcagacctgtttctttatgcaaaaaaattgaaatgcagtatcagatatgctatactgaacaatggtataaaaggaaatacaacaaaaagaggaatgccaatgagtcagaatagcttacagaatgatttgattgttttgtatgaaaaaaccagagaaaaagtacggggatttcagaagaaaacatatcagtcagacatgggaattttaaaagaagaaaatcagacactgctggaatgtgtgaaagaaacaattgaaaaatctgaaaaatgtatgcaggaagttgcggggtatgttccggaatatgcatcggagatgctctctcagattgattccaagcgaaaaagagaagcggcagttattgatcacaacatggccatggtagctttttttgttccgctgatgggggaaattcagagtacgcagacgaagatatttacggagaaaatcgtggagttatggaatcagaaggtacctggcagcaaaatcggacactcggatgctgcaagtattgagaatgggtttaaaaaaggagttttctgttatattacaacagctgtctgtaagagtctgaacaagccagatgattgctatgaactgaatcttttgagggaatacagagatcagtatctgatggggacaaaggatggagagattcttgtaaaagagtattataatattgctccgacaatcgtaaagcggattgaccgcagtccggacgcatcagaaatttatgcggatatctgggaaaagtatttaaagccgtgtgtacgcctgattgaagcgggcgaacaagaagaatgcagagaattgtacacaaagatggttcgttctctggagaagaaatatttgtattcagtaggaggagagaaaaatgagtaattacaagacagagacaaaatgtatacaatccggatatgaaccgggtaatggagaggcgagagttcttcctatttatcagagtacaacatttcgatatacaagcagtgaacagatggggcgtctgtttgacttagaggagtccggttatttttataccagacttcagaatccgaccaatgatgcggttgctgcaaaaatctgtgatctggaaggcggagtggcagcaatgctgacatcatccggacaggcagctaatttctatgcgattatgaatatcgtggaagcgggagatcatattgtctgtgcatctgctctttacggaggtacctacaatctgtatgcccatacgatcaaaaaaatgggtgtagaagctacgtttgtagatcctgagtgtacgcaggaagagctggatgcagcatttcaggaaaatacaaaagcagtatttggagagacgatcgccaatcctgccctcgttgttctggatctggaaaaatttgcaaatgccgcacatgcacatggtgtgccgtttattgtggataatacatttgcaacaccgatcaactgccgtccgtttgaatggggcgcggatattgtgacacattctactacaaaatatatggacggacatgccgcttgcgtgggcggtgcgatcgtggacagcggaaattttgactgggagacacacaaagaaaaattcccgggactgacaactccggatgagacatatcatggaattgtatatacagaaaaatttggcaaaggtgcgtatattacaaaggcaactgcacagctgatgagagatctcggctctatccagtcaccgcagaatgcatttctgttaaacatcggactggagacactgcatttaagagtgccgcgccactgtgaaaatgcagttaaggtggcagagtatctgaaaaatcatgagaaggtggcatgggtgcgctgtccatcacttccgggagacaaatattatgatcttgcgcagaaatatatgccaaacggaacctgcggtgtcatcacattcggtctcaaaggcggcagagacgctgcagttgagatgatggatcgattaaaaatggtagcgatcgtgacacatgtagcggatgccagaagctgtgttcttcatcctgccagccacacgcatcgtcagatgaatgacaaagagctggtagaagcaggcgttcagccggatctgatccgtttcagtgtgggaattgaaaatatagaagatattattgcggatgtcgagcaggcacttcgttaattcaagatggtatggatgtatacaagaggcatccataccatttttgcgtgaaaaatcatcattttccgtataaacaagggcggttgatcgaatactaaagtatccggctgtccaagtacagacctgaaaatagagaaaagaaggtagaagatcatggaaaatgaggagaagcaaagacaacgtctggataaaaacgaagagattaaagagaccggcaccttaaatctgaatggaaacgggcacaaagcgaacatacagcttctgacgatcattggagagattgaagggcatgaggctgtttccggaaacacaaaagccaccaaatatgagcatttgattccaagactggcagaggtggaggatgacgatgaagtggatggagttttgattttactcaatacactgggcggtgatgtggaggcagggctggcgatcgcggaaatgatcgcatccttaagcaaaccaacggtctctctggttctgggaggaagccactccatcggcggaccgcttgcagtttccgcagattattcttttattgtgccgagtggaacaatgatcgtgcatccggtgagatcctccgggatgtttattggagtgattcagagttatcgtaatatggaaaagacgcaggatcggattacccggtttatcgcagctcattcgcagattaccaaagaacgtctggaagaattgatgttggattccacacagttggtaaaagatgtcgggactatgttagaaggggaagatgcagtcagagaaggcatgatcgatgaggttggaggaatcagcatggcattgaaaaagctgcgggaaatgatccggcagaaaaaatgttaatgacacacttttcaattgatgttatactagatgtagtatgtgtaattatcaagggggaagtattatggctgcaaagtcaacaaggaaaaagaaaactacaagaaaaaagtcatccaaaaatcaggcaagtacatccctgaacagtgaaattttgattctggtcatgtttgcggtctgtgtgctgatgcttttaagcaattttggagtcatagggattgcaggcagtgcgatctcttctgtactctttggttttttcggagtgatggcatatattctgccgtttctcttatttggcgtggttgcttttggaatttcgaataaaggcaatacacacgcctacataaaaattgcagcatgtgtggccttattgtttgcaatctgtgcatttttccagctggtgatgcatccttttgatgccaaagaaagtctgtggagctattatcagtatgccagtgattacagaaaagcgggcggtcttacagggggctgtctggtgaagattctgtgtccgtttattggtgtggtaggcgcttatgtggtactcgttgtacttatggtaatctgtgtgattctgatcacagaacgttctctgcttgcacctcttggaaaaggaagcaaaaaggcgtatgcagatatgaagcgccggcagggagaagcatctgcccggcgtgcgaagaacagagaagaaaaacgaagacaggcagaagaagcaaagacagaaccgaatgattcttccagaagaagtgatcataaagtatcgggtgtttcttttgcaacaacgctgcaggcccaggaaagtgaagtgccaaaggagacaacagcgaaaaagcgtaaaaagaattcttcaggaaaagatccggatatgcgggaactgactgtttcacaggaatcggatttttcagagccactgccgtctccatttgaagattttgtgatcaatcgtccggaaagcacggcgtcggatgcgagcgcagtggatactccattatgggagaatgaaccggaaccggcagaagagggcaacatgacgcaggaggatgttccggaagagtcagtccgtacaaggaagaagaccaaggcgagtgcggcagctgtggaagcagagactgttcaggtagaacagagtatcaaagagcaggagcagcagccgaagaaagtgtacaagattccgccaatgaatcttctgacaaaagggaaaaagggcggcggagactcggatgcccagttgcgcgccacggcccagaaactggagcagaccctgcagaatttcggggttcgcgttcatgtaacaaatgcaagctgcggaccgtctgtgacgcggtatgagctgcagccggaacaaggtgtgaaggtaagtaagattgtaggtctggcagatgacattaaattaaatctggcagcggcagatatccggatcgaggcgccgattccgggaaaagcagccgttgggattgaggtcccgaaccaggagaatacggcagtgatgcttagggacctgttagaatccggggaatttaaaaattccacagcgaatattccgtttgccgtgggaaaagatatttcaggaaagacggtgatcgcagatatcgcaaagatgccgcatttacttgtggcaggagcgacaggatccggaaagtcggtatgtatcaatacgctgatcatgagtattttataccatgcagatccggaagaagtaaaactgatcatggtggatcccaaagtagtggaactaagtgtctataatggaattccgcacttgctgatcccggtcgtgacggacccgaaaaaagcagcaggcgctctgaactgggcagtcgctgagatgatgaagcggtatcagctgtttgcccagcagaatgtccgggatctgaaaggatacaatgaaaagattgcgcagatgacagaagaaggagctccgaaaaaactgccgaagattgtgatcattgtagatgagctggcggatctgatgatggtggcgccgggggaagtagaaggcgcgatctgccgtctggcgcagcttgccagagcggcgggactgcatctgatcattgcaacacagcggccttcggtgaatgtcatcacaggtctgatcaaggccaatatgccgtccagaatcgcattttctgtctcatcaggagtagattccaggacgatcattgatatgaatggagcggagaaactgcttggaaagggagatatgctgttttatccgacaggatatccaaaaccggtccgtgtgcagggatcctttgtttcagataaagaagtgcagaaggttgtggactatctcatcgaacacaacggaaatgcctcctacagtgaagaagtggaggagcacgtaaattccgatctgccgtcaccggttcctgggatacagggagccggggtgcaggataatgcaaatgagcaggatgcatattttgcagatgcaggacggctgatcattgaaaaagaaaaagcatccattggaatgctccagaggatgtttaaaatcggcttcaaccgggcagcccggattatggatcagcttgccagtgcaggagtggtcggagaagaagtcggaacaaaaccaagaaaagtactgatgacaaaagaagaatttgaacagtacattcaggaaaatttataatgcagtggaggaagaaatgatgaaaacagatattcagatcgcacaggaagcagaattaatgcacatcaaagacgtggcagcgtctatcggaatttcagaagaggaactggagttttatggaaagtacaaagcgaagctctccgatgaactctgggagaacgtaaaagaccgcaaggatggaaaactggttcttgtgacagccatcaatccgaccccggcaggagaaggaaagaccacgatcacagtaggtctgggtgaggcatttgcaaaaatgaataaaaaggcaatcatcgcactgcgtgaaccatctcttggaccatgttttggaatcaaaggcggagcagcaggaggcgggtatgcacaggttctcccaatggaagatctgaatctgcatttcaccggagatttccacgcgatcacttctgcgaataatctgctggctgccatgttggataatcacattcagcagggcaatgcattgggaattgatccgagaaatattgtctggaaacgctgcgtggacatgaacgacagagttcttcgcaacatcgtagtaggacttggaaacaagatggatggaatggtgagagaagaccattttgtgatcacagtcgcatctgagatcatggcaatcctttgtcttgcagatgatcttgcagatctgaaacgccgcctgggacgaatcatcgtggcatatacatttgaaggcaatccggtaacagcagacgatcttcaggcaacaggcgccatgactgcactgttaaaggatgcgatcaaaccgaatatgatccagacactggagcacacaccggcactggtacacggcggaccgtttgccaatatcgcacacggctgcaacagtgtccgcgcgacaaagctggctttaaaaatcagcgatattacaattacagaagccggattcggagcggatcttggagctgagaaatttatggatatcaaatgccgtaaagcgggattaaaaccggacgcagtggtacttgtagcgacagtgcgggcactgaaatacaatggcggagttgcaaaacaggatctgggcgaagaaaatctggaagcactgaaaaaaggaatcgtgaatctggaaaaacacattgagaatattcagaaatacggcgttcctgttgtagtaacactgaattcctttgttacagatacggaagcggaaaatgaatttatccgcagcttctgtgaagaaagagactgtgaattcgcccttgcaaaggtatgggaaaaaggcggagaaggcggaatcgaactggcagaaaaagtgttggatacactggagaataaggaaagcaatttccatgtactgtatgaggatgaactttctctgacagaaaagatcgagaagatttcaaaagagatttacggggcaaacggtgttgtctatgagccggctgcaaagaaacagcttgcgaagatcgaagagatgggatttggacatttccctatctgtatggcaaagaatcagtattctctgtcagatgatgcgaaaaaactgggacgtccggaaaactttgacatccatatccgtgaagtttatgtcagcgcaggtgccggatttgtcgttgctctgacaggtgcggtgatgacaatgcctggacttccgaaagtccctgctgcaaataacatcgatgtaacagatgacggtaaaattacaggactgttttaaaggagtattgaatggcacagataattgacggaaaacgaattgcaaaagaaatcaaagataaattgaaagaagaagtatccgtgctgaaagaaagaggcaccaagatctgtctggcagtgattcaggtagggcaggatgcggcttcttcggtatatgtaaacaacaagaaaaaggcgtgcgcctatatcgggatcgactccgtttcgtatgagttaaaagaggctacaacagaagcggaactggtagaattgatcgagaaactgaatcatacagagaaggtacatggaatcctggtacagcttccgcttccggcacacattgatgaagaccggatcatacgtacgatttcaccggacaaggatgtagacggatttcatccggtgaacgtgggacggctctggctcggagagaccggatttgtatcctgcacaccggcggggatcattcagcttttgaagtattccggaattgagattgcaggaaaagagtgcgtggtgatcgggcgaagcaacattgtaggaaagccgatggcagcactgcttctgcgtgagaatgggaccgtgacggttgcacattccaggacagcagatctaaaagaagtgacacgcagagcagatattctgatcgcagcagtcggacagacgaagatgatcacagcagagtacataaaagaaggcgcggttgtgatcgatgtgggaatgcacagagatgcccaaaaccatctctgtggagatgtggattttgaggatgtgtattccagggcatctgccattacgccggtacctggcggggtaggtccgatgacaatcgccatgctgatgaacaattgcgtgcaggccgcacgcgattaggaggaactaatatgagatgtacgcattgtaatgcgattattccggaaggctggatgcgttgtcccagatgtggaaaagaagttcagatcgtccctgattacaatcctctggatgatgttcttacacaggaagtaaaaggctcggtcgaagatgttaccaggcagcttcagacaaaggatgtccgtgattttggcagaagacaggaagtgtaccagtcaaaagcaacgcgggtgctcagtcaggaagagctggatgaaatacaggccgggcgagagcgtgcggcgagaaacagatcccgtgcagaggcgaaacgaaaacagcaggaacgaaaaaagcagctggttcgcagaagacggaaagtgcttttgatcctgtttctggtcctgttgatttttggagcggcgttcggctattttctgtatcagaattcttatgtgggaaaagtggcaaaagggtacgatgcactgcagatgaaagaatatcagacagcagaaaaatacttcaaacatgcgattggaaagaatgcccagagggcagaggcatattccggtctggcagagacttatatggaacaggatgaaggggatgaggcagaatccgtatttctttctgctattgcttcttatccatccaacgaagaactgtatcgggcagcaatcagcttttatgaggagacaaagcagcttgataagatttccgagattctcgaggactgcgatgacgaatccgtgctttccagtctgaaagcatatgtttctacagagccggtcttcagtctggatgatggaaaatatagtgaagtacaggaagtgacactgtccgcatcaggggagaccatttactacacgacagatggaacgaatccgacttcgtccagcacaaagtataccgagccgattcttttaaatgaggaaggaaagacgcagattaaggcgattgcctataacaaaaagaaaatcccaagtctggtggtctcaaaaacttatgagattgaatttccggtagcggatgcaccggttgtaacaccgtccacggggcagtacagtacagcgacgcagatcagtattaccgtgccggaaggctacacagcttattacacgacagatggttccacgccgacaactgaatcttccttgtataccggaccgatcgagatgccagaagggcagacgctgttcagtacagttctggtgggtaagaccggaaaaatgacacagataacaaaacgaaattatatttatcagccgcagtaaaagcggctgatttttttagataaacactttgtaaaaatgcaaggggattttctaacaaaaatgagcctggttttttgtgcattatttaacgaaaaaaaacggcagttttgttgtgtgaaaagtttcacagtggtataatggttttagttgaaatcaacagactttaatcaaaggagatgcaggataatgagcagattttgtttaccaagagacatttatcacggaaaaggatgtttggaagaattaaagaacctgaaaggaaaaaaagcaattcttgtagtgggcggcggttccatgaaacgtcagggatttcttgacagagctgtaacatatttgaaagaagcaggaatggaagtccagttatttgaaggcgttgagccggatccgtctgtagagacagttatgaaaggtgccgaggcaatgcgtgcatttgagccggactggatcgtggcaatgggcggcggttctccgattgatgctgcaaaagcaatgtgggcattttatgagtatccggatgtaacattcgaggatctgtgcattccgtttaatttcccggaactgagacagaaagcaaaattcgcagcgattccatctacatcaggaacagctacagaagtaacagcattctctgttatcacaaactatcagacaggtgtaaaatatccgctggctgactttaatatcacaccggatgttgcgatcgttgatccggatcttgtggcaggtcttcctgtaaaacaggttgcatacacaggtatggatgcactgacacatgcgatcgaagcatatgtttctacactcaacggaccatttacagatccacttgcactgcaggcaattgagatggtactggataatcttccggcatcttacaactgcgatatggatgcaagagagcagatgcattatgcacagtgtctggcaggtatggcattctccaatgcattgcttggaatcgtacactctatggcacataagacaggtgcagcattctcaacaggacacattcctcacggatgtgcgaatgcgatctatcttccatatgttatcaaatacaacgcaaaagatccggttgcagcaaaacgttatgctgagatcgcacgcagaatgggacttccgggagcatctgagaaagcactcatcaacagtctggttgaaaagatcgatgactttaatgtcaaactgaacattccaaagactctcaaagacttcggaatcgaggaaaatgaattcaaagaaaaagttgccaagattgcagaactggcagtaggtgatgcatgtacaggatctaatcctcgtgcaatcgatcctgcaacaatggaaaaattattcacatgtacatattacggaacagaagttgatttctaatcaggctgtccgcttgtggatgaacgggaaagggacaggcacagtacaaaagcggtgcctgtcctttttgcagacagaagagaaaaatcacggaaagaactattgccattatgccatttttggcgtattattaaaaaaggtgatttattacaaggaggaagaacatgtataagattttaaaagcagaaaaattgtctgagaatatttttctgatggatgtgcatgcaccaagggttgcgagtcattgtgagccggggcagtttgttatcgtaaagatggacgagaagggggagcgtatcccgcttactatttgtgattatgacagagaagccggaacgatcacgatcgtggttcaggaagtcggagcttctactgtgaagatgtctgaactcaaagccggagattctttccgtgactttgtaggtccgcttggatgtgcctctgagtttgttgaggaagatatcgaagaattgaaaaaacagaagattttatttgttgcgggaggacttggtacagctcctgtatatcctcaggtgaaatggcttcatgagagaggaatagacgccgatgtgatcatcggagcaaaaacgaaggatcttgtgatcatggagaaagagatggaagaagttgccggaaatctctatgtgacaacggatgacggctcttatggacgctccggtatggtgacgcaggtgatcaaagatctggtagaaaaagaaggaaaacattatgacaagtgtgttgcgatcggaccgatgattatgatgaaatttgtctgtctgctgacaaaggaactgaatcttccaacgatcgtcagcatgaacccggttatggtagatggtaccggaatgtgcggagcatgccgtcttcaggttggagatgagattaagtttgcatgtgtagacgggccggaatttgatggccatcttgtagattttgatcaggcgatgaagagaagccagatgtacagatcagtagagggaagagcaatgctgaaattacaggaaggcgatactcatcacggcggatgcggacattgtggaggtgacgagtaatggcaaaaggaatggtgagagtacctgtcagagaacaggatccaaaagtacgtgcaacaaattttgaagaagtttgtcttggatataatcaggaagaggcaatggaagaggcaacaagatgcctgaattgtaaaaatgcaaaatgtatcgaaggatgtccggtatcgatcaatattccggcatttgttcaggaagtaaaggaaggaaatatcgaggaagcatacaagatcatcggacagtcttccgcacttccggcaatctgtggacgtgtctgcccgcaggagtctcagtgtgaaggaaagtgtatccgtggtatcaaaggagatccggtatccatcggaaaactggagcgttttgtggcagattatgcactggagcatgacatcaaaccagaaggtgcaaaagaacagaacggtcataaggtagctgtgatcggttccggaccatccggactcacctgcgcaggcgatctggcaaagatgggatatgatgtgacggtatttgaagcacttcatgaactgggaggagtacttgtttatggtattccggaattccgtcttccaaaacagaaagtcgttgcaaaagagattgaaaaagtaaaagaattaggcgttaaatttgagacaaacgttgtgatcggaaagtcaacaacgatcgatcagctgattgaagaagaaggatttgaagcagtattcattggttccggagctggacttccgatgtttatgggaatcccgggagaaaacgcaaacgaagtattctctgcaaatgaatatctgacaagaagcaacctgatgaaagcgtttgattcttcttatgatacaccgattgctgcaggtaaaaaagttgcagttgtcggcggtggaaacgttgcgatggatgctgcaagaactgcactcagactgggagcagaagtacatgttgtatacagacgaagcgaagcagagctccctgcacgagtagaagaagtacatcatgcgaaagaagaaggtgtgatctttgaccttctgacaaatccaaagcagatcaatgtagatgagaatggaaatgtcaagagcatgacagtcatcaaaatggaacttggagaaccggatgcatccggaagaagacgtccggttgagattcctggatctgagtatgacattgatgtagatactgtgatcatgtcccttggaacttctccaaacccattgatttcttctaccacaaaaggcctggaagtaaatcgcagaaaatgtatcgttgcagaggaagaaagtggacagacctccaaagaaggcgtatatgccggcggagatgctgtaactggcgctgcaacagttattctcgcaatgggtgcaggaaaagcaggagcaaaaggaattgacgagtatctgaaaaacaaagaaaaatagaaacagagcaaactagcaggcaagacctgtaaaagagaactccgcatggattcttcttccgaatattcgggacctgatgatatgcggagtgttttgtatgtataaggagagaaaaagaatgacaaaaaaagaacttgccctggaataccataaaaaagggtataactgcacacaggctgtagcgtgtgcgttttgcggggaatttggcgtaagtgaagaagagatgtataaaattgcagaaggctttggtcttggcatgggtatgatggatacctgcggagccctgacaggtctgtttatgctgattgggatgaaaaacagcggcggagttgagcaggccggaaaaacaaaagcagacacctataagaagacaagagagtatgctgcgaaatttaaggagatcaacggatctgtttattgtaaagaattaaaaggagtagaaacaggaaaaatccttgcaccatgtgataaatgtatcctggatgctgtggagctcgcagagcagttcctgaaagagaactaagatggaaaagataaaagcaagacagcttctgtcaatcacattaaccttatttgcagtattttttggtgcaggaaatatgatcttcccgccggccatgggacaacaggcaggtgaaaactatatacaggcgctggccggatttattctgacagatgcgggaatcgcacttctgggtatgattgcagttgttttagtaggaacggaggtcagtgatctgggagaactggtcagcagaagatttgcagtctttttgtctgtttgtatttatctgttgataggtcctttgtttgcacttccacgaacaggaagtgtttcatttgagttggcggttcgtccgtatttatcagaatcaaatgtatggtgggtatctttgctcgtgacggctgttttcttctggctcacatattatctgagcggtaatccgaagaaggtagtcaatgtgatcggaaaatatctgacaccgatacttttgatttgtatcgtattgatctttctggcctgcgtttttatggaaaaatcgccgaacagttcagttcagtatggaagcgtcggagttccgcagggagtatacaaagagattccgttcttccagggaatgatagaagggtattatgcactggatggtccggcaggtctggtatttgcgattattatcatcaatgcagtgcggggacatcaggtaaaaacaaagagaaacatcattaaatacacactgatctgcggggctggtgcagcgctgatcctttcggttgtgtattatatgctcacttatgtcggagcagtgacgcgtactccgttctccaacggaggaagtctgcttcatgcagtgacaagtgacctgttaggacctgcaggaggaatcatactgggagttgcagtactgtttgcatgtatgacgacctccatcggtcttacaacctcctttgcagattatttccatgaactgtttccgaatgtgtcttataaaaagattacagcaattgtttgtgtgttcagttttgtgatcagcaacatcggattggatatgcttgtaaaggtttctcttccagttttgatgatgttctatcctgtaacggtagtacttgtaattttgtctttctttaaaaaatggattggttcaaaacggatggcatatgtactggggatgttgtttgcattctgtgtggcatttgtagatggaatgcagagtgcaggaatctctcttggagttgtgacagaaatatgtaacaagcttccattttatgatttgcggctgggatggatcataccggcagcagttggagcccttttggggctgctgccggtatggaaatataacagagaatgagagattctataatttaacagaatagagcagagtgaaagaaggagcaggtaccggtcagtccgatatgtatggaatgatcagagtaaagactgctccttctttgcctttgtagcatcgttcaaaaagatgaggcagatttgtttcattgatgccattaccatcctccgcgacagaaatttttaaacagtttttttcttgaatttaaaacctttttgaaagaaactgcgttatatttatgtagaacgttttacaaattgagaatctgaaaggagagcgggtgcaaaaatgcttgataaaaactcaatagaagacaaaaaagtaatccgcaggattcagtccggagagacagaggacagtcagattctgattgaaaaatattatcaggaaattttccggttttcttattacatgacaggaaataaagaagacgcatatgactgcacacaggaaacttttctgaaaatgatacgatatatcggacaatataaagaaatgcagaaatttaaagcatggttgttccagattgcaaggaatgtctgctatgacggttttcgtagagaaaaggagattccttcgggaatttccaaagagtttgtacggggagaatctctggaaacaccggagaaatatatgcaggcaaagcagatgtcggaaagagtacgagatgccctgtctcagcttccggatatgcagagagatgttttgatccttcggttttatcatgaactaaagatcaaagagatcgcgcagattacaaacacagtaaatgcaaccgtaaaatccaggttgcggcaagggatggaaaaaatgaagagggctttgggagaggaggtatggtagatgacacgaaaagaaaagaaactttatgagcagatgcggcaatatcagccgccggaggtggagacggagaaatactgtgaaatgcaaaaaaaagcacaggcggaaatcgcaaagggaaaaattttaccacggctgcatttgtttgagagaatctggatccaggcagaatatctgtcaatctggttttggattacggaaggaatccttcttgtggcaggaatcgtattgactcagacagcagataaggaatcgtatattacatttgggtatgtactttctccactccttgcgatgatcggatttccggccgtactgaaaagtttttcaaatggagttggggaactggaacagtcctgtcgctataatttgagggaaatttttgggatgcgtattttactgacaggagtaacagaggcagtggtacttgttattgttttgggaattggagagttaaaagagggaagcatgatggaaagcgttttgaaagtgtttgttccgtttctgttttctacagcggtctatttttggatcatccgtcatgtttcgacaaaggctgtgtacagtattctggcaggtgcagcggtaatgctgtgtatcgggtgcatgcagctgaaaacattctgtgagatgcatccggagattttatggattcagaaggaaaacgtattatctttggcttttttgggagcattgtttctgactgtggcgggagcaagacagtatctgcagttcattggaaaaaagaaaaaaggatgggatgaattatggagcttcaattagacagagtgacaaaacaatatggaacgaagctggcagtagatcgtatgaatctttctatgaaagcaggagtatacggtctgcttggcgctaacggagcaggaaagacgacattgatgcgcctgttatgcgatattttgaatccgacatccggggaaatccggtacgatggacagaacattcacgttatgggagaagaatatcgaagccttttgggatatctgccgcagaatttcggatattatcccgagtttacagcggaaaaatttatgctttatatggcagcgctgaaaggtctgaaccgttcgtttgcaaaaaacagaactgaagaattattgagactggtgggattggagaaagaacacaggaaaaagattaaaacattttccggtggaatgaagcgaaggctcgggattgcacaggcgatgctgaatgaaccggaaattctgatcctggatgaaccgacggcaggtctggatcccaaagaaagagtgcggtttcgaaatctgatcagttcgttttccaaggataagatcgtacttctttcgacgcacattgtttcggatgtggagtatattgcagacgagatttttttgatgaaagagggacagatcctgcaagaaggaactccagaggaaatcacagcacagatgaacggacttgtatgggaatgtgaagtggatgaaaagagagcgacagaattagaatgccggcatacgattgtaaatatgaagaaaaaaaacggagcgatcgaactgcggattgtgtcggatacgaagcctgacgaagcggcaatatccgtggatgcgactctggaagatatgtatctgtattattttaaggaggatggaaatggggcaattatggagttttgagtttcagaagatcgtgggacgtaaactgattcgggtcggtctgctggcatatggagttttgatactgattattcttagtaattccagagtggattttctggatatttttgatcagaatggcaggcatctgcatggaaaagaagctttggaatacgagttgaagatggcggagcaaaaccgtggtccggtaacagaagaaaaggtagatgcgttgcttgcacaggaaaagcagggagcgaaaaatgccggaatgaatgaagcggaataccggctgcggacggactggatcacaggaactgcaggtgcaatctgggaggaagcgcctctgtcaaatcctgagcttcaaaattcgttacaaatcggatataccagagggtgggaaacaacactcctttcgatagaatccttgttccttatcatgggatttttgatcattgtggcagtttctccggtattttccgaggaatatgggtgtggaatggatgccttgcttttgaccggaaagtacgggaaaacaaaatgtattacagcgaaaatcatggcttcttttacattctctgttgtgctgacgattctgacagttttcagctctatggtttctatgctctggcagtatggaacagaaggatttgaagcctcacttcagtttggaagcagaggattgttttgggaagttccatgggaggtgagctgttttcatggatttttactggtggtaggatttggcattgcaggagcagttctattgagcagtcttgtacttcttgtctccgcagcagtttcgtcctcgtttgtcagtgttttgatttctattttaatctatgtgctgccgattgttttgatctttcgttttggtttactttcgtttgaccagtttttatcaatcatgccgagcggagattttaatgtggcaatgctgttgtcgatgcagggtgtttctgtgactggaaatgaaattccgatgtggagcattaaccttcttctgacagcggcaggggttcttgcagttttgttgggcggaagaaaaatttttggaggacatcaggtaaagtcgtcctgaaaaattaataaaaaagcaatgaggagtccgaaggggctccttattttcatgtggaggtttctagggtggcatggtatagtaaaagggacaaaaaatgacaggagtacaacatgataaaagaaatcagagaagagttagatcaacttggggaagagagctataagcagtttaatcagaagctgatcccagggaccgatcatgtgatcggtgttcgtatgccggctcttcgaaagctggcaaaaggaattgcaaaaacagattcgaaacagtatctggaagaagcacagacagaaatagatgaacggtctgcgcatgaagaaattatgttatacggacttgttctggggtatgcaaagatgagtatcgaacagagaatgcaggcgcttgatatgtttgttccgaagattcataactgggcagtctgcgacagctgttgtatgggatataagttcatggaaaaagagcaggaagtgtggttttcttatctccggaagtatcagaacagcagcagggagtttgaagtccgtttttttatcgtatccctgctggcacattacattaacgaagcctatattgagcaggtgcttgagattctgaatcataccagtcatgaggggtattatgtgaaaatggcagtggcatgggctgtatcagtctgttatgtcaaatttccgattcagacaaagagactgctgctggcaaatgagatggatgattttacacataataaagcgatccagaaaatccgggaatcctatcgggtgagcagagaagaaaaagtggaattgaatcggttaaaacgatagaagcgacaggaggaatgtgtgatgcgtcagatgcgtttagaaaaaagagagattaaggatccggcagagctggaaaaagtgttggatgcatgtaaagtggtgcgtataggaacaatggatgcggaggggatgtttattgttcctgtaaatttcggatatgaattttgtcagaaagagcgcagcttaaaattgtatatccacagtgcaaaggaaggacggaaagcggaagcatttgcagaaaacccgaacgtagcaattgaaatggactgtggccatgaggtgatccgtggagattatacatgcagttattcttttgcattttccagtatcatgggaaacggacgaattcgtatggtggagaacgaggaggaaaagagacacggacttacgcttttaatgcagcacgtagaagcgggcgccgaaattgaatttcttccgcatatgctgcagcgggttgcagtgtattgcattgaggtttcggaatttacaggaaaacacagagagaaaaaaggacagacagcatgaaaattacattgattacagtaggaaaaatcaaagagaaatatttaaaggatgccatcgcagaatattccaagcgtctgagcaaatattgtaagctggatataattgaagtaccggatgagaagaccccggatcaggcaagtgagactgtggaagagggaattcgcagcaaagagggagaaaaaatcttaaggtatatcaaggatgatatgtatgtgatcacactggaaatcgcagggaagatgctgacatcagaagaactggcagaaagaatagaaaaactgggaattcagggaaagagcagcattgcatttgtgatcggtggctccattggcctcgggaaagaggtgttgaaacgctcagattacgcacttagtttttcaaagatgacatttccgcatcagctgatgcgagtgatactgttggagcaggtgtatcgaagttatcggattataaatggtgagccatatcataaataagaggagatatgaaaagagagggaaacaagatgaaagaaaatcaagtgaagaaattagtgatggcggcaatgtgtgtggccttggggatcgttcttccgatggcattccatacgattcagaatgcgggaagtatttttttgcctatgcacattccggtattgatctgcggtctgctctgtggatggcagtatgggctgatatgtgggattttagcgcctgtattatccagtctgtttacaggaatgcctccggctgcaatccttccggtaatgctttgtgaactggcagtctatggattgattacggggatctgtgtgtacggcattcatacagaaaagcaaattgtaaaaatatatggttcgctgatcacagcgatgctggtagggagaattgtcagcggtattttaaaagcacttattttcaatgtgggagaatatagcttcaagatctttattacatccagttttctgacagggataccaggaattctgattcagttgatttttattccggtcattgtgctggcattacagaaagcagggattgcagagccgaaaaggagatagttaccatggatatcagaacatattttaatcaaagagccgcacattgggatgacggggagcaatcggtcgatcagatcagacgtatgatcgcatttttaagtgatattcaggagggaatgagtgttttggatgttgcctgtggtacaggggcgatgtttgaggcgctgcgggaacgaaaaccttctcatatcacagcagtcgatctgtcagaaaagatgatcgagatcgctgcccgcaaagtagagggggactccttgtttgaattgcagtgccgggatctgttcgagatgacgcaggagacatttgacaggattatcatctataatgcataccctcattttatggagaaagacaaggtagtacagaaggtggcagagctgttaaatccaggcgggagatttatcgtggcacatggagcatgcagggagaaaataaatggttgtcacacgaatgtgccaaaagagattacgtccggtctgttgtctgcaaaagaagagagccgtctatgggagacttgttttagcatcgatattttgatcgatacagagcagttttatatgttttcaggagtgaaatagaatttggctgaaagatctcttgacctttgcccaaggtgaagacttagaatgagtgtagtataaaaaaggagagatcacagtatgaaaacagaatatacaatcagtcaaattgcagaaaaactgcatattacaacaaacaagatcagattttatgaaaagaaaggacttctgactccgatgagagagtcgcagaataggtatcggaaatttggcgaagaggatattttccgtttggagacgattctgctttatcgctcgttgggattgagtattgaagccattcagaatatattacaatgcaataagaaagaaaattatctgacacatatgcaaaaccaatggatggcagtcaataatgagatccacagattgagtgaaattagaaaatcgctggaaatggttttggacaaaatatatgaagaaacagaaggacaggatttagaaaaagattttttgaagattattgaacagagtaatctgctttgccaggtgaaaaatgagtggaaagaccagtgggattttgatggctgggcaagggcatatgatgaggatgtgaaaagggacacaggtgcattaaaaatctatgagaattatgagacagtattacaaatggtttttgaggaagtggaaaattttcagagaaaagatggaaagatacttgaaattggtgtcggaacaggaaacttggcgggtaaatttttacaaaataaatatcatatcattggaattgatcaatccaggcagatgctggcagttgcaaaagaaaacttgtatgcggaagcagtctgcgtggaaaatggacgtattcaggcagtaggtactctggatgatgtgatgcagtataaaacagatggagacgagatggtggatttgcagggaaaaacgatgcttccgggatttttggatgcacattctcattttgtaggagctgccaatgcaatgacacaatgcgacttgtcagagtgtggaaatttttcggagattgtagatgccatgaaaatgtttgccgaaaaaagaaatttatccaaagatgcatggatcgtaggctgtaattatgaccagaattttctggaggaaaaacgacatccggacagatatgtattggatgagatcagccatacaaatccggtattgctgatccatgcttcctctcatatgggagtggtaaacagcaaaggattagaaattcagcagattgatgaaaagacagaagattgtccgggaggaaaatatgggagaatcgcagggacaagaatcccggacgggtatatggaagaaaaagcgtttcttgcgtttcagtcaaaactgccgatgacatctatggaggagctgatgcagcttatcggggaagcgcagaaaatgtatgcgagttatggcgtgactacggttcaggatggaatggtaggaaaaccgttgtttgagctgttaaaatatgcctctgccaatggactgttgaagctggatgtagtagggtatgcggatattatgacggcggcagatctttttgaggaagaaagggcatacgcaaaccggtataccggtcatttaaaaatgggaggatataaaatttttctggatggctcaccgcagggaaggactgcgtggatgacaaagccctatgaaggggaagagaattattgcggctatccgatccatacagatgaggaattgaatcactatattgagcttgccttagagaaaaaacagcagcttttggcacactgtaatggagatgcggcagcagagcagtatatcggacagtttgaaaaagcactgtcaaagagaacggataaagatctgcatcgggcagtcatggtacatgcacagcttgtgagaaaagaccagctgcagagaatggcggcaatcgggatgatcccaagcttttttgtggctcatacgtattactggggagatatccatcttcaaaatttcggagaaaaaagaggcagccagatttcaccggtgaaagatgccatagattacggaatgaaatatacgttccatcaggatacacctgtgatcccgccggacatgatgcgtacgataagcagcgcagtcaatcgtatttcaagaggtggaagggtcatcggtgaaaatcagaagatttcagtattggatgcattgaaggcagttacgatttatgcggcgtatcagtactttgaagaacatgaaaaaggaagcattgaatgtggaaaatatgcggattttgtagtgttggagaaaaatcctctgaaaactccaaaggaagaattggcagagatcaaagtctggatgacaatcaaagaaaatgaagtaatttacagaagtggagaagcgaatcatgaataatcgtaccaaaggaatcagtttggcaatcatcactgcagtaatgtggggaatcatggggatgtttgtaagaggactgaccgggtatgcgtttacaacttttgaaatctcatttttccgctgcgcactggcaggtggcgcctatttcctgtttttgctgtttacaaaaccctcggctctaaagattaatttgaaggggctggtgatttgtcttctttacggagcggtggcatacagtatcagctttgtgagctatagtgtggcagtttccagaattccggtgggtgtggcaactgtgctgatgtttatgagtccgatctgggtggcaatcctgggacggtttatgtttggagaaaaactgccaaaaagcaagatggtgacgattttgatttgtctgatcggcgcagtatttgtagcaaatctcatcggaggcggagatatcaagctggatggaatcggaattttagctggagtgatcaatggtgtcggagtagcacttcagattctgctcccgaaatattttgcaaaagactatgagagggatacactgttggtgtatggatttctcggggcagctgttgtattgatgtttggtatggattttggtgcagtatcttcccatatgagcagtacaccaacaggagtgttgctctggaatttatttggaatcggaattctgtgtaccatggtggcgaatgtatcctgcgtcaaatctacacaatatgtggaagcaactacaaccagtatcctttctgcactggaagttgttgtaggaactctggtcgggtttgtggtatttcatgagcatatgactatgcttcagattttaggtgcagtgatcattgttgtgggagccatcggatcggagatttatcagccgaaaagagttgaaaaagattatgggagggtgaaataaaatggaactacagaaagtatcacgcagatacagaatcagactccttcaggaaacggacatggatgatattttacgattaagtgaaagtaatccgatgttttatgaatattgtcctccgtttgtaacacgagagagtattttaaatgatatgaaagctttaccacagggaaagacagacgcagaaaaatattatattggtttttttgaagggcagaagttgattgcgattatggatatggtgtttgcatttccagatgatgaaacagtttatattggattgtttatggtagatcatgatgtacaaggatatgggattggttctattatcatagaagaatatgcagagtatatacgtacgctgggaaagaaaacgatccaactggcatttgccaaaggaaatctccagagtgaggcattctggcagaagaatggatttgtgagaacagggaaagaagtgcaaaatgacgggtatattgcagtctgtatgaagcgggaactgtagaatggagacttacgatggtatatttagagcaatttagatttcctgacgcggaagtggaatttgatttttttctcaggcagaaacgtacctgttatgatacgtattatccatttcaaattctgtcaaagcatcgttttgagcagattgattttgagcctgttacgattttatatggcggaaatggaacgggaaagtccaccgtgttaaatattatcgcgcaaaaactgcatttgttgagggaagcaccatttaaccagtccagcttttatgaagactatctggaactttgctcttttgagagtgcagcgcatttgccgaaagacagcaggattattacaagtgatgatgtatttgattacatgttaaatatccggaatctgaatgaagggattgaccggaagagggagatgttgtttgaagagtatctggatacgaagtttgcaaagttccggatgaaaagtctggatgattatgagcagttgaaacgagtgaataacgcgagaagaaaaacacagtcacagtttatccgttcggaactcatggataatgtacgagagtattccaatggagaaagtgcatttctatatttcacagaaaaggtgacagaaaatgcattgtttttattggacgagccggaaaacagtctttctccggcaaaacagcaagagctggtaaaatttatcgaagattccgcaaggttttttggatgccagtttgtgatcgcaacacattctcctttcgtgctggcaatcagaggagcaaagatttatgatctggatgaggagcctgtggatgtgaaacgatggacagaactggaaaatgtacgggcatattatgatttttttaaaaagcatgcatcagaattttagaaaagggcagcaagtgtacttctgatcagaaaaccagaagatgcacctgctgttttttaaatagggtatttcttgcagagggattccagaatttcaatatgaagttcttcatccagaataatgcgtttcaggcatttttggatgtcttcatcctgaattcgctgacattgttcccgatatttgcggactgcctgcttttcaccatttaacgcactgagcagaatttttggaagatccgtaaaataattgatatatccggctgtccagtagaacatgcgattttgccgatgtgtccacaggcgtggggattcacccagctgatcggcaagttgaccgaatattttgagatggtgcatttctacaatactgatgttcttaaagatttctgctatgcgggcagtatcggaagtcagaaaaatactgttgtaaatataaagaccaatcgtggacatttcggactcctgtccacccatgttatccagcatcattcttccatataaaggattttgttctttgatgcagacgggtggatagggagattgatgggcatataaaaaatcgggagaagtgtctgtgggtgtggaatcgggggtgcagctacagctgcaggttaaatcgttattcatagagaactccttgtgataagtttacagtgttatcatatgaaaacatagagtaaaatatgtgattgttttttaggggaatttcaatggttcagattgtacttttttaaatattcgtctttgatatgataaacatagctttcttgataaatcataatttcaccaccatttagataaaaatagccctaccttgcgatagggctggattttcgagccggacatttattagacgcttccggtaagcgaacaatattttcgatgatagatttctctatccctgttattattatacgcagagatagaaaatatgtccagaaattgcctgaagattgaaagccggaagcgtatgtggtattttttatcagcgctgatgttccagatttttatttgcagtagaaagcatcagcttgatccgattgagctggttgacttcgctggctcccggatcaaagtcgattgctacgacattggaagtcggatatcttcttctgagctctttgatgacaccttttcctaccacgtggttcggcaggcaggcaaatggctgtgtgcagacaatatttgcagcgcctccgtggatcagctccagcatctctccggttaaaaaccatccttcaccggtctggtttccgatggaaacaatctcagatgccatttctgccagtttttcgatcttggcaggtccttcaaaatgcgtgctttcttcaaatgctttgcttgcaggtgcacggaaccattcaagagcacgaataccaagatttccgagtacagccttggattttttcatgccaaggtgggataccttgaaattctggttgtagaagcagtagagtaaaaagtccagaagatccggaacgactgcttcggcgccttctttttctaaaagctcgaccaggtggttgttggctgccggcaggaactttacaaggatttctccaacgattccgactcttggttttttcacatccagtgtttcaatctggtcgaattcctgaatcatctgacggcacagttttttaaatgtatggcgatgaggatatccgttggatacaaaatctttacatctctttttccatttttcatgaagtgcatcggttgttcccggcactttttcatatgggcgcatccggtaaacacatttcataaagatatcgccaaatacgacgccatacaaaccacgcagcgccaggagcggcgtgatcttaaatccaggattgctttccagtccgcttagattcagtgaaatcacagggatatgagaatatcctgcttttttcagtgcacgccggataaacccgatatagttggaagcacggcatcctcctccggtctgtgtgataatgacagccagatgatcggtgtcatattttccggataaaatcgcatccataatctgaccgactacgatcagggaaggatagcaggcatcattgtttacatattttaatcccatgttgacagcctgtttgttgtcatttggcagaatttcaaccttatatccggatgcacgaaatgccggttccagaatctcaaaatgcatcggtgacatctgtgggcagaggatcgtgtattccttgcgcatctcttttgtaaacggaatcttctcaatagaagatggctggatgatgcgctcggtcttttgctgttctctcacccggatggcagcaagcagggagcggacacggatacgggcagctcccagattgttgacctcatcgattttcagcgaggtatagatcttaccggaacgggtcaggatatctgccacctgatccgttgtgacggcatccagtccgcatccgaaagaattcagctggatcagatccaggttttcttttgtcttgacatagtttgcagcggcatacagtctggagtgatacatccactgatccatgacattgagaggtcgttctacttcgtgcagatgagagatagaatcttctgtcaggacggcaatattataggagttgatcagctccggcagtccgtgattgacctcagggtccgtgtgataaggacgtccggcaagaacaattccgcgattgccggtttcatccagaaacttgatcgtctcttcacctttacgacgcatatcttctctgcatgcagcaagttccagccatgctttgtgaacagcagtgcggatctcatctgcggaaacagaaaatttttcaccaagctcttcaatcagtctggaagaaagcgtctcttcactctggaaagacataaacggatgcataaaatcaatttctccggttacgatcggatccatgttatttttgatattttccggataggaagttacgatcggacagttgtagtggttgttggctttttcaaattcatttcgttcgtaagggatacaaggataaaaaatatgtttgatcccttcgttgataagccactgtacatgtccgtgtgccagctttgccggataacattcggattcactcggaatggattcgattcccagctcgtaaatctttcgggtagaagacggagagagtacgacacggaatccaagcgttgtaaagaatgtatgccagaacggataattctcatacatgttcaaaactcttggaaggccgatcgttcctctggaagcctcttcttctgaaagcgaggtgtatccgaaataccgctgcatcttatattcaaacaggtttggcaggtgattttttgatttttccttgccaagtcctcgttcacagcggtttccggtgataaactttcttccgccgctgaaatgattgattgtcagacggcagttgttcgtacaaccgcggcattttgtcatggtagtcttgtattccagtgcttcaatctcttcaattgggagcatggtagtgccttcacaatcctgataacgttcccttgcaatcagggcagctccaaaagcccccatgataccggcgatatcaggacggattgcctcacagtctgcgattttttcaaaactgcgcagaacggcattattatagaaggttcctccctgtacgacgatatgttttccaagttcagaggcgtcggacaccttgatgaccttaaacagtgcgtttttgatcacggaataggcaagtcctgcggagatatctgcaacagaagcgccttctttctgtgcctgttttactttggagttcataaatacagtacagcgtgttcccagatcgatcggatttttggcatagagggcttcctgtgcaaaatcttcgactgtataattcagtgattttgcaaaggtctcaataaaagaaccacatccggaagagcatgcttcgtttaactgaacactgtctaccgtctgattcttgattttgatacatttcatatcctgtccgccgatgtcgagaatacagtctacatccggttcgaaaaatgcggccgcataataatgggaaaccgtctctacttctccttcatccagaagcagtgcagccttgatcagtgcttcgccgtatccggtggagcaggagtgaacgatctcgacaccttccggaagctgactgtagatctccttgattgcccggatcgttgttcccagaggatctccgtcattgttatgatagaaggaatacaacagcgttccatcttcacctaccaatgctgcctttgttgtagtggaacctgcatcgattccaagaaaagcctttccctggtaagaagcaaggtctttgaccggaacctgatgttttgcatggcggaaagtgaattcctcgtaatctgcagaagatgcaaacaggggttccagacgctccacttcaaattccaattcgattttatttgccagacggctctgaagtgtctgcagaggaatatccacattccgtttggaattcagcgcggaaccgattgctgcaaacaaatgagaatgattaggagcgataatatgctcatcgtccagttttaaagtacggataaaggcctcttttaattccgataaaaagtgaagtggtccgcctaagaaggctacatgtccgcggattggctttccgcaggccagtccgctgatcgtctgattgactactgcctgaaaaatagaagcagctaaattctctttggaagctccttcattgatcagaggctgaatatcagatttcgcaaaaacaccgcagcgtgctgcgatggaatataaagaagtataattttttgcatattcattcagcccactggcgtctgtctgaagaagggaagccatctgatcgatgaaggaaccggtacctcctgcgcagacaccgttcatacgctgttctacatttccatcttcaaaataaatgatctttgcatcctcaccgccgagttcaattgccacatcagtctgaggtgcataatcctgcaaagcggtggaaaccgcaatcacttcctgtacaaacggaacatgcaggtgggtggcaagagtcagccctccggatccggtgataacaggagaaacatggatcggtcccagtttatagatggcacgtccgagaagatcagacagtgtttcctgtatatttgcaaaatggcgttcgtaatcggagaacagaacttcattatctgctcccaggactgcgatttttaccgtggtggaaccaatatcgatccctaaagtatataattcgttctttttcatagtaattcctcatcttttgctatagtagttattacttatttaaatgcagtcgttattttacaacattttatattatacgacaagtagtctaaaaacacaattatgagtgttcaccataaatatacaaaagattttaaggaaaaaatagaaaatctcataaaatttaacacaatcctaacgcaaaaaataaaacaattatttgacaaacagtaatgctcactgtacaattactctctgtaagggaataaatatataaggagagattgtcattgaactggttaaacaagctggaaagaaaatttggacgatacgccgttcacaatctgacgacgtacctgatcgggacatacattatcggatatgcaatccgtctgtttatacccgatatgatgatttggctgtatctgcagccgggagcgattctgcacggacagatctggaggatcgtatcctggattctggtaccgccgcagggcagtcttctggaaatcgtcattatgctgatgctttactattctctcggtactacgctggagaggacctggggagcattccgctataatgtatatatcttttcgggtattttatttacggtactgggagcgtttgtgctgtacatcctgtatggctcgggggcagatttcctgggtggatatttcagtacgtattatatcaacctctcaatttttcttgcatttgctgcaagctatccggatatggaacttttgttgtatttcatccttccgatcaagatcaagtggatgggactggtgtatggagtatacatcctgtaccagttggcaaccggcaatcccgcatcgcgcatagtgatcatttcatcacttttaaattttgtcgtgttctttttatccagcaggaatttaaaaccgtatacaccaaaagaacaggtgcgcaaagcaaaattcagacaacagacaagaccgcatatgacttatgcaaatggtgcaaaacaccgttgtgctgtctgtgggagaacagagttggatgattcaagtctggaatttcgattctgttccaagtgtaatggaaattacgagtattgtcaggatcatttatttacacaccagcatgtgaaataagaattaaggataagttagaaggagagttatgacatgaaaaaaacaaaagtagtctgcacaatgggtcctaatacaaatgacaaagaagttatgagaaagttgattcaaaacggaatggatgttgcgcgtttcaacttttcacacggtgatcacgaagagcagaaattccgtatggatcttctgaaagagcttcgcgaggaagaacatgcgcacacagcgattcttctggacacaaagggaccggaaatccgtacaggtcttttgaaagacggaaagaaagtaaccctccaggaagggaatacatttgtacttacaatggaagatatcgtaggagatgatacaaaagtgtctctttcttataaaggtcttgcagaagatgtacagcagggaacagtaattttgatcgatgacggtctgatcggactgaaagtaaaagaaatcgtagatcaggatattgtttgtgagatcgtaaacggcggtgagcttggtgagagaaaaggggtcaatgtaccgaacgttccggtaagacttcctgcaatcacagaaaaagataaagaagacatcaaatttggtgtagaacaggatattgattttatcgctgcatcctttgtgcgcaatgcagagtgcgtccttgagatccgcgcatttttgaaagaactggatgcaccttatattccgatcattgcgaagattgagaatgcagaaggaattcgtaatattgatgagattatccgtgctgcagatggtatcatggtagcaagaggagatatgggtgttgagattccggcagaggaagtgccatacctgcagaagatgctgattcagaagtgtaataataacttcaagactgttattacagcaactcagatgctggattccatgatccgtaatccacgtccgacaagagcggaagtgacagacgttgcaaatgctgtttatgacggaacagatgcagtgatgctgtccggagagactgcacagggaaaatacccggtagaagcattgcagatgatggtacacattatcgaaaatacagagcagcacctggattatgatatgatcctggataaggcaggagatcacttaaagagaggaatctccagtgcaatcggatattcttctgttttggcagctgcgaatctgaaagcaaaagcaatcattacaccgacagtttccggagcgacagcaagagtgatgtcaaacttaaaaccaatccagccgatcatcggagtgactccgagtgaaagagcactgagaagaatgtccatttactggggcgtacaggctcttaaatcaatggaatgccatacaacagatgatatctgcagtgaggcaattgagatttcaaaagtaaaacgatgtgtagagacaggagatgttgttgtattgacagccggaatccctgcgctggatgtaaatgctgcccgtgagggaatcagtaatatgatgagaatcgcgacaattgaataaaattggcaggataacacatgccgttcatagaatttttctgtgaacggcatttttgtattgacaagcattctcgattcttatatagtgtttcttgaaagaactactaacatgatcgggagaaaactatggaacagaatcagtatgtggaatacctgcttcatttcggactgacaaggcaggaggctctgatttatgtggaattacttgtaaaaggaaagcagacaggatatgagattgcaaaggagacagggatttcccggtccaatgtgtattctgttctggcagcgctggcagaaaaaggagcggcctatgtgatcgaagagtctgcaaagcgctatattccggtaaaagtagaggagttttgcgggaactgtatccgcaggatgcaggaggagcaggagtggatggagagaaaccttccacagaagaaagcggagacagaaggatatatcaccattgaaggagaacagaatattctggataaggcgaagaatctgatcgcacaggcgggggaaagagtgtatctttcctgtacagcaggatatcttgacgcattccgtcaggcgttggaagagcttgtgaaaaagaagcggaaagttgtgatcctgacagatgccccgtatgaattgaaagacgcaattttctatcagacagaggaaaaaggacagcagatcgggttgatcgtggattctaagagcgtgctttcaggggagtatggaaaggggagcctgaatacctgtctgtattccggacagaagaattttgtaactgtatttaaaaatgcaatggcaaatgagataaaattgattcaattacaaaaaggaggaactgtattatgaataaaacaccatttgtaacaaaagaacagctggatgaaattatgaaaacctatccgacaccgtttcatctttatgatgaaaagggaattcgcgagaatgtaaaggctcttcgggaggcgttttcctggaacgaaggatataaggaatactttgcggtaaaagcgtgtccgaatccatttctgatcgacattttaagagagtatgactgtggatgtgattgttcttcctacacggagctgatgttgtcagatgccatcggagtaaagggacaggatattatgttttcttcgaatgatactcctgccgaggattatgttctggcggaaaaattaggggcgatcatcaatctggatgatttcacacacattgattttctggagaaaacgatcggatatattccggagacgatcagctgccgctacaatccgggcggattatttaagatcagcaatgatattatggacaatccgggagatgccaagtacggaatgacaacagagcagttgtttgaggcgtttaaaatcctcaaaagcaaaggagcaaaagaatttggaatccatgcatttctggcaagtaatacggtgacaaatgattattacccaatgctggcaaaagtattgtttgagcaggctgtaaagcttcagaaggagacgggagttcacattaaatttatcaatctctctggaggaatcggaattccgtatacaccggatcaggagccaaacgatatccgtgtcatcggagaaggggttcgccgtgtctatgaagaggttcttgttccggcaggaatgggagatgtggcaatctataccgagcttggacgttttatgatgggaccatacggatgtctggttacaacagcaatccatgaaaagcatacacacaaagaatatatcggtgtggatgcatgtgcggtagatctgatgcgtccggcaatgtacggggcataccaccacatcacagttatgggaaaagaagatgcaccacatgaccacaaatatgatgttacaggatccctttgtgaaaacaatgataaatttgcaatcgacagaatgcttccggaaattgaaaaaggagattaccttgtcatccatgataccggtgcacatgggtttgctatgggatacagctataacggaaagctaaaacatgcagaattattgctgaaagaagatggaagtgtacagatgattcgtcgtgcggaacgaccagcagattactttgcaacatttgattgttttgacattggaaaaaaattgataaaaaattaaaaaagacttgccaagtcaagaaatctatggtaatatattttttgttcgggagctgaaaaagttcccgagtataagcggatgtggcggaatggcagacgcacaagactcaaaatcttgcgtaggtgactacgtatgggttcaagtcccatcatccgcagtttgaaaaagccttgagtttcaaggttttttttagtgcaaaaagaagtccttctggaagtacagaagggctctttttgtactggctttccttgtcctcatataaatggatgttctgttgaatgattttcagacattgtgccagatgctgctcttccagctgttgttctttctgatggttgttcatgttttttcctcgcttttctcaaatttttcactgtaaaatctgaatcaggcacctgtttccatcccacaacggcaccttccagtttcaggcggtctttcattataacaaacagcagataaaaggacaagaaatattgacaaatttcctgagctggtatattatataacagtgatatataacaatgttataacgatgaaggaggtgaaataatgagtgaagaagaacaaacaacattgcacctaattcgttcagctgcgatgcaggaatttctaaaaaaaggattcaagtctgcgtccttgaggaacattgtcaaaatagccggtgtgacaacaggtgcattctatggctactatgacagcaaggaagatttatttgaatcactggtaagcgaacattacaactttttattgaactgcttttgcaaggcacagaaagaatttgcagaaatcccgccagaggaacagcctgataaccttacctctacttccggcgaatgtatgtatgaaatgctcatgtacgcctatgatcatttgaatgaatttaaactcatactttgctgctcggaaggaacacgtttttcaaaattgattgatgaaatggtagaaatagagacaaaaggtacgcatgattatttagcagttcttgaaaagttaggcagacctgcgccacctatagatgaacgattagagcatattttgatcacaggaatgtttaacaccttttttgaattgattatacatgaaatgccacttgaagaagcgaaacattatctgagagaaatgagagctttttataccgccgggtggatgaaaattatggggcagtgaaagcagacatatttattaggacaatctgccctatcattcttgataatggaaagtgtgaactttccattatatttgatacataggttagttttaactaacgaaaataagaaagtagataatcaaacaaggatatttgagggcagctattttgtcttcattatcataaccttattgagcaggttcaataagttaaaaaatttttaaggaggtttttcaatgaaaaaacagtcaaatctgtcaagcctgatgggatatgccggaggatataggatattggcctatctttcctggatactgtctgtaatgagtgcattgttggctcttgtacctttttggtatatatggcgtatcattcacgacatactggaagtttctccagacttctcacgggctgaaaaggtcacaagttacggctggtctgccgtattatttgcggttatttctattgttgtttatatagccgctttgatgtgttcgcatataagcgcgtttcgggttgccgccaatatccgaaaagagcttatgcgacatattacagcattgccgattggagtaacggaaaaatatggaagcggaaagctcaggcgaattgtaaacagttccagtgccgctacagaaaactatcttgcacacaggctgcctgacaaagcgggagcaattgccacgcccgtaggactgctctttttattacttgcgtttgattggcggttagggattttaagccttgttcctgttgttcttggttttttgattatgatgaaaatgacagggaaagacatggaagagagaatggagcaatatcaaaatgcgctttctgatatgtcaaatgaagcggttgagtatgtaaggggcgtacccgtagtaaagactttcggacagacaatcttttctttcaaacgattcaaagcagcgattgacaattacgaaacatgggtaattgcatacacgaaagcattaaggttaccgatgatgttttatacaacagcaatcaacggtgtattcgcgtttctgattgcgggaggtattctctttacaagggacggcgtaacaaatgaattgctgctaaatcttatcttttatattgtgattacgcctgttatcggtacaacactcacaaaaattatgtttatgagtgaggacgcaatgattgtaggagacgcaatgaacaggattgaggaagtgctgaatgaaaagccgttgtctgaaagtaaggtaaataacgtaccatctgatcattcaattacattagaacacgttatctatagctatgacggtgagaaaaacgcactcaatgatgtttctatgtcaatcaaaccgggacggacaatcgcattagtaggctcgtccggaggcggcaagacgacccttgcaaatattgttacaagattttttgatccacagaaagggcgtatattgatcgggaatatcgatatacgcgacattccaaaagaaacattgatgaataaggtatcttttgtatttcaaaatagccggcttatcaaagcgtctgtattggagaatgtgcgtatggcaaagccgagcgccacacgcgaagaaatcgcccatgctctggaaactgcacagtgcctggatattatcgaaaaattaccaaatggaatggatacgatgataggcacaaaaggcgtgtacctgtccggcggcgaacagcagagaatagccatagcccgtgcgattttgaaaaatgcgccgatactgattcttgatgaagcgacagcatttgccgaccccgacaatgaagtgcgtgtacaacaggctttatctgctctgtcaaagggaaaaacggttattatgattgcacacaggctgtcgtcaatcaaagatgcagattgtatttatgtgctgcaaaacggtgagattgttgaaagtggtacacacagcagactaatcgagaaaaacggaatatttgcgcgtatgtggaaaaattattccgaagcagcagaatggaaaattgctaggaggtaagaacatgattaagatattgcaaagacggtttgcgttatcagagcaaggggctgtcgatttgataaaaggctgtattgcttgcgttgcacaggatatatcttttatgattcctgtcgggcttctgtattttctggttattgatatgatgaacggaggagtaagcaaaaaacatgtcgctttctatgccgttggtgcgttggtttgcttatgccttatatttatcgcgacctggtttcaatataatgccacttatttagctacttatgtggaaagtggggtaaggcgtatatctttagcagaacagatccgcaaaattccgttatccttttttggtaaaaaagaccttgctgatttaacaaattccattatgggagattgtgccacgctagaaacagcgttctctcattatgtctccgctttggcagggtctctgatttcaacaacactgatttcaatcagtctttttgtttatgattggcgcatggcttttgcggctgtttgggttttgccgattgcatttataattacatttttttcagcccgaatacaggaatatttcaaccgcaaatccgtagcagcaaatgttgctcttgaaagcggtgtgcaggagtgtatcgaaagtttgcaggacttaaaggcaaataatgcagaagaaagctatctgagcgagcttggcaaaaaaattgacgatgtggaaaaacggcatattatcactgagcttgggactgccctgtttgttgtttcctcaacactgatattaaagtttgggattgctacggttgcgcttgtgggttctgtgctgctcattcgaggggaaattgatgttccgctgttctttctgtttttacttgtggcttccaggttgtatgctccgcttgagggtgcattacaaaatcttgcagcggtaatctctaccagaacgaacataaaccgcatgaatgaaatacttgaccagcctgtccagacgggcacagacagggtaacaaacaaaggctatgatattgtgttcgaccatgtagaatttgcctacaacgcaggggaaaacgtattggaagacgtgtcctttacagcaaaacagggagaagttactgccttagtcggaccgtccggcggaggcaaaactacggtgtcacgccttgctgcgcggttttgggatattaacaaaggcaaaattactgtcggaggtatggacatatcaaaaatagagccggaaacattactgtcgttgtactctatcgtatttcaggatgtgacgctgtttaacaatacaatcatggagaatatcaggataggaagaaaagatgcaactgatgaagaagtcattgcggcagcaagactggcaaattgtgaggaatttgcggcaaagctcccggacggttataacagtatgattggagaaaatggttgcgaactgtccggcggtgaacgtcagcgtatttcaatcgcccgcgctttcctcaaaaattccccaatcattttactggatgaggcaacggcaagccttgatgtggagaatgaaacgttgatacaggctgctttgtcaaggctgataaaggataagacggtacttgttatcgctcaccgtatgcgtaccgtaagtggtgcggataaagtgattgtactttcagacggtacggttgcagaacaggggaagccggaggatctgatgaatacaggcagaatttatcctcatatggtgaagctgcaaatgattagtcaggattggggcatttagcataaatagcgaatggattatatgccccgtacccacagaaactggggcgcgaatagttagtaatgctgtctgcgctccagtttctatatggaaaattcatactcaaatttttttatttaaacgaacacccatagttaaatacggtttccctaaatattcctctttttccaaaatataaccatgctttcggtaaaaagagatagcattaagattattcttaaatgcccatattacaacttctgtatatccttcttctttcgctgcttgttctgcaaacgcaattaagttgtgtccaattcctttcccttgaaaatctgatgtaatataaattctccatatttcaaaagctccagctttatcatgatctgcggtatttccaaacgatagcatagctactacgtttccgttttcttcccacacgtattcttttaatcgtcccgaaaaaaatcgtttttcaattcacatattctatccgcacagccagcaggacttaataattctgaatttacatatcctttatatacttttttccagttctcattaataatttcgcaaacattatctatatcagtttctttcatcattcttatcatattcttagtcctccataatattttcgaaagtataaaacggtacaactgaaattattataacatccgttgtttcaaaaaacgatagtgttctccacgttgtacttttttcgttcaggctctttttcctgcttcagatatctgaacatcaaacagcattcgggagatcaggattaaacggttcatcaaggatattttgtaattctgtgctgaaatcagcaagccccaataatacggcacatacttgacaaagggattgtgataaagttaagattattataacaatgaagtacgtaaattacttgtcgaagcttggaacaagacacacaatgcaaagaaaatcgcagaacgcttttcggttaataccagcacggtttaccgtctgaaaaaagaatgcgggaaaccagctctgtggaaacataaatcaaaaggaatacaagaatttaatatagaaaagagggtttttatggcatatgcgcatgtgatcggcctattgggagaataggcgatacagacatattctccttttaaaattgtagatttagcaaaaggagaaggaaaatgaaaaatagaaaagaatttcaggaactcaatcggatggcatatccgattttgctgcattatttattgaccagtctgtttgagattctggatcaggcgattgtaggacattattctgtgcgggggtttgcagtagttggaattgcagcttctgttgtgtatggagtgacaggagccctggggatgctttcttcggcgtttcacattattgcggcagagaagataggaaagcaggatgagcgaggatttgagaatgcatttgcaggaagtaaaattcttgttattttgatcggtctgacagttgtacttgtaagtatcctgtttggaaagccatttttttatgcggtatatagacaacagggaaaagaattacaggagcttcttgggtacttttatccggcatcatttaccgtactgcagaatatgttgatttttcaatatagtgtatactttaaaaacaggcagaatacaaagattaccctttgggtgactgttgtttctacaacagtaaatctgtttttcgattttgtgcttgtatacggagcagctggctttcctcgtcttggaacagcaggagccgcctggggaagtattcttggtcttggttgcggactattggtttatcagattacttactggaaagaacggcaaaggagaaaaacgatcagggcagaagagatccggggattgatatacaggatatggaaaatctatccgtctttactgggacaggaattgctggaaagtacaatctttgtatttatggttctggcagcggtggcaagattaggagcagaagatgtggctgtttataagctgctggatctcgtctgtgggatgctggagcttcctgtgtatgcgtatgcggcagcaacgcagacctatgccttgcaaaatcatgcggcaggaaagaaagcggcagtcagaagttatgaaaaagcggggatacaattatcaggcatgattgttctgtcagtggggatgctgtgcggaatctttcaaaaagaagtgtttcactggattttatcagacgagatgatcattgccagggcgggagattatctttggatgatcgtgcttttggtgctggtcaaaattccatatcggatcaggctgctgtatcttcagggaatcggaaaagaagggcaggtcttttggattacggctgcggcatctgtgatctttggtgttggtgcgtttgcagcgtcagagctgctgcagctttccggaatttatctgatgataattttggaatatggacttctgggaggcatttatcgctggcagagtaaaaaagtatgagaattgaaaatgaaaaaagaaaagaggaaactaaattgatcttaagagtttataaaccggcagattgcaaggcgcttacagagttgttttatgagactgttcattcggtcaatacaaaggattatacaaaagagcaggtggatgcatgggcagatggcaatgtggatctggaaaaatggaatcagtcctttttagagcattacacggtgatcgcagaagaggaaaatggaatcacaggatttggggatatcagtgacaccggctatctggaccggctgtatgttcacaaagcgtatcagcatcagggaatcgcttctgcaatctgtgacaagctggagcattatgcagatcagaatgtggttgaaacgcatgcttcaatcacggcaagaccgttttttgaatccagaggatatatggtcattcaggaacaaggggttgtcagaaaaggtgtactcctgaaaaactacaggatggaaaagcagccgctgcagaaggagaagtaggatgtggtatcagaaagactggtttaccggaattgattactataatttaaaagaaaaacaggtccatattacagagatggagattaaaaagccggtcgagcagcggtttcatgagcagaccgaaatttattatgtaatcagtggagatgcagaactctgaatcaacggagagaaatttcagattcaggaaggtagttttttctgcctgtatatgcatcttttttatcggattgaaaatatcagaaaacctttgcattgtgtaaaggtttcttttcatattggcctgtttatgtctttgtgttttgaacagcgcaaggcaagagaaaatgagatgctggtatacggagtgcagtctcttctttttctggataaagaggagcaaaagagagtagaacgtgttttggaagatctgttggcggaagaaaaagaacagcgattttcggtgcagaatatgagtatttatcttgcgatgcagctctatgtattatactgtcggtatgcgatggaacggaagaaaaaagaggggatacaaaaggatgaggtgtggaatatcatccagagagtacttctggatacgagtaagaccgtctctttggaagagtacgcagaaaccgtgggtatgactgcagtgacgctgaaccggaaaatcgtaaaccggtgcggatatacagtttttcagctccagaaaatgggaaaggtattgaatgcctgcgctctgctgcattttccggagctgaacattcagtatatcagtgattatctgggatttacgaatgtggaagatttttacagagtgtttaaacgatacaggaaagtcagtgtgagagaatatcagacgaaaaatatcggatgtggagcacaaatgcagtccggggaggaatcactgcagattttagaatatcttttcctgcattttcaaaaaccatttcaaatgaaagaaatggagacagagatgaaaaagaaggaatctctgattgaaagaagagcgagagagacgtttgggcgaagcatacaagaacttctggaagaaatcaggatccggattgcctgcagttacttgagtgctacagaccgaacagttacacagatcagcagtgatgttggttttggaagtatttcctcttttcagcgaagcttttctaagtacatgaatcagacaccaagtgaataccgcaggtttcatcaatgtaaataattgataatcatatttagaaatctgcatatctatttttgctggactgccctataataaaaataaaataacagggaggtagcatgcaatgtttgaacatgtatttgctccgatccggattcgggatatggagctgaaaaacaggattatcctgccggcaatggggaccagaatggcggaggaaaacggagctgtgacagataagctgattgcgtatcacgcagccagagcaaagggcggatgcgcattgaatatcgtggaggtggcagccgtacatacgccgagtgcaccggcacattttgtatccatcagtgaggatcatctgattgaggaacataagaaactgacagatgcgatccatgagaatggaggaaaagcgggaattcagctctggcagggatctattgcggtttccatggatccaaaagcacaggttttggttgtttcagatatgaattttggaccatatacgatcaaagcgattacaaaggaacagatccaggaagtaatcgcatgttatggaaaggcggcagccagagctgtggaggccggatatgactgtctggaatttcatctggcgcataattatctgccgcattctttcttaagtgcaggattcaatcacagagaggacgaatatggcggcagctttgagaaccgctgcagatttccgttggaagtgatcgatgaactgcgcaggaatatgccggaaggaatgcctttgttcatccggatcgatgcgcaggatgatatgttggagaacggactgacgatcgaggaagtgatccgattctgtaagattgcaaaagagcatggagtcgatgtactggatgtgtccagaggaaatatcattacggcagcatccatgtatgaggtgccgccaattgatgtgccaaacggatttaacattgaaaatgcggccagaatccgcaaagagacaggcatgctgacagttggtgttggaaggatcaacacagcagaactggcagaagagattttgtctcaggataaagtggatatggtagtactgggaagagcccagcttgcggatccggaatttgcaaacaaagccagagcgggaaaagtggatgagatcgtacactgtgtgggctgtaatcagggctgctatgacggattctgtgatgtggccaaccgtccgcatattacctgcatgagaaatccagcgatcggtcacgaggcagagtatgatctgaataaagcagaagcatcgaaaaaagtatgggtgatcggaggcggagtggccggaatggaagctgcaaagattctccatgaaagaggacatgaagtaacattgtttgaagcgacaaatcagttgggaggagaattccttcttgcaggagaggcgcctggaaaagctgagatgaaatctgcagcgatggagatggcagcgcaggtagaaaaactggtgacggttcataaaaatacaaaagttgatgcgcagatgctggaacaggcagatgtcgatgcagtgatcctggcaatcggatcttctccgattaccatcaatctggagggaatggataagctttggcatgtatctgcaccggaggtgcttcggcatgaagtctgtccgaaaggaaaggtagcggtgatcggaggcggtctggttggtctggaaacagcagacacgcttgcgacagacggatgtgaagtcactgttctggagatgaaagacagtatcggaagtgatctgggaagcctgcgtaagatagctgttatgatgaaaatgcagcagttacaggtaaaactttcgccaaacagcaaagtatgtaaatttacagaagaggggattgtgctggaagacggaacgcagattccatgtgaatgtgcagtatttgcggttggatttttggcaaacgattctcatccgcttgcagaagtgtgtgaaaagagaaagcttccatattatgtgatcggagacgcaaaatcggcaagaagagcgctggatgcgattgcagaaggatttgaggtggcgagaacactgtaggctgtccgggcagtatatgagctggaatatcgattacaacagttacatagttttatttaaaataaaacgcagcagacattttaatgagatctgctgcgttttttagtgttatgtaacggaaagaattccttaatctaacatagcctcttttgcttttttaatatcttcttcgtctttcataggaaataaaaagtttgcaacgattgccacaatacaggttcctgttacagaatcactgaagataaatcttaatgcggatggcagctgtgcaactgcgtccggatggcttgtcataccaagaccgaatgcaaaggtaaggcccatgacaagaatgttgcgctcactgaatcctgctttggcgatcatcttgataccgttgatcaaaatcataccgaatacggtaatgattgcaccgccgaggactgcatttggaattgctgaaaaaatagcgccaagctttgggaaaaacccggagatcattaaaataaatgctccggtagcaatacaccatttgtttactacttttgtcatggcgacaattccggcgttctgtccgaatgctgtatttggaagtgcgttaaatacagcagcagttgtggaaccaagtgcatctgccaggattgcaccggaagtttctttttcggtagcttctctgtcgaaaccggcgatggtgataccggaagtattgccgatcgtctccagaccggaagttacgaacagtgcggcaaagcttaaaatagcggaaaggtggaattccagtttaaactgcataggaagcgggattccaaaccatgcggcatctgcgattacagaagtgtctaccattccgagaaagtaagcgaggacatatcctgcgaccagaccgacaagaatggcagaattttttaataatccttttccgaaacgctgaagcagtacaacgatcagcagaacaaagaatgcaacgctgaggttttgaatggaaccataatcctcggctcctgaaccaccggcaaaatagtccactccgacgtccagaagattaacaccgatcgtcacgagcgtacaacccacaacaagtggcgggaaaaagcgacggatgtatttgtagaaaaatcccatcaaaacttcgatcatacttcctgcaagacatcctccgagaacagcgccgattccgctggcagctccaatggccgaggctgtaggtacgaatgcaaaggaagtacccattacaataggaagattggctccgatctgacggttttttccaagcttaatgggatacagctgaacaaaagttgtcagtccagaaacaaacattgcacattgtaccatgattacggtatcagctccggacagtccacagacgctggcaatgataagtatgggagcaaggttggaagtaaacattgcaagtacgtgctgaagacccagaggtacagctgtggatagccccggacgtccttctaattgatagaccatttcgcggtccttttgtctttttgtttttgaattctgagaatgattcatagagtgtctcctcctgtgattggttataaatgtttatacagaagttcgtacagtgtatcagtaacttgtttttcactgtacttaggagcggcttaaatagtttgtgacggatttccgagcttcagatataaatttttcctcgtcaatgtttacaagatgcccgttctcgacaacaatttttccgttgacgatcgtgtagtcaacagaactttttagtccaacggtaccaagcatagattttacatccagatctgccccgataaggtcgaggcggtcccgacgaatgaggaacatatctccggcttttcccacagcaagagaaccgatatcgtttcgtccgagtattttagcgcttccattcgtagcaatctttagtatatcatatccacttagtgcgtggctactagaattcaggcgatgtagcagaaaagcgacacgcaattcttccaaaaggtttgatccgtcattgcttgcacttccgtctacggcaagaccaaccggtacatcgagcttcaacatatcaggaattctgcagattccggaagagagtttcatgttagagattggacaatgtgtcacaccggtgccggtttctgccagaagacgtaattcctcatcctgaaaatgaattccatgagcataccagacgtcattttctcagaatttcctccacattctgtacgacgctgtctgggggaagtcctccatcctttttgcttagatccatactgccccgtgaagcgtacatacgaatcccaaggtcttttgcggcggaaaactgtgcatccagaagtgcatcggaatttccgtccgggaatacataatgatgatcaaaacaagtagtacatccggtttttaagagttctcccatgccggttatagagctgtggtaaataacatcctgatccagatttttccagatttcatataaggtggtgagccagtcgaaaagttccatattctgtacttgagggagattccggctgaatgtctgataaagatgatgatgcgtgttgataagtcccggataaacgaggtatccggatgcatccagcgtttcgtctgcggtctgtgcttcgggaccgatgtaagaaataacaccgttgtttatcaggaggttggcgtgttccataacggtgtctttactgtcacaggtgatgacagcagaagcatttttgattaataagctgttcatagattatttcctccgattgggttttgttgtttgaacgggtataagaacagatatcagaatcatggtttcctctggcgccggcaaaaacagagaaaaactgccgtaacagataaccacaaatttttggaatcccaaaaatctgtagtcaactgttacggcagttggtagaaacgttcatccgatcacgaacttatacaagtcaatttctggtataaatatacattttttatctggtttgtcaatatgatatgtgaaaagtgttaaaataatagagttggaaagtatttagaaaaatttcaaaatacctgttgcaaacgatagaaaaattgattatagtgtctgtaaggaatttagaaaatattctaaatagattccgggaaaggatggtgccgatggcatttgcggagactttcaaagcgctttcggatccggtacgcagggagattcttgttcttctgaagaaagaaaaactttcagcaggagaaatcgggaaacattttgaaatgacaggagcaacgatctcctatcatctgaaaatcctgaagaaggcagatctgatacgggaaacgaaatacaagaattttatttattacgagctgaatatttctgtggtggaagagctgatgctctggctgtcagacttgaaaggggattcaacattatgaaagaaaataaatcaaaagttatcattaccagcattgttactgtttttccaatggtgatcggttttctgctctggaatcgactgccggaaaagattgcaacacatttcgggagtgaaggggcagatggatggagtacaaagctgtttgcagtggtgattttcccgctcatattattagtcatccatttgttctgcctgggtgtgaccttaaatgatcccaagaagaaaaatatcggaagagcgatgatgacgctgatcttctggatcgttccggttctgtctgtcgtgtctaatctgtctatttatggatatgcacttggcatggatgtgaatatggaggtgatcgtcagtattttgatgggtggcatatttatcctgttgggaaattatatgtcgaagaatcatcagaattatacggtggggatcaaacttccatggaccttgaacagtgaggagaattggaatcgtacgcatagaatggcaggaaaattatggattctggcaggactggtattttggggaagtgtattttttgaaaacaacatggtaccaattgtgatcatagtcgttgttgtgacgatcccgatgatctattcgtttgtactttataaaaagggaatctgaaaaagaatcagacagaaattttgttttgctatttatcacgataccgtttataataaaacgatacgagataaaggagaaagagaattatggaacagaaaataatagcagttgtggcaggaagagaaatcaaagaatctgattttgaaaaattcctgcagaatgtaccgagagagcagcaggcgtatctttccaatccacagttcagacagcagtgtctggatcagtttgtagcacttcatatgtttgcggagctcggcggggagatgaagctggaagagacagaagaatatcaggagatggtagaaaatgccaagagagatatccttgcacagatgacaatgcgagaagtgatgaaagatgcagttgtgacagaagaggatgtcaaaaattattatgaggagcacaagcagcagtttacaaaaggagagactgttcgcgcaaaacatattctgacagattccaaagaaaaatgtgatgcgattttagcggcgatccagagcggagagacatcctttgaagatgctgcaaaagaaaaatctacatgtccgtccggagcaaaaggcggagatcttggagagtttgggaaaggacagatggtaaaagagtttgaagatgctgcgtttacagcagagatcggtgcgattgtgggaccggttcagacacagttcggatatcatctgatcaaagtggaagagaaaaaggatgcggcagttgcagatttcgaggaagtaaagaattcaatcaggaaccagctcttgcagcagatacagaataaagtctacagtgataaagtaaaagaactgcgggagaaatacgttcaggaataaaaagaaaacaggacgatcaggaaacgagcagtcctgaaataaagaaggttgtgacttaaaacagttgcagccttctttacaattagtaatgaagggagaaacacgtgatacgtaaatatcaaccacaggatttagagcacataatgaaaatctggctggagacaaatcttgctgctcatggctttatcccggcagagtattggaacgagcagtatgaagctgtaaaagaggctctgccgcaggccgatattctgatttatgaagaagaggggacagttcttggatttctgggattacaggacagttatatcgcgggactttttgtggaaaaagcatctcggtccagggggattggccgcttgcttctggaagctgctaaatcgggacggcaggaactgacacttcacgcttatgcagagaacacaggagcagtccggttttatgaacgagaagggtttcaaacggcagcatttgaaaaggaagaaacgacgggacgtgagggtgttttgatgcgctggacaagagaagaagagaaaaacagcctttaaaaaagaggatatttggtgtatagtaatctctgtaagtaaaattaggagaatcgacatgagtgaaaaaattgttttgatagatggacacagcattttaaaccgggccttctatggagtgccggatctgaccaatgcggaaggccttcatacgaatgcggtgtacggatttttgaatatcctgtttaaaattctggaagaagaaaaaccggagtatctgacggtcacatttgatgttcatgcaccgacatttcgtcatgagatgtttgctgattataaaggaacaagaaagccgatggcagaagaactccgtcagcaggttccggtcatcaaagaggtgctgaaggcgatggacattgcgatcatcgagaaagccggactggaggcggacgatctgctcggtacgatttccagaacctgtgaggaaaaggggatggaggttgctgttatttcaggagacagagatactctgcagcttgctacggagcatgtaaagatccggattccgaagacaaagggcggacgcacggaaatcgaagattattatgcagcagatgtcaaagagcgttatgaagtgacaccgacagagtttatcgatgtaaaagcgctgatgggggatacagcggataatattccgggagtgccgggagttggtgagaaaactgccaccaagattattgtggaatacggatcactggagaatgcctatgcacatgtggaggagttaaagccgccgagagcaagcaagaatttaaaagaattctgggaacaggcaaaactgagtaaagttctggcgaccattgatacgcatgcagaactggagttctctctggaagatgcaaagcatggaaatatgttcaccaaagaggcatatacgtggttccagaaactgcagtttaaaaatctgctcggaaagtttgatgtggaagcagctgaaaatgaagttgaaaaagcattccgggaagtaacagagcaggaagaaatcgagcgaattttctcagaggcaaaaaaggcagagtgtgtgggagctgcactgatcaaatgtgacgggaatgtgctgccgttatttgcacatccgtcaggatacggcaggattgctctggcatacgggaaagatcaggtgtattccattgcatgcagtatggatacagatatggatgcactgtttgcacagctttcggatgtggcatgttctgccggtcgttttgtcatgtttgatctgaaaaaatatcttccggtattgggcgcggtttgtcagaaaaactgctttgacgcaacagtggcagcctatcttctgaatccgctgaaaaatgattatacctatgaagatgtggcaagagaacagctgggactgatgatcgatgacaaggcagatgagtggacaaagagctgttatgaagcatatactgcctatgcggcatctgaaaaattgatggaaaaactcaaagaggagcagatggacaggctgtttctggaaattgagatgccgcttgtttttaccttatttgatatggaacaggctggggtgcgcattgaggctgaggagctgaaaaaatatggagaacaattgggcgaacagatcgtacagctggaatccgagatttacgagatggcaggggagaattttaacatcaattctccgaaacagctgggtgtgatcttgtttgagaagctgcagatgcctcatgccaagaaaacaaaaacaggatattcgactgcggcggatgtactggaaaagctggctccggaatttccaatcgtggataagattctggaataccgtcagcttacaaagttaaaatctacgtatgcagacggactggcaaattatatcggaccagatggacggattcacggaacgtttaaccagacgattaccgcgaccgggcggatcagcagtacagaaccgaatctgcagaatattccggtaagaatggaactgggaaggctgatccggaaagtatttgtgcctcaggaaggctatgtatttattgatgcggattattcgcagattgagctgcgtatactggcgcattgttccggagatgcacatctgatccaggcataccgggaggcacaggatattcaccgaatgacagcgtctcaggtgtttaagactccgtttgacgaggtgacagatctgcagagacgaaatgccaaggcagtcaactttggaattgtttacgggatcagttcgtttggattgagtcaggacttgagtatcacgagaaaagaagcgtctcagtatattgaaagttattttgagacgtatccgggaatcaaaaagtttcttgacgattccgtgacgcatgcaaaagaagaaggatatgccgttacattgtttggaagaagacgtccgataccggagttaaaatccagcaattttatgcagaggaatttcggagaacgtgtggcaatgaatgcgccgatccagggaactgcggcagatattatgaagattgccatgatcggagtcaaccgggaactgaaagaaaaacagatgaaatcccgtatgatcctgcaggttcatgatgaacttctgatcgagacacatccggatgagatcgagacagtgaaagagatcctcaaacggcagatggaaacagcggcttccttagatgtgccgttgatcgcggatatgcaggtcggaaaaaactggtacgaggcaaaatagtgatgaaggtaattggaattacaggtggagtgggttccgggaaaagtgcagttttaaagcttctggaggaagaatatcatgcagttgtagtacagcttgatgaagttgcaaaagcgctgcagagaaagggcactccctgctggaaagcgatcgtagaagcatttggaagagagattttagatgaaaacgaagagctggaccgcaaaaaactggcccaaattgtgtttcagagcagtgaaaagttggaacagctcaatgggatcgtccatcctgcggtaaaacagcaggtgcttctggatatcgaagaaaaaagaaaagagaagacagagctgtacgtactggaggctgctcttcttctggaagcaggatatgccaaaatctgcgaagaaacatggtttatctatacagaggaatcggtaagaagagagcggctgaaagcatcccggggatatagtgatgaaagaattacagatatgatccgcagtcagagtccggaagcgtattttcggaaaaactgtacccgggtgatcgacaatagcagagagatcgaagaaacaagacgacaaataggagagatactatgagattatgcagcattgccagtggcagcagtggaaactgcatctatgtaggcagtgacaatacacatttactgatcgataccggaatcagtaaaaaaagaattgatgccggtttaaaggaactggagatcaaaggggaggagttagacgggattctgatcactcatgagcactcagatcacattcagggacttggagtgttcagcagaaaatatgagatcccgatttatgcaactccgggaacgattgcggggattcaggcgtattccagactgggagccatgccggaaggattgtatcatgtgatacacagtgatgaatcctttatgctgggggatatcagggtaaatccgtttgcaatttcccatgatgccaacgaaccgaccggataccgtctggagtgcagagacaaatctgtggcagtggcgacagatctgggaatctatgatgcatatacggtgtcccatctccagaatctggatgcagttcttctggaggcaaaccatgatctgcatatgttggaagtgggaccatatccatatccgctgaagcgaagagtaatgggagacaaaggacatttgtcgaatgaattgtcaggacgtctcctttgtgatatactacatgataatttgaaacatattgttctggggcatttgagcaaagaaaataattatgaaagtctggcatatgagactgtcaaactggaagtgacattaggggataatgcatataaaggggaagacttgaatatggcagtggcaaaaagggacagtatttcagagattatcaccgtttaacttgaggaggaaaaaccatgaaaaaatgtatcgtaaccgtagtaggaaaagacactgtgggaattatcgcgaaagtgtgtacataccttgcagaaagtaagatcaatattttagatatttcccagacgatcgtacagggatatttcaatatgatgatggttgtagatatttcagaaatcgaaaaagattttaaagtgatctgtgatgagatggagcagatgggcgaagagatcggggtaaagatccagtgccagaaagaagagatttttgaaaagatgcacagattataagaataagcagagacgaggataaagaccatgattaatatgtatgaagtttccgaaaccaataagatgatcgagcaggaaaatctggatgttcgtaccatcacactgggaatcagcctggtggactgtattgattcggatttgaatgaattgaacagaaagatttatgaaaaaatcacagtaactgcaaaagaccttgtgtcaacaggaaaacatattgaaagagaatttggaattccgatcgtaaacaaacgaatttctattacaccgatcgctctgatcggcggtgctgcatgtaagtgtccggaagattttgtgaccatcgcagaaacactggataaagcggctaaggaagttggagttaattttatcggaggatactctgcgctggtttccaagggaatgacaaaaagtgatgagaatctgatccgttcgatcccgcaggcactggcaagaacggagagagtgtgcagttctgtcaatgtaggttccaccagaaccggaatcaacatggatgcagtacgtctttgtggagaaatggtaaaagaaacagcagaagcgacaaaagagcgtgattctttcggatgtgcaaaacttgttatcttttgtaatgcgccggatgacaatccgtttatggcgggtgcattccttggagtgacagaagcggatgcggtgatcaatgtcggcgtcagcggtcccggagttgtgaaaaaagcattggaaaaggtgcgcggcaaaggatttgaagagctttgcgagacaatcaaaaagacggcatttaaggtgacacgagtaggacagctggtagccggagaggcatccagacgtctgggaattccgtttggaatcattgacttgtcactggcaccgactccggcaatcggagacagcgtggcagagatcttagaagagattggtctggagcgggtaggtgcgccgggaacgacggcggcactggcacttctcaacgatcaggtgaaaaaaggcggtgtgatggcatcctcttatgtaggaggactcagtggtgcgtttattccggtcagtgaagatcagggaatgatcgatgcagtgaatgcaggttcactgacactggaaaaattagaagccatgacttgtgtctgctcagttggtcttgatatgatcgcggttccgggaaagacatctgcagcgacaatttccggaatcattgcagatgagatggcgatcggtatggtcaaccagaagacgacagcagtccgtctcattccggtgatcggaaaagatgtgggagagactgtcgaattcggcggacttctgggttatgcgccgatcatgccggtgaatgagttcggctgtgaggcatttgtaaatcgggcaggaagaattccggcaccgattcatagttttaaaaactagaaacaggggagaaaagatgaaaaaaattgcaatcgtaacggacagcaacagtggtattacgcaggaaatgggaaaaacgatgggaattcatgtgattcccatgccgttctttattgacggggagttgtttctggaagatattacgctgacgcaggaggaattttataagcgtctgggagaagattctgatatttccacgtctcagccatctccgggtgaagtcatggaatgctgggacgagctgctgaaagagtacgatgagatcgtgcacattccaatgtccagcggactgagcagcacttgtcatgcggcacagtctctgtctcaggaatacgagggaaaggtttgtgtagtggataaccagagaatttctgtgacacagaagcaatcggtggaagatgcgatcgtgctccgggatgcaggaaaatctgcatctgagatcaaggagatactggaggctgaaaagctgcaggcaagtatctatattaccgtggatacgttaaaatatctgaaaaagggcggacgtgttacaccggctgccgcggcgctcggaacggtattgaacctgaaaccggtgcttcagattcagggagaaaaactggatgcattttcaaaagtaagaggatggaaagccgcaaagcgtactatgctcaaggcgatagaaaaagatctgaatgaccgctttgcagatgtccgggaagatatggtgctgggaatggcttatacttgcagcaaagaagaggcacaggaatggaaacaggagatcgcggagaagtttccggaatacgaaattgtagaaggtccgctttctctgagcgttgcctgtcacatcggaccaggggctatggcagtgacctgtatgaaaaaagtccggtgattgccgctggtattatgaaaaatgtccgaataacctcattttataggttattcggacattttttaaatcaaatctaaatcattttgtgttagaattgctttaatctataaattctcaggtggtgcttacatgaaagaacgtatattgattatggaagatgaaacagcaatacagtctgttttatatgagttgttgactgacgcgggatatgaagtttcattagcaagtgatggattggaaggaatttcgctttttcagtcacaatccttttcgctcattttgttagatattatgatgcctaaaatagacggttatgcggtatgtgaatttattcgtaaaaagtcccggattccgattatcatgcttacggctatggacgaagaagaagcacaaataagagcttttgaattgcaggttgatgattatatcacaaagcccttttcgttaaaacttgttttaatgagaattgaagctgtacttagacggatcaaggaaaaatcagaaaaacaaaaaatactctctgcgcaaggaattgaactcaataaagacagtcatgaggtatataaaaacggtgctcctgtcaatttaacacaactcgaatttgaacttttactgacctttttgaaccataaaaatcaagtcctcacgagggataatctgatccaacaagtatggggctatgattttgccggcgacgaaaaaacagtaaatatacatattatgaatttgcgacgaaaattagatacaggatgtattcatacaatacgaggggtgagatataaatttgagagcaaaaattaatgacagcctgagtgcaaaagttttcttatggatcgcaggttctttaattttatgtagttttcttatttatggaagtattctgtttttcctgccgaaaagttatgtggctgtatcatcagaacatatcaacacggaaataaaagaactgacagaaacactttctaaaacaaaatttgaaaatgcaaaagatgtattggaaaaattttgttcagatcatcaggcaactatcatcgttcaaggtggtggagaagaacagcagtatggaacgcctgacgaagtttcttcagagaaagaagaaatgttatcctttgctcaggagattcaattctctgacagagcagagacatatatgctcaatatcattgcccagatttcctccagtcatgagttaataagtgcgttattaaaattattgccgtttcttttgataattattttcctggtttcattttcaggggcatggatttgcagccgtttgatcgtaaaaccagtgatagaaatcagtgaagtttcaaaacgaatggaaaagcttgatatgacctggcaatgtaagataaaccgtacagatgaaattggtattcttgcaaatagtctgaattccatgtcccaaaatctgtcagataccatgctgaaactggaaacagcaaacagacagttaaagcaggatatggagcatattgacgaactgaataaacagcgtcagtatttttttgcgacagcttcccatgaattgaaaaccccgatcaccataatcaaagggcaggtggaaagtatgattatggaaattggaagatataaggacacgagaacgatacttccggaaacattaaaagaaattgaaaatatggaacagcttgtaaaggaaatcctgtcgatatcaaagctggaaatgaatacaatgagtcatacggagcttctttctctttccaatattctgaaacgtgtatataaacatcttatcccactggccaatgaaaaacatatccgtattcagaagaatatttcagaagatgttatgatgatgggaaatgagctgcttttggaaaaagcagtccataatatcatcagcaacgcaatacggcactcccctgttggtgccgaactggggttagaactgtcttttgattctcttcttgtcagaaacagtggtgtaaatattccggatgaagatttggataaactgtttactccattctattgtgtggaaaaatcacataataaactgaccggcggaagcgggttgggactatatcttgtaaaaattatcttggaacagcatggtctgtcatatacgattgagaaccggcaagacagtgtctgcttcaaaatcacattaaattcacataatctaaattaaaattaaatggaatctaaatcgaagttaaaccgtcctttcttatactgcagatataaagaaaggacggtgtttttatgaatgtaggaaagcgggcatttctctatctgacccgcaaaaaaggaaaaaatttattgcttggaatagtatttctattgatttcattctccttgctgacaggaagtgtggtctatttggggatccggcaggtttctgaggatttgcgttccaatattggtgcttctttcaatatcagaccttatgaacagtttgatatgaataacggacaggtttccagtaaggggacacctgtcattgatgagcagtccattcggcgggttatttccatcgttggaaaagatctgaaatgctacaatacagaacactccggctatgtaaagggagaaaacctgtcatttctcgcagggacaggacacagtgaagaaagcaatatgggaactgtaaaagcagtgcgtgattccagcttgtgccaagcctttttggatgaggaatacgaactggcagagggggaacatatcagatcagaggacaacggtaaaattcttatcagtaaagcccttgccgaacaaaacaatcttgctgttggagataagataacccttacccatgcaaaactgggttcagacgatggtgtatatacagacctgatgaaagaaaaaagtgcatatgaaacagtggaaatcaaaggaatctacgatataaaaaatgcttccgataatgcgttaaatccgacagtgaaaaaagccgaaaatcttattttttcagatagtcaactgttaatcaacttgcaggagcaaggtgtttatgagggcgagatttcttttttcattgccgacccactgcatcttgacaagatggtatcagaaataaaagggattgattcgattgcctggaacaaccatgtcatcaatacgaatgacttcaagtattctaagattgcagaacaacttcaaagtatgcaaaagatcgttgtcgcactgattgcggttgctgcagtattgggatttctggtatttatgctgatactgacattcaggattcgtggaagaatgcaggaagccggcattttacttgccgtaggaaaaccgaaacagcggattatcgggcaatttctgatagaggcaatgattctgctgtggatcggctttctagtggcaatcattatctttcttccgcttgcagatacattaaattcattcctgtttgattccataacacaatcaacgattcataagaattacttacagccagatttcctgcattttgtcatattgttcattttagaaaatctgggtgttcttctgacagttcttgtgtgcagtggagcgatcctgtcattaaaaccgaaagagattttaaccaaaatgagttaggagggtattacaatgaattttttgaaacgcgctataaaatactgtgtcagacagagattacgtacgctgttgctgtttttgacatttactctgctgtctacaaccgttttgattgcagtttccagcgaggaagctgttttgcaaggaacaaagcagataaaggaaactgtaggtgcttccgttcgtatggaaattgacatgaacaatcagaataattttggcccggctgaggatttcggaaatggggcttctggatatacctataatggcgaccgtattacagaaaaaataataagtgcaatttcaaaacttcccaatgttgtgagccataacgctaaaatagatggtggctattgggggattccggaaaatttcgagccgattccgggcatggtgaatgcaccaggtttgtcagtcccttatactgcagtattggattcttctttagatataaaatttttaaatggaacatataaactggaagaaggacgacatattaatcctgatgactcttgcacagttttgatttcaaaagaattggcagacaaaaacaatctttctgtaggagataaaattacttttcaagagtttgaaacaggaaaaacggaaagtacctttaccattgtaggaatttatagtggtacagagggtacgacaaaacaagcgatcacaccggatgggattcctgcaaacagtggttatattgatatggatggtctgaaaaagttttatgacggagtaaatgaaaaattggagggatatgacaatcttgatatttatacgcactctccagaggaagccaaagagcttatggaaaccatcaaaaaccttccagaagtaaaaggcaaaacatttactttcgatgtcaacacagaagattttgacttagtatccaccccattgtcttcttttggaagtatggttgatacggctgtattaacaattactgcaattggcatgcttgttattgtattgttccttgttttatggacgagaaaccgtaagaaagaaattgctgttttacttgcagttggtcgaggcaaggcagaaattgtcggacagttcctgacagaaaatatattgattgcaatactatccatgtttgcgtcaacggcattatcttttgagcttgcaaatcaaatcgattcattcattatcagcagatcgggagaaaatatatccaaattgaccgttcagattgccacatcagatatgcttaaagtatttggcattggtgttattttgatttgtcttgcggttattgttgcttcctatacggtcattcgtttacaaccgaaagatattttaactaaaatggaataggagaaatgtgattatgagtatattatcgttttcaaatttaagttatagctatgacaagaaaaagaacatatttagtaatatcagcgcagaaatggaactgggaaaaatatatgcgattttaggaccgtctggttgtggcaaaacaacattactttctttgttgggtggattagatagtcctaccaaaggcaagatattatttaatggagaagatattactgaaaaaggattcgcaaatcatcgccggaaccatgtttcctttatttttcaagcatataatctcattgattatatgacaccattagaaaacgtaaaattgacaagtaaattaccaccggaaccggttttagaaaaaatgggattgacgaaagaggaaatgaaacggaatgtgttacaactttccggcggtcaacaacaacgtgtagcgattgcaagggcattggcttcagaagcacccgttattttggctgatgtaaactgaaccccatgtgcttactgtacatagcgtgtacacagtaggattatatgacaatataggtacatgatacacaagtaatgagaaaaaatgtgtatgcagtaggaaaaaagtattgatatctggtatgaggaaagacatccttgtagcaggttttttattgtcaataatagacaggtttacaagtaatattttgttggtatgtgtgaatagctttctgttggaggatagggtagtgttgtagtcgaaaaggaaaggagaaatgtaaaatgagtaaagaacttacaacagaacagaagattatgcaggcaacacagtatggactattgatttatgcaggacaacggaaaatctatgatgaggatgaacgattaaagttggaaaagattgcaaacgaaataggagagtattggggactggaagaacctgtagcaggttatccggaactttttgaggaaattacactccaggggctttgcagatatgctagcgaaatgcaatatacgcatggagaaacagagcgggaacgaatcaaagaagtattggatttggtgtatgagatgaagaagcattggtctgaataagggcaaccgaattagacaggaagggagaaacctcaaggattactttagaacgttaagaaagtgaaagaatcatggaataatttcaaaagttaaaaagcaaattaaagaaaagccacagcctcatacaatggaagctatgacttttcttcttttccctcgatgagatactcataggaaacatgaaagatctcagtaagcgcttttaattctacatctgtgacataacgcttattggtctcaattctagtaatcacatttttatccatatcatacccattcagctgaagctggtaggctaagaggcgctgtgacatattatgctggcggcggagttcaatgagcctttggctgatcagatttttctccccggtggatgttttcggttttggcatatctctaatccctcctgcaaatagtgttgacaggtttgtctcactttttgcactttttctattgattttacacgggattaggaatacaatcggttgtaaaagtgagacaaaaaatataccaaaatagaacgattggattggttggagaaaaacggagagaataagaaagagcgatataacaagagaaatttaagaagtggttgcttttccggtttagagaagcccggaaaagaatgcgttgatatcggtgtggaagattttagcaagggcaacaagttccgataccttgatgttcatacggttggtttccagcttggcataagtgcttttggacatagaaatccccatcaggtttaattttgcaatgacctgatcctgggtaagtttattcgcataacgaattgtctggatatttttaccgatatccatatctggtctgattttctgcatgataaggtcctttcatttcttgaatatttcgcaataaagaaactttatattgattttactggtttcactttttacaatgtttcgtaataaggaattatttacaagaagggtgattggtatgcaccaaagagatatggagcggtttgctttcctgtttttatgcggaaagcgtgacagggcaatcttgctgggaaaggaaaaaatgacgttttcagatttggacaggctgacgtatgtttctgattttctaggattcaagctgtataacttagaaatctggaatgaatatgcaggacagttcagtgaacagtttcggcagttggaattgctgtatgatgaaacctgcagcattgtgtcctgggatccgacagaagcagatgagcatttacatgataaatggcttcaggagttttgtactcaggtagcggatcaggaaatgcggaaacagctggaacagatcatcaaacaacagtatcaggaaaaagggatggtagatcccacggagacagacatcgtgtaggtgcctgtctttttttcgcagaaaatcaggaaaggcttcaaagggaggtgataggaaacgtgagcatcagtattcatgaattactggcagtagcaagggaatcggagggtgtgaaggcagttcagggtgatgatatgctgtgtgagaaacggtttgcaccagacacccggtatatggtggagtttttgctgctggagcaaaaggagcagtttggagaaaagggagagtatcatcgttattttttgaccaaggaagcataccaagaactgattaacctgcagaaccagggagtcctgcgctttcaaaggcaggcgcttgttttagagggaacactgcattatcttccagcccaggcatttttccgggaccgggagtaggaagtttaacaggctggaaagaaaagaacagctgccggagcgctccgccggacgcaaggactctttctccggaagtgttttacagaatgacaaagaaggaagtggtaggcgatgattattggaatcgaccacggatattatgctattaaaacaaaacaggtgtgtttcccaacagggctgatgcggtacacctatgaaccttataccatgcagaatgttcttcaatacggaggtgcttattatgtgtgtggaacggggcggcagactttagtaaaggataagactgccaatgacaattattatcttttgacgctggctgcactggcacaggagatccgaaaacgaaaaggagggagaacagccaaggttgttcttgcagccggacttccccttaccggatttggaagggaaaaacagagatttaaggaatatctgtttcggaaggaacagcctgtccgatttttctacgaaggggaacgctatgaaatccagattgaggatgtgaaactgttcccccagggatactcggctctggctctttacccggaatatttaaaggatgaaccctctgttcttcttgtggatatcggaggctggacggtggatttgatgcgccttgataacgctgttcccaatgcagctacctgcaggagtctggaactgggggtcattcgctgcatggatgagattctggaacaagtgcgcagaaacaccgggctgtccataacagagacacaggttgagcgcatcttacaggggaagtcctgcagcatgcctgcggaagtggtgtctttgatcgagaaacagggcaggctttacattgaaaagatattgtctgcgatcaccgaggcaggctttgatctgcgggcagttccttccattttcatgggaggcggggctgctatttttcagcaccgtgtaagtacccaggaccgcctgcgtcgcccgatttacctcaccgacgtccatgccaacgctgccggatatgaacggattgtggggcagatgagaacgctgtgagccgcccggtcttttcctttcgtcccaaccttaagaacccggagcatgaaaaagcgtggcggcttctgatggaagttccggcaggacagaggaaccagtatctggtggatgtgattttagaaaaagaagagcgggaaaccttacggaaactgattcaggagactgttcgggaggaactaaaaagtggcggtatggaacgaataccagcatgggaaaaggaagaaattcccggtcagatgctggattttttatttcagatggagcaggagtaaagagggtgaggcctatggacaaagaaagtatggcattgttggatctgcttgggttttgcatgcatttgacatggattctttagtgggtattgtgaatagctttctttcaaactttggagtatgttgtgtataacaaaacgaaaggagaaacgcagatggcagagatgaagaacatatgcggaaagatcccggtggaattacatgagaaagtacgagccgagatcgaagagaaggaaacgagtacacagatattcatccagcaggtgattgaagaacattttaacagactggaaggcaaaggagaagagagcatggaaaaaagaacattagcagtacaggtcacagaggatttattccagagagtcaaatgggcagtcgcaaaagaaggcatcaaacagaaagattttctcatccgcatcatcgaaaaagtggtggaagaggtagaagccaaatggaaagaactggaacagccggaagaaaccccagaagcagacagactggaagaagcagaaggacctgcagaagagaccagtgaagaagagattgccgaagagggaatcgaagggatggaagctgcggaggaagaaccagacgatgagaacttcgaggaatccgcacaactggaagaggaagaaccagattcagaacttcccgaagatgcagatgaggaagatgaactgtcagaatccgaggaagaaaccgaagagattgcataatgccaaatacatagaacttaaaaaccgacaggcggtgtgggaaagaaaccattccgcctgtctttgtcagcaaaggaggttgatagccgcaaccattcgattttttgatttattcagtggaattgggggattccgggaagggttaagacgtgcaggcggttttacttgtgtagggcactgtgaggtggatgcttatgcggataagaactaccgattgctgttcgacacagaaggggagtggttttgtaatgacgcaagaacaatcgaaacagaccgaatgccagactttgatcttttatgtgcaggatttccttgccaggcattctctatcgccggaaagcgaggaggatttgcagatgccagaggaactctgttcttcgagattgccagactggttgcagacaagcgacctgcgtatttcatccttgaaaatgttcccggactgctttcgcatgacaaaggcaggacgtttcacaccatcctcagtacgctatctgagctggggtatggtgtggaatggaaagtgcttaacagcaaggattttggagtcccccaatccagaaagcgggtgtatcttgtcggatatcttgatcgaagatgtgccggaaaaatattacctttcccaacagcaaatggaacgcctcttgttcaagtccagacaggcagacagggggaacgaatctacaaagccgaagggttaagttgtaccctgacttccggagcgggaggcgttggtggaaaaaccggattatatgaggttggtgttcctatcaaagagaataccaagcagggatataagatggcgtatccgggagacagcattgacctgggatatgcaggaatgaacacccggagagggcgtgtggggcatcagattgcccataccctgaccacaggaatccagcaggggacacttcattttgtggatttgtctccgccacctctggtgacagagcattgcagatgtctgaataccagacagtccggcatccataatcacaaaggagaatgctccggtgtattaaaagaggaaggtgccagagcagtgctgactccgggaagagaagaaacccggcagaatggtcggaggatgaaggagccggaagagccgatgttcaccattactgccacagacaggcatggagttgcctatcggggcagaatccggaaactggtgccaagggaatgtctgagactgcaggggttttatgactggcagattgaccgcatcgaacaggatacttcggacagccagctttataaacaggctggaaatggagtgactgtcaacgtgatcgaagccatcggaacgcttcttcggcaggcagatgcagaaatccgggcagaggatgaaaagacaaagaggtaaggcagtatggcaattggaattcagaaccaatactttggtacagagattgagatgacaggtattaccagacagagggctgcagaagcagtggcagaattgtttggaacacgcgcagtttatgatggcggatattatcaaacatggtctgtgatggaccgagaagggaaaaaatggaagtttatgtatgatggcagtatctatacacaacgcagggggcgtggccagatggttcatgccggaagtgaatatagtacggagatggtaagcccgaaacttgagtattctgagatgggaaaactacaggaagtagtcaggtgtctcagacatcaccgggcaagagtgaatgaatcctgtgggcagcacgttcacgtggatgcctcaaatcatgcggcaaggagcctgaaaaatgccatgacgattatgtattcgaaagaggatattctgtttaaggcattgaaagtgcagacttccagagaaagcaactattgtcagaaagtacgccctattgtgttggaaaaaatccgcaggatgccaaacagcaccatttccatggaaaagctgaaacagatatggtacggaggcagggatggaagtcatgatcattatgacagtacccggtattatgccttaaacctgcatgcagtgtttttgaagggaacgctggaatggcggtgttttgaaagcaccctccatgcaggaaaggtgcgggcaaatatcaccctggcgcttgccatttccgcccaggccatcaatcagaaatgtacccagatgcggaaaacagagattaccgagaatcctgcgtttacattccgtacctttttactgcggttggggcttatcggaccggaatataaaaatgtccgagaacatctgcttgccaacctggaagggaatcgggcgtggagatatgaccggagccagtatgaatgtttgaacagaaatcatcgggcagaggatgatcgataggaggtagagatgaaagaaacgtattattttgcctatggcagtaacatgaacttagatcagatggcataccgctgtccggcagcttctgtagtagagcctgtccatttggaagggtatcgcctgaccttttgtggcagggggaagggaagcggtgttgccactattctgccggaagagggaagccgggtggaaggtgtactttggaagattacaccggagtgtgaaaagagcctggacttttatgaaggttatccccatctttatgggaaggagcctgttcttgttcagggcaaggatggcatgaaaagggaagtcatggcatataccatgaatgctccgtataaggatcaaccagcgattccttctgatctttattttatggggatcgtggaaggctgtcatcaaaatgggatttccagccgctcggtgaccgatgcgttaaagcgtgtccgggaggaagtgggcagacagaaacccagtcaaaagaaaacagaagtaagcagataacaaatccgcaggggaaagcctctgcggtatttttaacgaaaaaaggagaatgcaatgaagagcagaaatatcaaaacaagacttgcagccttcgggctcgcattgctcatgggccttagtccgcttggaaatttggcggatgtccatgcggcagaaagtgaaatttcacagaatgctgtgacagaaaaagaaagtaagacagaatcggatcatccggtgtcggaaatttctgagcagacagtgactcagaggatatcaccaaagatgtttccgacaaggaatttatggcagagacctgcatggaagggattcagtatgatccagaaaaagaggatgtgactttggaacgtatcgaagcagaggatggcagtgcgtatcatccagaccaggcagggacttatgtcgcaacgtactgggttgtgccaaaagatgagcgtgacagctactctattacccgtaagattattctgaccgatacggaagggcaggcccatgcagaagaaaacggtgggcagaaacagaaggaggatacgaaatccgaagaagattcggagacgcctgtgcaggagatcccggatgtggaagtaacgatatccggggaagatgcagatgcacaggcagcaagggaactggaagaaaagattgaggatggggaagtgatgatgttttccggtgcagagaatacctttactgcaagagaaacggtacatctggaaaaaggagaaaccatctactatccaagttatattggaaattatctgacctgttggtttaccgtaaatggaaagattgcctattgtctggaatcccatcgttcttcaccgccaagtggagattatgtggcacaggtattggacagcaataaaaacctgcagaaagtgttgtattatggctatggcggtgcgggggatattaccggaagttatctgtctggtaagacaaaagaagagaagtatgtatatacgcatatcgcagccagctatgcctatgcaggtgaggctggatttacgggatgcaagtatgaggatctggtaaaagcaggcgtgattgcctatattgaccatctgtttgctatggaagaaccgccgaaaggggagatttctctttctaaaacatctgtaaaagcagtccgtgatggaaatgtgcagaaaacaccggatatcacattgtccggggatcatcgaaattatatttctgtcaatgtgccaaaagacatcaccatttataacaagataaagggaacttccgcagagaatggtgcgttaaagatttatggcggggatacgttttatctgactgcatccatgctccataccggaacctattcctccggagaactgcatggctctgtgggagagacttggagaacgctggtgttatccacaggaaacagcaatcaggacattggagtctttgaatcggagaaagccaatccggt

SEQ ID NO: 7038 - DNA, 8326 bp, Unknown
  gut microbiota DNA sequence
aagaactcattaaatggtgcagtctatggcatttatacagacagaaagtgtgagcatcttttaatggaaatgccagccactggggaagatggaaaggcagttagtgattactttgaggcagcaatcaaaacagtgtatgtgaaggaaatcaaggctccagacaactatacgcagagtgatgtgattcataaggtggatgtggaagccggaaagacggttacgatcactgcaaccgatgagagggtaaaaggcgctgtccatatcaaaaagattgataaggagacacaggactttcttccacagggagacagttcccttgcaggagccgtgtatggtctgtatgccagagaggatattgtccacccagatggaaagacgggcgttttgttcaaaaaagacagcctcatcgcgcagggggtaatcaaggaagatggcaccttagatttttctgaactgtatctgggaaaaatgtatgtgaaagagatcactccgccggaaggctatacggtggatccaacagaatatgaggtgacccttacctacgaaggacaggaagtggcagaggtaaccagggacctgaccgtacaggaacaggtgaagaaacaggcgttccagctcatcaagatcagtgaagatgggaatcagacagaaacagaccttgtggaaggggctggttttaaagtgtacctggttagcagcctttccaaagtaaagagtggggaattacagccgtccaatggggatcagtttacagcggaagatttccgtgggtatgatttcagtaaagaagaggtggcagtgacctatgtggatggcaaggctgtgccggtgccggaactcattacggataaaaagggatatgcccttagcccggaacttccgtatggtctttatgtggtagaagaaagtacggtgccggagaatttgaaagccatcgatccgtttttagtaaaggtagatgaggacagcagagagccgatggtgtggcgtgtgttcgatgaccgtccgtttgaatttttattaaagattgtgaaaaaggatgcacagacgggcaatccggttttgaaggcaggcgcttcctataaaatctttgatatggaaaaagaggaatatgtagagcagacggtattctatccgaagaaagagaccatcagtgttttcaagacgaatgaggaaggttatctggtcacaccggaagagctgaaatgttctacctatcggattgaagaagtgaaagcgacggaaggatttgtaagacaggggtatgaaatgtccttgtatgaagggcaaactgtgatttctccattagaagtgagcgaaaaaggcagttacaaagaaaatgccaaagagggaatcgtgattaccgtttcttctgatactgcccatcagatcgatccggataccggagcagttatcgtggaagtcgagcagccaaacgatgagcaggtgggaagcctgacattaacgaaaaccggagaacagccagtggaggtgaagggagattccctgcttgcaaaggcaaaaaggttcgcaggaaagatcaaagatgcagtgactggagaggatactgataccggggtgttccatgactttgtatatgaagaatccggtgtggaaggggcaacttttgaactgtacgccaaggatacgatttattctccagacggagcaagggatgaacagggaaatccgatcatccgttatgaaaaagatgatctggtagcaaccctggtcacagataaagaaggaaaagcagtagtgaacaatcttccactgggttcttattatctgaaagaaacggtggcaggcgaccatttcgtactgaatccggaacagaaggaatttaccctgaccgcaaaggatgatacccaggcagtggtttacgaaggggttgcctataaaaatgaaagacagaagatttccatttctatagaaaagaaggatgcagtcacagaagagaagctggaaggcgttatctttggattgtatgcaagagaagatatcctgtcccagcagggtgaggttcttgtagaaaaggatacgctgttggaaaagaaagcaacggatgagaacggacagcttacttttgacagcgacctctaccatgggaaatattatgtgaaagaggaagtgagaaaaccggggtatctttcaaatgaggaaatctgggaaatcgatgcctcttatacagaccagaaccttgcagaaatccagctgaccaaagaggtggaaaaccagccgactgagagccagtttacgaaaaccgatgctacaaccggggaagaactggaaggagccaagctgcagatcatcgataaagagggcaacattgtggaagagtggatcagtacgaaagaaccgcacgtggtatatggactgccagagggaacttatacgctccatgaagaattgccgccttatgcagagggctatgtatctgcggaagatatcgagtttgaagtaaaggaagatggcagtgtgaccaaggtggagatgaaggatgcctattccaaagtggaaatctccaagacggatattaccacaggcaaagaactgaaaggagccaagctgcagatcttaaataaagagggtgagattctggaagagtgggtaacggacgggaaacctcatctggtagagaaacttccagtaggggaggagctgactctgcgtgagatcaccgcaccggaaggttatgagattgcagaggatgtgaaatttacactggaagatactatggagattcagaaagtggagatgaaggatgcaagaacaccggaaacaccgggtgtaccgcagacaggggataatcactggaaaccagtcctgctgtttgttcttctgggagtatcagtagccggactcatggtaaccataatttataagaagaaacatggaaaaacggaaaaagcgaaaaaagaagaataagctgtggattctgcagtcagtattgtgtgctgtctgtatgttcagtgcagcgctgctttattatgattatgtggccgttccccggcagaacagggaactggtggaggagttaaaaacctgcttcccggaggatattcctccgggcgggggctttccgggacagaaaccagaacaggctggaagagaaccggaagtgtctgccattgaccttcgatccctccagagtaagtatctgaatgttcggggctggcttacgatcccggagagtggcatcgattatccggtactgcagagcaatgtggaagatccagagtattatctgcggagagattaccggggaaactacgacatcaatggaagtttgttcctccaggcagactgtattctgggagaatccgggaatctgaccatctacggtcacaacatgaacagcggtgcaatgttcgggaatctggatcagtacgtctcctatgattactggaaagcacatcccaaggtgttttttcagacacaggaaggcatggaagaataccagatagcggcagtcttgaaagccgatgtgtccatgtttgactttcagcaggcatcttttcacagtccacagggtgcggaggcttatgtacagcaggcaaaagcgctgtcgctgtttgaaacagggggagatggcataggttgtgagaaaactctgacactggtgacttgttcttatgagtggaaggaagccaggaacatccttgtggcagtaaaagtagggacttaaacggggaaagtgttcaaagataggtactttcttctgctctctggatatatcctgcggtgatctggggcaatttcctgcgggaagtgttcaaaaccactccaaaagtgcagaatgtgagacgggatggaagtcggaaagtgatgctacggaacaaaaagtgttcgaagttaaggaacgtgcaacaagttgtggcggcttgtgtagtcttgtagtgttggaggagtgttcaaaagtgggtgcttttccagccctttggtgactttttggaactgaagttgccgggaagtgtttgaaagtacccaaaaagtgcagaatgtgagacacgactgcatgaaaaagacagtaccatcataaaaaaaaggtgttcgaggatgtaggatgcacaacgaaatgtggcgtgatgtagtgtcagaaagtgttcgaagactgagactttcgcagctatctggatgtatcttctatctatcggaagagtgttttcaagaagtatttaaaaatagaaaaactctgttcaactgcctgaaaaagcgttacaatcattccataaagacagggaggtgttccatggagcagaaagaacaaacaaagtgcatgggttcggacggaatgcagaaaatgaacggtgttatcaatgccgatctcatgactgtggaagagattcatcagaagctggacgcaggatacaaggatatggaaaacggaagagtacgggaggcatcggaagtctttgcagaatttcgatagcagcatgaaacaaaataaatgtgaaagggggaagaagatgcaggttgttattgagatacccaaagaagtattgtacgatacaaagcaaacgatagaacaagcaacagactttgcaaaaagtgtaactgcattaggattttataagcaatatggggtatctgtggaattgtgttcccaggttgctggcataacagagaaagaatttttatcagaagtaaaacgtagttttataggatagcaaaaaccagatgcgtagaatgtgaaatacaaggtcttttgttcttgacaagtgtgtcagaagcggttacactatgcctagtgatcgcactacagaaacttgtgaagcctgtagtccggagagactcctacgggggtcttttcgttattataggacagataagaaatggttttgggtggtgtaagacttattgaaaagcctaaaaagtagttgaagatacacattgggtgaattataatgaattttatcatatatgagtaggtgatgcgaatgaatcaggaagcacaggaatattataatattgccagttggacaaaagataaagtaaattacaatcgggtatcaaaatttaatacgaataaacatagacaggttttacatgggcaaatatggttttgtgatttgggatataacataggaacggagaaaaataaaatgcgtccggtactggtgatgtccaataataaaatcaataattctgaaaaagtggtagttgtttgtattaccgatgcaaaaggaaaagtaaacgcaagatgtttgccgattcaggattcatggtttttgttatattctgatacagaagatgaagaaaagcaagtgattccgggaagaacgataccagcgtctatgcatacttatgaatttttggataaagacagtatgatccagtgtgaggagatacgtgcagttagtaaggcaaggctggatgcaaatcgaggatgtattggtactttaacaccggaagattttaatcttgtaaaaggaaaattcaaaagagcatacaacctgtaaaatgtgactgctaaaaatttgttgacaaagagaaggtagttgcatataataaagaagaacagagatactatgattaagtcccacgcttgagcaatcaagatacagtgggtactttataaatgtttaaacgaagccgtaggaccgtaaggtatagcttctggaggctccccagtttatctggggagtttttctttggaaagatttatgataataaaaaaatgaaagtaataagaaagctggcaggatatgttcccgtaaaaaggaaggtatcctgccttttttgcatgaaagagaggaaattcatatgagaaaattttatacagcagaagcagtaacagaaggacatccggacaaattgtgcgaccagatcgcagatgcaatcttggatgtgtgtctgaagaatgatgaaaattccagagtagcctgcgaagtgcttgctacaaaaggaaatattattgtggcgggagagattaccagtgcctatgaaccggatgtgtttgcagtcgtgcgaaaggtactgtctgatattgggtattccagtgaggggattgcaatggatacctttgtccatcagcagagtcccgatatcgcaggggcagtcgatacttcaaaagaacgaagggaaggagtgtctgacaatcagatggactggttccaaggggcaggggatcagggagtgatgatcggatatgcctgtgatgagacgaagcagctcatgcccatacccgtagtgttggcaaatcgaattgtccgagaattatctgcttgcagacaaagctcttatattcaggaaattctacccgatggaaaagcccaagtgaccgtagaatatgaaaacggaaagcctgttcgactggacagtgtggtagtgtcctgtcagcatacggaggacaagaatctgaagaaactggaagcagagatccgaaaaaaggtgcttcttccggcacttcgtctccttccgccagatgaagatacaaaaatttttatcaatccatcaggtcgttttgtctgcggaggcatggatgcagatacgggactgaccggaaggaagttgatggtagacagttatggcagcatggttccccatggcggcggagcattttctgggaaagactgttcaaaagtagaccgttcggtagcgtatatggccagatacattgccaagaacattgtcgctgcgagacttgccagcagatgtcaggtgtctttggcctatgccattggggttgcccagccggtcatggtgcaggtggatacgtttggtacggggaaggtgtgtgccgatgactgtctggagctggcaatcccgctggtgtttgggctgactccgaagcagattgtggatagcctgcgccttacccgtccgattttccgacagacagcagctttcggacatttcaggagaaaagagtttccgtgggagcgtaccgataaggtggaggctcttcgcaatgcggtgatctgatggcctggattactgaagaagagtatcaggcagccaagcaggtgagagcctatgagtatctgcagacataccaaccggggagattgaagaaaacaaggacaagaaatgaatggcagcttcaggaccatgatagttttaagattaatgagatcaccagtaaatggcattggaaatccaggaatatcggtggaatgtctgcccttcggtttttgatgcaggtagatggcatgggatatacggaagccgtaaaaatcctgtgtgagcagactcctgtgtatgttcccagagcagaaccagcgcctaggaagaagcccttttccctgcccctgcccaatgacagtttttaccgggtgcggagatatttgaaccaaaggggaatccgggatgaggtattggattactgtgtgcagcttggaatattgtatgagagcgttccataccataacgctgtttttgttggattggatgagcaggagcaagcaaagtatgcgtttctgcgtgggatttatgacacccggggaaagagttttaaaatggaacaggaaggaagcaacaaacagtatagcttttgtgttccgcctttggggaaaagtcatcgggtagcggtgtatgaagcctgcattgacgcccttgcccatatgacactggaagatggaaggaccaataagtaccgcctgtctctgggtgggatagcagcaccaaaagaagggatggaacaatcaccgaagaagatgaaacgcccggatgcattggagcatttcctaaagaagcatccggaggtgacagagattgaaatctgcaccgataatgattttgccgggcgatgggcatgcgagcagttaaaggagcagtatgggaaaaactataccgtggtctgtaacttacctcagatagaaggagccgattatggagatctggcaaaacaggcatgggaaaaacagcagaaacagcgaagggaactagggaggtgagacaaatggaagatactttaaaaattgaattattgacatcactgacaggaacatttcttccaaataagatggaagaagattgggaaggagagaaatatcatgaattagaagaagaacaggtactctttgatggagcagatttgataccgtatgtttctgaaattcaagagaagattgcggaatacagccgtgtcggacatgaggatgataagacagataatctgatggattactttgatggaagtgctgcaatcaaagaaaaagtattatccgcagttccatccgtgaaagaagccgatggagtgctatatggctgtacaatcttagaactaaaggaatatctggaaacggaagaattatcggaactgtgtgaatatcttaccggacaatatagtgatggatggcttactatgacggtaggaggtatc

SEQ ID NO: 7039 - DNA, 229 bp, Unknown
  gut microbiota DNA sequence
ccttcctctcgctactcattccggcattctctcttcttaacagtccactgctccttccggtacagcttcgccccgttaagaatgctcctctaccaattaacattcgtcaattcccaagcttcggtagtgtgtttcagccccggacattttcggcgcaggacctctcgactagtgagctattacgcactcttttaatggatggctgcttctaagccaacatcctagttgt

SEQ ID NO: 7040 - DNA, 229 bp, Unknown
  gut microbiota DNA sequence
cttagaagcagccatccattaaaagagtgcgtaatagctcactagtcgagaggtcctgcgccgaaaatgtccggggctgaaacacactaccgaagcttaggaattgacgaatgtcaattggtagaggagcattcttaacggggcgaagctgtaccggaaggagcagtggactgttaagaagagagaatgccggaatgagtagcgagaggaaggtgagaatccttccggc

SEQ ID NO: 7041 - DNA, 1243 bp, Unknown
  gut microbiota DNA sequence
tgcataatttaatcgtactccattcacatatttattaaaattacaatgaaaggttttggcaaacattcttgacaatacatatttaccaactcccaaatcgagtgccattttttcaagacttatttcatttctaaaattctttgctatatactccacggaattataaataagatcatcacttcctaatgactttttatcaatcatcggcatgtcagtaaatacatatgcaataattatttgcgcataagcctgcgccaatattgaattacactctggattttttgtcaaaaaattgattgcgtgaaccacatccggatgcatattttttttctttaacactggattctcaggactatatgtttgcaattctttcagatatccagatagtactgccggatcaatatgtaaaaaaacgactttgttttctctttctccgaagacttgataatgatgtattacatttggaaacacgattgcgaagtcgcctttattcatatcatatagctctaaccccactccaagtgcaatattaccatttgtcacatatacaatctctatggcttcatgtaaatgtggtggcatgtgcactgctcttttccactctaccgatattcctttatctctattttcatatactaacaacatttagaaccaactcctttttcttagcttttattttgtcatattgtcccatttttatctgcccatttagaaaaaggacactgcatcgtatgatacagcatccttatccttcctatgtgaaaatagttgttgtaagaacaaattatgcaaacacaaacatcatattaaaaactattcactaatcttgagctgctctatattttttactcccctagttcaatatttatcgatacatcccgtgtatcttcattgcaactaacaaatggtaaatgaatatctgatgtcttcttccgcactgatatgatattcgtcttccacatcactttgccagctgtcgatacctccgactcctctgactgctccgtatacgcataaaactgttcttcttgctggaggtaattcctcatgatgcagagcattttcaatttcagatgctgtataaggaaggcatgaaaaagcaaattccttgtcttccttctcaatacgaagtgtctgtggtgactgatctgttctactattgtcaagacttgtatgtctgctaatttcaagccactctgtatccattctcattccacattcctgtgggacaaggtaaggtgtc

SEQ ID NO: 7042 - DNA, 2635 bp, Unknown
  gut microbiota DNA sequence
tcttgcactcttccattaccaccattttctttgacatctgattggtatcctgaagttcttttaagagtgcacttggtgtacaaagtgcattcagcagcgctttctggaaacttctgaatcctgttacccatgcagagatacggttaatggatgcatcgaaataatccaaggcaatataagtgcggtcaagaccgccttcgcagcgaacgatttcctgtgcaatttcctttgtctcgtcatcaaacagaactacatggtcagaatcccaacgaatcggacgtgtcacatgcagtgcgatttccgggaagaaggtcaaaagcgccgggatcttatcggaaacaacttctgtcggatgataatgtccgttatccatcagcggcaggcatttctctttgttcattgccgcatagctcagcgcaaattctgcagaaccaactgtgtatgcctcaactccgattccgaataccttagattctacacaaggttttaccatcttcggatcatatggctcagaaaggatctcatcgatggattctttgtaacgaactcttggtcccatgcggtctgccggaacatctttgaatccgtctcctgtccagatgttcatcacacatgggattcctgtctgctctgcaaaatattttgaaatacggatacacgcttttccatgctcgatccagaatttccttgtctcttcgtccgggcttgaaagtgtcagtccgtcttttactttctcatgagagaagaatgtcggattgaaatccagtcccattcctcttttttttgcaaagtccacccatttctggaaatgttttggctccagcttgtcgcggtctgcgaactccccatcttcaaaaattgcatagcacgcatgcacattgatcttctttgctcccggcatcaggctcattgccttgtccatatctgccatcaactcttccggtgttcttgcttttccaggatagtttcctgttgtctggatcccccctgtcagagggccatcgtgatcaaatcctgtcacatcgtctccctgccagcagtgcagagaaacaggtacctgcatacatttttcaattgccgcgtctgtgtctactcctaattttgcatagatttcttttgctgattcatatcttgtcatcgctttatacctcctgattttcatttccgttttcatcatagtgacggatgtcaaatgacttgccgatgcaggttcttgcctcaggcaatgatgtaaacactccatcatgaagcatctgaaccgtgatatttccaattgcagtcgcctctgtcggtcctgccgacacttttttctttgtatattttgcagtcagttcgttgagataacctgcgttcgcaccaccaccgactacataaatcgtgtcgtatgtatttcccgtgatttcctcaatctcccgaatcgtctctccataacattttgcaagactgttgtagatcactgccgcaatctccccgattgtctccggaatctgctgattactctctctgcaaaacgtctgtactgcttctatcatgctctttggagcaaggaaacaatcatcattacagtccactaaagaagtaatctcctctttggatgcctgttcacatatctgagcaaaggaaagttcttctttccattctttcttgacagactggatcatccacagccccatgatgttcttcagaaaacggaagcgataatcatatcctccctcatttgtgaagtttgcccgcatactttccatggaacaatccgcatcttttctctcaattcccatcaaagaccaggtaccggaactgatgtagatcgcattgtcatcattcgtcggaactgcaagcactgcggatccggtatcatgcgttgccggaagtacaaccgtacagtcaaatccaacttcctcctgaatttcttttgtaaagtttcctacaaccgttcccggcatggaaatcgctttgaaaatcttcctgttaaacccaagcagatcgatcagttcgtaatcccagtcttttgtctgaggacttacaagctgggtcgttgtcgcattggtgtattccatcttcttgactccggtcaacaaaaactggaagtaatccgggatcatcagcatggattctgcctgttccagctgctccggataattttcctttaccgccatcagctgatagatcgtgttgaaaatctgtttctggattccggttcttgcatacagagctcccagcggaatcttttcatacaccttttcatccattccatttgtacggctgtctctgtaacctgctgtatcccccagaatcttgtcattttcatccagcagtacatagtctaccgcccaggtatcgatcgccatggataccggaattttccccagctctttacatactttcaatccgtttttgatttctgtaaacagacgctctacatcccagcagagagtcccgtttttttctgtcattccattcgggaaacggtatacctcttccagctgcattttcccgtctttcatacttgccagcatatgacggccactggatgcgccaatgtcaacagccaaataatatttatccattttctgcctccctttcgcactttatttaactctattatatgaaataaaaaagtgtaaaaaaaggacgc

SEQ ID NO: 7043 - DNA, 572 bp, Unknown
  gut microbiota DNA sequence
tatctgtaattcgcagatttcaggattgtgaataactgatataagctgtaaatactcttttttaaaggggctttccgaatatcggatgttccatccctatgctgaacttcccgctccacacggaacgtactgatatcattgcaggtgctttcaattcgcagtacacagccaaacttgtcatacatttttatggacacatcacccatgtggtgcttgatcctcgttccgaggatgcgctgattatagtttgtgccaatctctttggtacagttataagtgattcgctgtccaaggaaagtggcgatgttgtcaggcttcacagtatatatcgcagtgtggatgatttcatcatagattggtgccaggtattccggcttacggaacatgatatccgtggcacattcgatctgctgaaccgtccaggtataacccagcccgagagattccggaacgggactgtagcgtctggcaaagacatcgagaactttatggagcccttgcgggttgatacggtcagaaagtttctgagcagtttcaatatcggagatttcaaggaacgcgttgtcctgcat

SEQ ID NO: 7044 - DNA, 1015 bp, Unknown
  gut microbiota DNA sequence
ccctaaatcttggagttggattagtgaaacagggaaagagagttttattgatcgatgcggatccacagggaagtttaactgcaagtcttggatatgtagaaccggatgatattggaactacacttgcaactattatgatgaatattatcaatgacgaggaaattggagaagaagaaggaattttacatcataaggaacagatcgatctcctaccggccaatattgagttatctgctctggaagtaaccatgagtaatgtgatgagcagagagcggatcatgaaggaatatattgatacgatgcgatcacgatacgattatattttaattgattgtatgccgagtttaggcatgatgaccatcaatgccttagtagcttctgatacggttctgatacctgtacaagctgcatatctgccggttaaaggacttcaacagttgatcaggactatttctatggtaaagaagagattgaaccggaagctaacgatacatggaattcttttgacaatggtggatttccgtactaattacgccaaagatattgcttccagagtgagagaaacttatggatctaagatttctatctttgaaaatgtcattccactgtcagttaaggtagctgaagcaagtgcggaaggaaaaagtatttattgtcattgtccaaatggaaaagtatctatggcttatgaaaatctgacgcaggaggttttggaaaatgaaaagtagaagcggagaaaaaatcaaattgacaagcattgatgaattgctgggagtagtcaatgaagagtctgcaatggaaatagaaatcaacagaatacatgcgtttaaagatcatcctttcaaagtattggatgatgaaaagatggcagatttagtagagagtgtaaagacttacggggtattgacaccggttttgttacggtctgatggcgaaaatggatatgagatgatctcaggtcatcgaaggatgcacgcagcagctatagctggcttggcaacaattcctgcaattg

SEQ ID NO: 7045 - DNA, 2899 bp, Unknown
  gut microbiota DNA sequence
tttttatcaaccactcttttatagttgcaatctctatcccttcttttttccctaagtttaatagcagttttaaatattcccaaattgctgcttttggtaatttccaccccactttttctaaatacttttttaggaagtgaaccgttgcttttatataggcttctttttgataagaatagaaaagtgaatcgattttccaaaaaatctcttctgctgttttctcctgctgcagtttccaaaaatgctggtatgcttcttttgtctgcttttccagttcagccacttttttctgttttgcggcttcttcctgttctttataaaacttctcccgttcctctttctccatgtatagcattctaaatttcttacttccagcttcttctatcccaagctccattagttttttccaaaattcctgtgcctgttctttcggaagccaaataagattttcctctttttccaagacttttaaaagaaaagcaaaatatttttgtggctgaaaccgataaacagattcttctatccagaaaaacaactgcaggacctggtttggttgcaaatgaagtttcaaaaaattcatcttatcatattcccgtctgtaataaaattcctgaattccgacactcttccataagaaatttcgttttccttcttttctgatttcttccatggatcggttatccaaaagaagttttgcagtctgaaattttaaatccgtatccaaatcttcgatataggaaagaatatagccatacttctttttttccggttcttcccattcagaaatcgcttttccttctccctttgtaagcaattcttttataatctgtcggggatctaagaaattcttttctgcaaatgtttcaaaaattttatgattttgatagttctcttcttgcagcatctgttgaatataatctacctctgtcaattcctgataaatcttcagatactcctgaagttcctgttccgtaaaagactgattatataaagtctcccgtatttttttatcaaaatcctttttccccaacagagaaaagattttctttgcctgtgttttacatgatggaataaaaaaccagctaggatttgcctgtcgctctcctgcataagtatgaagcagtgcatatatcttggaatttttaacagttacctgacatttcatggcgcctaaaatcccatcatatccgccgattttgatttcataagaacgatgcttttgtattagttccctgcaaagctgataaagctcctccgaatattccttttcctggttacatataaaaatgcaaaaactttctgaagcacgctcccatgttatctggcttactgtttctaacttgtcttcctttgcagcctgcagcatccgcaggtttaaataaaaaatttcttctttttggtaacctgcctttcgcatctgttgaaatagctctgaacgttcttttacgtgggtatgctgcatcttcaccaaaagttttaatctcgaaaatatctgttttctttcttttttaatttccttttcataagttctgaaaaaccagatatacatttcagcattttggaagatatttactgctctttcattttcaaagaaagagcatacattttcttttagcatttcccagatttcttttttccctttgaataaaaacaggatacacatacattctgcaagttctttgtatgaataacttttaatccgttcataataaaacttttgtttcttttcagacagagttaaaaaacacatagctcctgctagataaatatcggttttcgcttctcgttctatccgtttcagaaagttttcatattgtgttcccacatacatttgtgcttcatgaaaatcagacatagttacaagggcaaatgccagtgccctgcggatttgaacagtatcccctatcttttcttcatacctctccagcatctcacccggatactgaaaggtataagcgtcttcctccttttgttctttccctattggaagaaaacgtttatctgcctcttctttttcaaaataccgtatcttatcattctttgttgaagtaaggaaaatgatatgcttcatagtctgaaaactgtttgcatctattttttcttttaatatatccatttgttctcctttctggaaagggctgtcttccacagccctttatttctttcttttgtggttaatctgttatgtaattacagtcccgaacaattgggattttacctttacgaatttcatcaaaggctgctcgataccctcttttttcgggttctgtaaaattcacttcccattctttaatcacctcttctaatgcgagttttttcgggtttaaaatcacaagaccatgcaaaattccagatacaatcctttgatattcttctgcatattccctacgatccaaatcggtatctgcataccagcaatccaactttcggatcatttgcagacttttccatggtggcagctgcatcggatagtaaaatcttgatgttttggaatcgctctcatattcttctgaaagccagataaccgttccctttgaaaagatgggaggcagataaccattcttggaatattcctccattattccaagaatatcctcccaagtaacttgacggaaggaataaggttcctgggtatctgctaaataataatcgtcatctgataaagaaatttctcctctttttatcccagaaattcttccatctccatcttttaaaatctccgttacaacatcatttggatagaaaaagtccatacctctggcaatcttttctgcatcttctgtccttccctgttctgccagtctactttcatgttcttttattccttcaatgatcctccaccattcctctttggaacttttcaaaccgttttctttgctgctgtcttctggaatttctt

SEQ ID NO: 7046 - DNA, 669 bp, Unknown
  gut microbiota DNA sequence
tcattcaattaaaagattataaggaaacgttatccagaacaagagatgtcattaaaaagaccgcttatggagtagaatttgttgttcttggaattgaaagccagcagcatattcattatgccatgccgctgcgtcatatggtgtatgatgcaatgagttacctgaaggaatatcaggaaattacacgcaaatataaaaaagataccgggaaaaagacagaagatgaatttttatcaaagatgaaaaaagatgaccggcttcatccggttatcacattgacagtgtattatggagaaaaacagtgggacggaccgtattgtctgaaagatatgattgtagaaatgccggaagaaattgccgctattttctcagattacaaaatgaacctcttggaagtacgggattcagaccgatatgtgttcaataatacagatgttcaaagtgtttttgaaattaccagggaaatctttgccggccattttgaaaaaattcaggagaagtatggaaacaaggagatgggttcagatctattaacagttgttggtcagatgacaggatcaaaggaactgattcgtatgagtagaaatatggaggtaaacagtatgtgtgaggcattagaaaagttgaaagaagaaggcgaacaaaagggtagagaaaaagagcgagaag

SEQ ID NO: 7047 - DNA, 1938 bp, Unknown
  gut microbiota DNA sequence
gtaaacgcaaacggacacacgatcaaaacagtgctgcaacatccaaacctggtgcgcagtgccatttaccggacacgatatgcaaacatcgacatcattaaagggagtacagatttagtagaaaatgatgcatatgataccaatgctcttttgaaggcactgatgcagattcaggatcgatatgacgtttgcattatggataccagaccggccatggaattgattacgacaagcgcactttatgcggcagatgtcctgatcacgccggtttgtctggataaattttgtcgggacaacctccttctggtagaagataaataccatcatttacaagaacagggggtgggcgtagaatggaagatctttgcaaataaagtggaaaataagcgggcacagaagcatacctacatcgacatggtggaacggcattgctggccgtttatggaaacttgtatcagtaagggtgcggttgtggaaaatgcactggaatactataagcccgttatgaagcaccgctctaaaagtcaagtggcacttgattttatggatttggctatggagttacaggaggtgtaagggatggcaaagatcagtaatattttcaaagaagaaacaaaaaaagcagacttacatcccaagagagttacccattggattcattataccaagctgaaagataaccctgcccagtaccgttatggaaaaacgatgcaggagcgggaagaactaaaaggggaagtccgcaggaaagaggaagccctggcggatctgattgaagcggatggggaagtgatacaggatcttctggttagaaaaattgacaccgatgaatatgaaatcattgccggacatcatcgaagaaacgcctgtaagattctagtggaagaacggaatcaggaaagttatgccatgcttccctgtatcattcggaacctttcagatgtacggtctgaatttacctgctattcctctaatggatatgcagcaaaaacggattatgaaattatgtgtgaactggaaggaatgagtcatctgttgaggacttatccggaagaatttccgaatcttccaacaggaaggcttgcagataagttggcagcgcagctgcagatgtccaaaagcaccatcggagaatatcggacgatcgcaaacaatctgggagaaacggggatgcaggcctttcaggcagggaaattgaaaaagagtgcagctgtggaactggcaaccttaccggaagaagagcaggaagaactcttaaaacaagggattgtaaatcataaagaaattaaagcctacaaaaaaggtaaggatgttccgaaatccggaacaatggaacttccactcctgcagtttgaaaccgaacaggaatggaaagatttcttactgcaatatccaagctggacaattgtaaacaaaaataaaatgacagaagaaattctttatgaatacagactgatcaatggaacaagaattttggtgcgggagtttccttatacatctggagaggaaactatttcctgtcaagagtggtatctgtggagaccggagatccggcatttccggaatgcacgagtaagtctggaagacgttatagattatatgcgaaatgaaaatgagtgaagtaatgctgttccgaatttcggaacaacaaaataagaagaaatggaaaggggagagtatatgaagcttggtgtaaccatggtatttgcgttagttatagcgttttttgcggctcattcatttacatcattgtttgagcaagaatataaactcacttttaggcgatcagtgattctattttgtggattatttgtattactctttctgttaattagtttggcacttttgtttttaacggaatagtattgttaatattttagatgcaattagcacagtagcaattaaaaaaatcaggcttaaaagaacttttttcttatt

SEQ ID NO: 7048 - DNA, 364 bp, Unknown
  gut microbiota DNA sequence
tataggctgaaattcctgcttccagtagacttataatctttgaaagaattttcggataggcaaccaatttctttccatactcgattggaagctgttttaatattcttctcttttcgtctgtatcaatttcttttgtaaaaggaaggagctgttgatttgaaaatcctaaaatctcctgccagccaagtccttccaatcccttaataatctccatgtgttccgtcaccgtcgtaagcatcttctacctccatttttatcaaccactcttttatagttgcaatctctatcccttcttttttccctaagtttaatagcagttttaaatattcccaaattgctgcttttggtaatttccaccccactt

SEQ ID NO: 7049 - DNA, 3269 bp, Unknown
  gut microbiota DNA sequence
gaggccttcgtaaagcagaagataaagaatacgtagttgttattgattttattgggaattatcgtaacaatttcatgattccaattgcactttccggagatctcagttataacaaggataatattcgccgttatgttacagaaggcggacgagtaatccctggggcaagtacgatccactttgacgaggtttcaagaaaacgaatttttcaagcgattgataatgcgaatttcagtgatattaaattgattcgtgagaattatacaaatctgaaaaataagttaggacatattccggcattggctgattttgataaatatggtgaaatggatgtacttcggatttttgataataatagtttgggctcttattataagtttcttgtgaaatatgaaaaagaatatacaattcggttgtccgaagcggaagaaaaggtaatagaattcgtttctaaaaagctggcaagtgggaaaagaattcatgagctggaaatgttgaaacgattgcttaaatatcaacatggaatcatggcccaattaaagaaatcattgcatgaaaattataactgttccatggatgatgattgcgcagagaatgttgttaacatgatgacaaatgaattccctacaagcgcagctaagaaaacatattctcagtgtgtttttttagaaaaagaaggatcagactacagtatgtcccaatcatttggcgaaatgctgaaaaatgaagatttctataatatcttagaagaactaattgactttggtatttctcgttataaagaaaatttcagcatgcgttatcaagatacggatttagttctgtatcaaaaatatacatacgaagatgcttgtcgtttgttaaattgggaaagaaatgaagttccattgaatattggtggttataagtatgataaaaaaacaaaaacatttcctgtatttatcaactatgataagcaggatgatattagtgatactacaaaatacgaagatcattttacaagccacaatcgattgattgcgatttcaaaaagtggaagaagtattgaatcagaagatgtgcagaatttcttaaatgcgaaggaacgaggaatagatgttcagctttttgtgagaaaaaacaaagatgataaaatatcaaaagaattctattatttggggcgaatgtatgctacgggcgaagtaaaagaatttataatgccgaatacggataaatcagcagttgaaatcgaatgggcattggatactccggttcgagaggatatttacgagtacattataaatgggtaatggtgttcagcgatgagaagaggaaaggaataaattgttcatgaagacagttagagttgttgctgctataataattgaaaacggcaaagtgtttgcgacacagcgcggatatggtgaatttaaagatggatgggaatttcccggaggaaagattgaacctggcgagacaccagaagaagcgattgtaagagaaattaaagaagaactagatacggaagtggaagtgattgagttgttggatacggttgaatacgattatccgaactttcatttatctatggggtgctttatttgtaaaatcaaatccggggatttggtgctcaaagaacatgaagctgcaaaatggttgacgaaggatacactgggaagtttggagtggctaccggcggatatgggattagtcggagaaattgaaaaatatttgaaggaagattaacatgtttaaaattacagaaggtgactttaaaaatcaaacatatggggacgaaagttatttgtctaattggccaatgctttatattttggaaaatggaaagcaagcttatattggagagtcaaatcatgtgaaaaatcgtatgtcccagcatcatagttctgtagataagcgaattttcgataaagtacattttatttattcttctaaatttaatcagtctgttacatttgattatgagtcaaagttgattcagtatattgtggccgatgagctatatgaagtgcgcaacaaaaatgctggaatggcagacaaagaatattatggaaaaaaagaatatgatgagaaattccaggttctttggcgcagcttgcagcgtgaaaagttagtgaagcattctttagaagaacttgaaaattcagatttatttaaatattcaccatttaaagaactgaataatgatcaaagaacagcagtagaagaaattgttgattccttaaaacaagaagaaaatcaaactgtagttgtaaatggtatgcctggaagtggaaagacaatcgttgcaatttttctattgaaatatttgagagacagtgaagaatttaaggataaaaagattggttttgtggtgccatagacttccttgagaaagacgttaaaaggcatttttaagagtatttatggacttaaggcgtctgatgttttgtcgccttctgatgtgacaaaacagtattatgatattttgcttgtagatgaagcacatagattgcatcagtataaaaatatttcatatatgggagcgtttaaagcaagttgcaaaagaattggtctaacaacggaaagtgatgagttagattggatacttcatcaatgtaaatgtcctgtacttttctatgatgaaatgcagattgttggtccatcaggaattgatgtgaaacggtttggtagtaaaatgaaaatagaacaagcaaaacgtatgcttacttattacagcttacaaacacagatgcgtgtaaaaggtggaaatgattatattgcttatgtaaaagaaattttatccggcgaagtgaagtcgaagaaaagttttgcaaattacaatttaatattaatgactgactttacgaagttcaataatttgatgtaccagaaggaaaaagaagtaggcctggtgagaatggcagctggatatgcatgggactggcttagtaaaaatgataaaactgtttatgatattgagattcaggaaataaagaaacaatggaatcattgtacagaaggttgggttcattcagaaaatgcaattgatgaggtcgggtgtatccattctatacaggggtatgacttaaattatgcgtttattattcttggggatgaaataggatatgatccggatgaaaaaaatattataattcgtgcggaaaattatttcgatcaaaatggtaaaaagacagcagaatatgaagaacttaaagagtatatacaacatatttattatgttcttatgacaagaggaattcgaggaacatatatcgcggtagtctgcaccc

SEQ ID NO: 7050 - DNA, 1269 bp, Unknown
  gut microbiota DNA sequence
caaaagaatcccttttctatttctttctcttctccgtcctcatagcaaataaccactttttttatttctttttctggttctatttttcccataattctccttcctgttccgaaattcggaacaatgatttactattccatcatttcctcaaacagtttcctcgggagtatcttgtcacaatcgatacactgtttcctgcgtcctgcataatctgtaacatcttctgagcctccgatcggttcgccgtcaaaatcaaacagcaacgccctatgtactctttcaatctggtaataccctctgttggaaccacaaaatggacatttcatccttttcacctccacacatactgtttcctttctgcactcctggcaaaaaatctatgttccgaaattcggaacggatccgatttatcattatttccaaaatttgaaaccggctgatatcccaaatcttcgtagactttccagctgtaataaaaggtcatggtatccggcgcattatacagactggttagaagataggctcggatattgtggatccgggtggttgtctgccccagggaatataacacatattggatatgtgacatggtcagtttagaaaattgtgtccgcagttctgctgttgtatattcccgtcttccaaatcggtgaattgtagtactctttcggctgcacgtgtccactgctacagcaagcagtactgacaacaagtctgcatctgctccgtcttgcagcaaaacatcatattcccacttcttccggaaaaatgcttctacacagtctcgatccatccatcgatcctgtactcttgaatgatttactgtatacaggatagatagatgtttatctctattattatttttatactcagtattattagggttgcagtcctgatacttctggaagttgcagatctggcaggtcatcgggtcattttgattttgggactgccagttttgatactgctgatcggttgcacaatcttcggattctatctgttcttgctgttctattctactttcctccgggttgcaaatctggcaggtcacatccgaaacagcagattcttcctgaatttccattgtttctgtcacatcttcaataactgtatattccgggttgcaaatctgacaggtcaaccgatgctctgtttcaccctgttcccattcctcaatctcaatgtctgctccggacaataattctgcaatggtttcggaattacacagatatactaaattgggctttccaagaccttgtttccgtcttt

SEQ ID NO: 7051 - DNA, 1097 bp, Unknown
  gut microbiota DNA sequence
cctgatctatgtagagtcaccggatccgcagatgggaacggtcacaatggatcctgcaaatgaaggaaacatctacaaagagggaacagagatcacggtgaaagcagagccgaaagccggatatgaatttgcccagtggctggaagtgacgaaagcagacggagaagaagtacttacaccggtagaaggtgctcaggcagaatacaaatttaatgcagagtcagaccgtgtactgcgtgccgagtttagactggctccggttccggaaacatactatcgcgttgtggtacagtccaatgatgagaacatgggaacggtttccatggataaagaggacggtgcctacaaagaaggcgtgacagcatatgtgaaagcagaagccaaagaaggatttgaattcgtgggctggaaagaaaaaggacagaccgaatatgtatcgaaggatgcagaatatcagtttacggtgacaaagaacaccgaactgatcggagaattcaaagcagtggaagcaccggatgttccgagtgcacagaaaatcttgaatgatatcctggcaaacaataagattccatcagaagtgaaagcaggaacagaaagactggttctgccggaagttccggaaggaagtaagatcgagattgtggcagtgaatccggaaggaatcatcggactggatggaaaggtaacaacaccggaaaacgatacggatgtgatcgtgacgattcaggtaacggatacaaacggagcaacagccaaagctgatgtgaaggttctggtaagaggagaaaaagccgatccaaatccaaacccggatccagatccgaatccgaacccagacccaggtccggacgacgataacaacggaaatgataacaatggtggaaatgataacaacaacggaaacgataacaacggcggaaatgacaacaacggcggaaatgacaacaacagtggaaacaataacaatggcggaagcagcaacagcggaagtcataacaatggaagtacatccggttcacactctcagagtgtgcagacaggagacaatgccaatgtgatcatgtgggcagtacttctggtggcagcagtagcagctg

SEQ ID NO: 7052 - DNA, 393 bp, Unknown
  gut microbiota DNA sequence
tgcggctggatcacctcctttctaaggagaaagaagtagaggaagtaagagctattgtttaattatgagggttcatcaagaactcaacttttttggtggcgatgcgctcaggggaaacacccgtacccatcccgaacacgatggttaagacctgagcggccgatggtactgcactggagacggtgtgggagagtaggtggccgccaaaacaaaaaaagaaaaagaactggtttcaccagtgattagagattaaaagggattttagtttctaatggctgatgaaagaagcagtcagttgtaccttgaaaattgcatacaaagagaaatatcttatgaaaataagagagttgaattaattcaacaagacatccgaggtaatgttaacaacattat

SEQ ID NO: 7053 - DNA, 6762 bp, Unknown
  gut microbiota DNA sequence
gccaatccgcttcactgtctgtctggagtttgaatagaaagaaagaacctagaaaccttgaaaaatcaagggattctaggttcttttttggtgattgagtacagtttgagtacaaatttgttttagaataaggaggaggcattgcttagaattttgttaaatcccaatatattctttaatttcattaactgtaggatgaagaactctatttgttaattctaattttttgacagagagtccttggaaaagtccattgtttttatacttgcagagaattgcataatcttccttagtaatattggtctcaccatgcatggattgatttctgaattgatagaggtcatctagtgcttcatgtaatttataaggaagatgatcgatagtgattccctttttacgtactctgtttttcatatcataccaatttaggtgttcatttggattaggattaaatccagcaaggacaataatttcatttacttcacgttcaataatggaaagatactgtttcattaaaatacttggtgcaatagtaaagcgttcatcctttaagtaatatccttcttcaataacatcagcggagactagatctaaaattattggttgtcttttaaagcacgtttttctttacgagcagccaaccaagcattaattcccattttggcaatggtgactaagacgattgcgataataggagataagaaagctgatgaggtgcccaatataggtgcaagagcaacagaaattgctccgacaatatagttttgagcagctccagattcttttaatatggctaatctattttcactatatcgttcatcacctgagaagaatgcttctatctcatcaagaactttttcgtagaatatagagtgtcctttctgtgcaccaaaaggaacgtttgtagacatagatgctgttaaccaagcctgtgctacttgctcataatctcctaattgacaatataattcattgattgttttctgctgatatccgggaaggcatagcaaccaagagtctgggtattctgtaaaaatttcttctatggtagtcattctgtcatctcctttatgtatgtggctgaaattgcatgtgttgtttgatgtagagtttgaggatcaatcccacctatactgattccaccatgagttccggctggagcataagagccaattagcattgctgcaatagaacgactttctggaataactataggactaccagattgtccaggacgtgattgtatattcaatacaatgttctttgcctttattctagaagaatcaatcaatattttagcacctacagaagtattttgttgagttaataccattcttccgtgatcacaatgtggataaccgaacaaagagatgttttcaccaacatgaacagaatctgttgatgaaagtgtgaatgttgactgtgttttttgagggatttctaataagcagacatcatataagggattgatttcttttattttggcaggaatacagtttacttgagtatcggaagtatcttgataatcctgaatagaatttaccttattcataatgatgactaggccgttatcgttattatctacgacatgagcagctgttgcaagtaatcccggtttgttaatgaaaaaagcagtgcctaagagagtaattccatttggcgtaattctgccgactggatgtactacatagctaatatctgtaaaaaacataatcattcctccatatttttatgatttttaattattggattcatttttgcgaaaagcaagaacttcattgcgaaagcgttctgtttccagttttggatagtggtaacgccattcatcgtattcatcttgtgtgatttcttccctgcggagtttttcagcaatacgattccaggagtaaaaaagttcaaacatacttagatacgatttggagctgcggtctaatctcaggcagagttcaccttcaatctcgccgattttaagtccgtatacatcttccagagtaaagaacgtatgcatgagtcctacataggtgtcaatatctggaacatttaatgcttccggagcaacatcaagtgtttctgcaagggcatttagataagcttcttttggatttcgtttgcctgtttcatattgagcaattcggacatcagcctgattttcgctgaatccgatacatttaccgagatatttctgtgtcatgccacggagattacggaaaaagtggatacgttcgccaatagccatattttatcatcctttcaaaataagttatttatattcgtatttatataaaaaatcataacatattagtattggtgattcaataaatttaataaaaaaatatagaaatagttcaaaataaaataaaaaaagttagtaaatgacttgaaagcctattgcaatgtatagtatatggtgttattataatgatacaatacaaatatgtatagtataaatgaaaaacaaaacaaatatatttcatataaaggagggtatttatgcagaagatgtttatgagagtagaagaagtggcggaggaattggatgtatctgttccatatgcgtataagttgattcgacagatgaatgcagaattaaagaaaacaggatgtgtgacgattgcaggaagaattgatagaaaatatttttacgaacatttttacggaacaaaatcatacgaaagggggtaaatggatgccagtatacaaaaatgaaaaaaatggaacatggtatgtaatggctcgttatgtggattggcgtggcgagcgtaaacaaaaatgccagagaggtttcgcaacgaaaaaagaagcacaggagtgggaacgacagttccagcttcagaaaaaagctgatattgatatgacattggagagtttttgcaaattatatgaaaaggatgtacgaccgcgactgaaactgaatacttggctgacaaaagaacatatcattcagacaaagattcttccctatcttggaaacagaaagctttccgagattaaagcaaaagatgtcattgactggcagaatgaaatcagaaccttgaaaacaccgggaggaaagacactttctcccacatatttgaggacaattcatgcacagttgagttctattttcaatcatgcaaatcggtattatgacctgaatatcaatcctgcaaaaaaggcaggaacgatgggaatggaagaaagtaaagaaatgctgttttggacgaaagaagaatatcttcagtttgcagaagctatgatggacaaaccgctgtcctattatgcattcgaaatgctgtactggtgcggtatcagggaaggcgaacttttagcactgactccggcagattttgattttgaagcagagactgtacggattaataaatcctatcaacgtctgaaaggggaagatgtgattacatctccgaaaacacggaaaggtaacaggacaattaagatgccgaagttcctgtgtgaagagatgcaggattgtctgaaaatgtattacgatttgaaagactgtgaccgactttttcctgtcagtaaacattatttattcagtgaaatggacagaggatgtaaagctatgggtgtgaaaagaatcagaatccatgatcttagacattcgcatgtttctctgctgattgatatgggatttacagcattagcgataggaaaccgtgttggacatgaagctgaaaaaatcacatatcgttatgcacatcttttcccgtcggtgcagacagaaatggcaaacagactggatatggaacgggatgcgaaaggaggtggaaatgatgtcagagagagtaatggacagacaggggcgttggagaaataaaactgtggcatttcgggtgtcaccggaagaagatgaagtgcttgaaacagcagtaaagttatcgggactgacaaaacaagactacattattcgtagacttcagaaacgggatattgtagtgcagggaaatccaaaagtatacaaagcattaaaggatgaaatgaagaagattctgacggaattacaacggattcaagatgcatcggaagtaaatgctgacttgatggaagtgattggtcttgttgcagaaacgatgagaggtatgaaagaagattcagactggtcaaatgccggcaaaaaagaaagcccggacagcggcaactgttagggcttaagataactggaaaatcctctgttatctaaaatattatcaattcaagtatagcagaggttttccatagtgacaatgaaattttacgaatggaggacaagaatttggaacagaagatggagcagaaattagaacaaaaaacagaattaaaaatgataaaactgtcagaggtgcagtcgcaggaaattgaatggctgtggtttccatttatcccatatgggaagctgacaattatacaaggggatccgggagacggaaagacaacgttggttctgaatctggcagcgaagttgtcgaaaggtgaaggaatggatgaaaacatgtctgttctggcaccaattaacattatctatcagactgctgaagatggcctgtggtcctatgtcaagaaaaagtacaaattaaatgtaaccaattttctctgttctgagcgaagtttaacttgctatttttattgcattctcctcgatgttttcaagatattgttcctcatattcatttggagacaaatatccacaatgactgtgaatgcgcacggtattgtaaaatgtttcgatgtattcaaaaatcaatttatgtgcatgtgcataattaaagattttaaaccggttgatccattctctcttcaaaagtgcatggaaagattctatacaggcgttatcccatggatatgctttctttgaataactgtgaatcatacctttggttgctttttgaaatgcttccgatacgtactggcatcctctgtcgcagtggaagatcaacggtttttcaacatttctgacacgttttgctttttcaacacattccactacgtgggaggcctccagcgtctcactcaacacccaggaaatgatttttcttgaatacagatccatcacactggtaagatacacaaatccttcaaatgtccaaatataagtaatatctgaacaccagacagcatctggatgagcaggattgaattcctcgttgaggatatttttgagtttctggctgaaatcagaatctatggttgtctggatatatggtttcacccaatgggctttgattcccatttgacgcatataatttccaactgttttttcggaaacatactccccggattttcgcaattctgcagtaattttaggagcaccgtagttttgatgggattcctcgtagatcttttgaattttttcttttaaaactgcacggcgaacagacgtgtccgaaggaacccgtttcttccatgcattgtaacccgaacgtgaaacgcctaattttttcagtattccgctgacagaaacctgacgtttcacgggcagggatttgatttctttcacgtactcagaagtagccgtgtaaagagcttttgtcagtttcccagaataccgattgctttttttaacacttcaagagcatccttcgtatctcgtaattcacgctgcaatctggcaatctcttttgcttcctcacttgcataatttccagaaccacgggtaggaacctctcctttatgttcctttgctactttcatccagtttttcagtgcagattcgctgactccaagattctccgcagctttgcgaagtggcagctccggatgatccaagcgatactgtactgcatcctctttaaactgttgggaatattttgtaccttttgccataaccattctcctccttgatctatgactatcatatactatttatcgaaaatggtcatgtttattttgtactatttatattctaacattcttaatttcatggttacaaaaccatatgataacacaagaggtctcaggataaaacaatctgatggaaaatacgtcagattcctttatgccaagacctcttttattttgcctgaaaagtgaaagatcagtttgttatagtgtgcccgataacacagggacattccggcaaatgattattatagagacgggtataatttatttttgagaatggagaaatacatgcagaatgatctgctgttcttgcataactccagagtacctgccacgaataacgaagccgaacggcttctgaggaattataagcggaaacaggcgcaggccgtgacatttaggccacttataaatgattttctacgcaaaatggcaaaatttcggcatcaggaaaatcaagatgtaagcgccggaacaaggataaggttttttatcgataaaccagcagctatgatctcttttccaagagccgttatcaaatatttataggatcctgggattttttcaatcagtccatggactttcagacgtttaaagatccttgtcatggcagacggagtgattttcggaagatgctggcggatctgttttccttgtatcccgaatgtcatgtattcccctttgctgatggcttccagtacagacagatcacgggaatcaaaaaagttgaatccgcgataggttcgttccttttccctccgggaatgactgacttcatccaatttcttcctgccgctgctgtgatcatcaaaggatgagataaattcaagatatctgtaattcgcagatttcaggattgtgaataactgatataagctgtaaatactcttttttaaaggggctttccgaatatcggatgttccatccctatgctgaacttcccgc

SEQ ID NO: 7054 - DNA, 446 bp, Unknown
  gut microbiota DNA sequence
caccggttagcaaagatgctatccgtagagccttaaaaaaaacaaacttcgacctcacaaaaatgaatactggtgcattccctcaagagaggacgcagaatttatagcttgtatggaggatgttctcgatgtatacgaacttccatataacccacaacgccccgttgtttgtatggacgaaaaaccatatcagttacttggcgaggcaagatccccacttcctatgcgccccggcaatgaccagaaagtagattctgagtatgtcagaaatggtacatgcagcatttttgcattcgtagaaccgcttggtggagctcatcatgtaagtgttcgggaacatcggactgcaattgactgggcagaagaaatcaaatatcttgccgatgtcatgtatccagatgtagaaaaaataattcttgtaatggataatcttaatacacataaac

SEQ ID NO: 7055 - DNA, 469 bp, Unknown
  gut microbiota DNA sequence
tattatcaagcacactataacaaacttatttttcatctttaaggcataataaaagaggtcttggaataaaggaatctgacgtattttccatcagattgttttatcctgaggcctcttgtgttatcatatggttttgtaaccgtgaaataaaaaagcagaaacctccccgaccaaagtttgatttctgctttcacccaaacatagcttacgctacattcatgcatacctatgataacaattaaaacagaaaactacaaccttatttctcaggatttttacaataaaacaatagattctcttgatctgaaccttatttcatgtgtctgcggtcactccggctgtcttatccgttatggctcttacagacgcagcatccagcttgctgacagggttctctccctttcagtcattcgtgtgtactgcaaggcatgcgggcatacccatgcactgttactttcatccatgatcc

SEQ ID NO: 7056 - DNA, 1519 bp, Unknown
  gut microbiota DNA sequence
tattctaccgatgtatcttataattaccgggcagcatttgtagatgtggaaaagaatctgattggatttccgggatatcaggagcagcaggagtactacatttattcctatgataaagaaaaaggatttacttgtgtatttgagaaaaagctgagcggatattcagaagtgagaggcttgtacgcgggagatagattttatctggtgacagaaggtacggtagagtcttatcgattggacaattttgaaaaagtggatgatgtggtgttgtaagagaagataatttcaaagaccagatatcaaggtatacttgctgtacttgatatctggtcttttatgtatgaaattttttagaggatctttatgaaaatttcattgtatcctcaaaaaatttcaagtataataaaattcatcttgaaaggaatccctttcaattttcaaatatggcagagagactgccattcaaaaaattattcccagataaagagtaaagagatggataaaagaagttattgatcggggtgaacagtaactaaagagcgggagtttgtctgtatttgcgattgtgaaacatcgcgtcaaaggatataataaaatcagaaatacaagtacatgctcatcgaaatattttaaattccatcagaacaaaggaggagcatgtatggagaataaaaaaccaacacaatttttaatgaagccaaaagtagatttctgttttaaagaactgatggaagacgaagaggtgcgtaacgcatttctggcagcagtacttgggatcaatctgaaggaaatcaatgagagtaagattttgccgtcccatttgcgtcagaaggataaagacgataagctggggattctgaattttataatgtttgatgatgaagaatattattgccgttttcatttctggtcagataaggggaggaagttgtatagtgataaatttgagattcatacactggaacttccgaagctggcaaaacatgattatccagagacagagctgctgaaatggcttcagttcatcaatgcagagacagaggaggaatttgaaatggcagcagaaaaaagtgaatacattaagaaggcatatgaggatctgaatcggatcagcgcagatgaggaaaagcgtctggaatatgaggagagagagcgtgcgattcgggatcaccagtatttttccacggtttataaaaacaccggtctaaaagagggacgacgtgaaggcagacaagaaggtagacaagaaggcatacaggctgttgtggagctgcttcaggaaatggaactggaaaaagaagtgatatgtggaaaagttcaggaaaagtttcagatttcttcagaggaggcagcacaggaagtggaaaaatattggaagtagggccaatgggagactgggaatatccacataaaatgttccaggctttcatgtcaaaccagttcgcagattgcagggatactaagtgtggtctcacgtagcgcctagtataacgaatattaaataattgctatattaaat

SEQ ID NO: 7057 - DNA, 3086 bp, Unknown
  gut microbiota DNA sequence
caaaggaagaggcgattgcagcaggaaaagaggcgattgcagataagctgaccggaaatatagtgaaggaaatttatgttcctaagaagataattaatattgtaatgaaataattgagaagaaattctcacaacagaataaagtgcttggaaatattgaaaagttcgctgaaaatcaaggtttacagacatttttcttcaatgaaaaggtatcgtagaatatcgcaaaatatcgtaacagatttttaaaatggagtaaatttggagtaaaagttgaaagaaaatggagtaaatatttcaagaagacatgaaaggaatgacgcagatggtagagatattgtctgcgttattttttttgattataatggtgtaaataattgcaaagtatgatattatgagaaataaacaaattggaatttaacacgaacaagatttaattataggagtgtactcaatgtggcttttagggagtatttttatattcacatcactattaattctatacataaaatatagggttgtttttactggcgaaaaatgcaaagggaaaataatcgacattgtagaacaaaatgcaggttatgtagtaggtggtgttaatgtcaaaaagcatgcttatatagtgaagattaaaaacaaaaaatatcatactgcacatggttgtatctttttgtcattgggaaagagaaatattggaaaagaaatttccgtatttaagaatgaaaaatatggaaatgaggttttcaaatgctttgattttcgtatagagattgttgctttgttagtatttttatttggcgtttttatgatctactcagccttatgataaagccaagcaggtttcagtttgaaaagaagttatacgcaaagaaaaatttagaagttatggaggaaaccatatggaaaatttaagtgcatatagatactgtatcgctatgaaaaaaggtcgaaaaatattaaatctgattgtgggctgcttaatgattcttataagtatcattttcataaccacaactgtttttagctgtatttttatgcaagaatttgtttattacacatttttaacaatattccttgtaattatacccctacctctttttatttttggaattataggtattgtctcagctacaaaacgagttgaagtttataaaggaaaagtgatttatcatattggttttaaaaataaggaatatcgtatgtctgatattaaaacatcaaaaacaaaaagtgaaacatatagaacaggattagattatggaaatattgtacccacctacagttatgataaattaactgtattctatgataaaaaagggaaaaagatttttaaatttggattggcatacgataatgtagaacgactgaaagcagatgttaataatactcaaaaaagcatagcaaaacagcataacaagaactaaataaattccagtttgtagcagacagttttttaatcgactgtctgcttttccttttcaatcataattgatagtagtggtataaaatggttcatatccattgtgaaaagaccatttagaacggtgtagattgattgtaagggtggtgggagttccgttgatttggttatgttctgcttcaatttctgctaccacttcatcagtattccagtattgatatacgataacttgtagttcggtatcacgattagccccattgctgaatgacatactgttaaatacaagataatcgggtaaactgatataatagagaacacttgcaagcaagactagaataatagtgataaataataatttctttttcattttgacatacctctgtttctatatatttataaggataactatatagtacctcactgtatagtgaattactacataaagatttattgaatatacttttatgtagaggtgaggtaatgaagtacggacatttagaacttcacatagaggaactgctgaaagaaaaaggaattagtaagaataccatttgtaaagaattggatataccgaggtctaattttaatcgttattgcagaaatgaatttcagagattagacgcacaactaatctgtaaactgtgcagttacttggattgtggaatagaagaattgatagagtatgtgaaagaatgagagtctgtcggattgaagaaaaatcgtgcaggcttttgttgtgtcaagaaaaagagaaaacctagtgaggtcaaggaacaaggcgtagccgatacgccgtagggcagtccttgacggaacggacgcagccaactgcaccatgatacagcagaggacttgaaaggtcagaaaccttgcaagtcctcttgtctgttattgggcgttattctttaaataaagtgcttcttttaccacttctttttcaaatgctgttatgtgaccgtcctgtattccgttgtcgatataaaagcaatcgtcagtttgtgagtaggcaagtttggtaacttttggttcacaggtctttgtatcaattccataatagtaaatcgtggctgttgttaataccatgtgaatactttcaaaatctcttgtaaaaatggtatgcctgtcagaatagaagaaatcagacggacattcatagaattgggaactatcctctttcaaaaataatggcagtatgtgcattgcatttccagcacgattgacaaggacataaaagcgtggaataagggcggcatattgcgtcatcatggcaatatagatatcgtctaaattatcgagaagatattcggagcaggagttgttataaaagacatattgcagggcattgtcattttggcttgtatgttccataggcacattttgtccgtaaagccaccgcaagtctacatctaaggagtcagcaatcagttccattttatcggctttcggattgtactgtcccgaaagataggaactgaacgcccctttgctgatacctgtatctttgactatatctacctgttttttattttttgctttcatggcaaatttaatccgttctgcgattgtattcatctgaaaaccctctctttccatatcctgttataacttttcatatcttatcgtctaaggacactataccacaagttcagaaaaaagaaaacaaaaag

SEQ ID NO: 7058 - DNA, 961 bp, Unknown
  gut microbiota DNA sequence
atcgtacgttccatgggatctgccccctggctgacagtctcttgtaccaccagtttctgcagcgcctcccctttgactttgatctcctggaatggttcctgttcccggtatgccaggaacaggcagcccagccccagcagcaccaacaaaaaggccaatcccataagtcccttactttttctcatgttttgctgcaattaccagtcccccggcaagtaccagaaggaggactccccctgctacataccaaatggtggcatcaaacagtccggtctggggtgccgtatgctcggctggtctcggggtgtgcttcggttccactttgatgtcgtaatgtaaggtttcgtctgtttccatggtagggatgcttaagagggtcggggataccagatcgtaccccggctggtctttggtcgttaacagatacactcccagctcctgtttttcaaatacgacttgtccgtttccatccgtttttttcccctgttcttgtttggctgtctctgccagcgttttggcagcctcctccaactgctctgccgtggtcagcgtattcaaatcgatctttgtgttgtcatattccggaagcagcgtataggtactgtcctgaatctcccccactttcgtcaggaaaaactccacatccgctacgctggttccctcttttcccggtgtcagatggacggtcacgcttcccgtctgtaccgtctgctccggactttgcccggtctgtgtctcctgcccggtattcggttctgctggttcctgagctgcctgcacactgcagacgctcccaaaggtcaatagcagtgccagacatccggcactaaatcttgtcatcatctttcgcttcattgattgtccgtctcctttctctccaaatgtataggaggaataatagtaagaacgcaaacggcaacagagtaaacaccaattcccttgcagagggcagttcttctcc

SEQ ID NO: 7059 - DNA, 406 bp, Unknown
  gut microbiota DNA sequence
attattattgatttggatgaggctcatgggaaagtattaacccatgagcaatccgcaagatcaaatggtgtttgcctgacaactgtaacgaatacagtgaccaaatatttttccggtggcattgaagcggttaccgagttcaaaagaaatatcaattccgacaatgcaaggcgtatccttgatggacgtgcagaagcacgtattattgaacttgcctgcggtcctgttccagaaggtcattccagatggactttgcgtctgctggaaaaagaagccaaagtagtgcttgatacaccggttagcaaagatgctatccgtagagccttaaaaaaaacaaacttcgacctcacaaaaatgaatactggtgcattccctcaagagaggacgcagaatttatagcttgtat

SEQ ID NO: 7060 - DNA, 512 bp, Unknown
  gut microbiota DNA sequence
gttccctgatccagaccgatgaggatcacctgtccatctgctccggataccatctccaccacatcctgcggctggcttccacctgtgtgatccgtacctcctgcagaatcccggttgatcacatgatatcccgtatctccctgtttcacgtagacttcatttttgcagtctttgtcactatacagacggaaatgggcaccctgcagcaccttatcgtggtcattggttttcacgatgtcaatccgataggtgaagcagacgaccgtatcccatggggtaaatccggtactgccctcgttattgctgtccgcatcgttggagaattccagccgcacatcattctcaaagcctggacgtcccgtatcgttggccgccagatcattcaacgttgcctcgtaagtcagggtcaccttctgtccataggtattttcctgtttctcgttaaagttcgggaactgcttatctacgatggatttcatatcctgaacaaccacctggaaggtatctcctcc

SEQ ID NO: 7061 - DNA, 2080 bp, Unknown
  gut microbiota DNA sequence
tctctgatatgttcgtcatttgcatacgccatttccatcagagactgaaggtgcttcagaaaaccttccacctcgaaaggaatcgggcatccgatatggatcaaatcattcggagttttcttcagcccctcttctgccatcagcttttcttcataaagtttctctcccggtctcaatccgatgtattctatcttaatgtcaatatccggttttagtcctgacaacttgatcaggtttctcgccagtgtatcgatcttgaccggacttcccatgtccagaacaaaaatctctccaccctttgcataagtgccggcctgtaataccaggctgactgcttccggaatcgtcataaagtagcggatgatatccggatgcgtaaccgtcaccggtccgcctgatgcaatctgttttttaaacaatgggatgacagaaccattacttccaagtacatttccaaaccgaactgccacaaattctgtcttgatatctttcgaaaagacatgttttttcaccatagctccgtcttcatcatctgcatgtgcatagagaatcggcagtctttccggtgtcttctctttgatcatacgatcaaaggactgtacgatcatctcacagagacgcttgctggcgcccatgatattcgtcggattcaccgctttatctgtactaatcagaacaaatctctgacagccgttcatcattgccgcataagctgtcttgtaagtaccgatcgcattattcttaatagactcacatggactgtcctccatcagcggaacatgcttatgtgctgctgcatgatagacgatgtccggacgataagtctcaaataccgcattgatccttctcgagtctcggatagatccgatcaatacaaccagatcaagttcaggatactttttctttaactcttgctgtatatcatatgcattgttctcataaatatcaaagatgatcaactgtttcggatggtactctgcgatcagacggcaaagacccgaaccaatacttccgcctccacctgttaccatgacctttttgtcttggataaaggcattgatctcctgcatattgactttgatcggatcacgtcccagaagatcctccactgctacgtctttcagcgcactgacacgcacctcaccggtcaggaactgatagatacccggcaggttcttcagctcacacccggtctctttacagatgttcaggatatcccgcttctcctgcgctgtcgcactcggaattgccacaacgatcttctcgatcttgaatcgttcgacacaggagagaatatcatctcttcccccgaccacaggaactccttcgatatatctaccccatttattcgggttatcatcaataatacaacatacgatatcctccagctctttggctgtcttgatatcacgcaggatcatctgacctgccttgcccgcaccgatcagaagtaccttcttcgccttcgcgatctcctctgcctttctctgccggcttctctcaagcagtacaaaccggtaagaaaaacgcactcccagcgtcagcacaaactgaatcataattccgaatacataataagaaagtggcatcttcccgaaaaatacattcattcccacacagtggatcacaaatgtaattccggttgccacaaccgtcctaagcaactcgctgtagcttgcaaatctccagatgctattatagagacgcatcttcctgaacacaaagattgaaatcacagcgtaaattaaaataaacttaaaatagaaattcaaatactctttcggtatcatcgtataacgacagtcaaaccggaaccataatgccagaaaaaaagcaagtatcatagcaatagcgtcataaactgtcaaccctattgatacaacttgccagtgttccatcctgtttttaaaagcatgtactctcttcttccccttcatcttttttcatcctattcctcttccctaaatatttctcctatttatcctactacagatccggacatttttcaacaaaattgttgattgctccctattttgtgcagattttgaagatttatgtcattttattttacccccccccc

SEQ ID NO: 7062 - DNA, 1291 bp, Unknown
  gut microbiota DNA sequence
taatcactctatctccatgcgcttcgggcactttccagatcacgaagtcccttttccacctcttctctgcaagcagccatctcttctgcctgctccatattctcttccttcagctgtctcaaaagatcctgcaaattcatttcatgtgtttttccacattctataaaatattcctttacctcatgtacctgatacaggtttttcaagcttcggctatggagctcgagtttatcacaaagtgcttttgcttcctgaaaaacccgttccaaatcttcatacttctttttcagctcgtcatgaattgacatatatttaaggatatctgctgatcccgccattctgttcaacacagacaatgctgtttcatatgctgctttcattgccgcaatctccggctgtgtcagatcaagcccttcgatcgtttccacttttggaagaagatccatcacgatttgaaatggattttcatctaatttttccagaagcgtcgcatcaacactttccagtgctttcgcaagcgctgtcaattcaggctccagaattccatatgcatattctgcctgttttttaatcatgtcctccagcatcagtacggcatcatccatctgctctttcaaactgtcatccctcagcccaagtgttcctttatgaatggtctttgccgcttcaagcaaagtatcctgcatagcggatttctcttcttgtaccatttccattactttttccatgatttccggagtgcagttcgagctttcatatattttctctgcctccgtcagccttgtgattaaatttttcatctcaggaatacatcttagatagctgttctcaatatcattgtcaaattcctgaattgaccttcttaattgttccatgctgttttttaattccggcagatattccatatcaaactgaatcactgcgttgtttaattttttccgctgtaactgcagttcttttcccgggtctttcacacttctcactttggcatttacttctctctgcgcttcttcaaacaatgctacaagctccgctgtaatattccccacctctgaccatgaatttactgtactttgcattctcattttaaactgcagcaacaacgtggaattatctacgtcttttagctgctcaatggaattttcaacatacgcctccacagacttccataccgtttcaagatttttaacgcctgctgccgcctcattgatcacaatactggcatctgccatatttcctctgacagctactacttttccaacaaagtcttctttttctcgaagctgctctc

SEQ ID NO: 7063 - DNA, 85592 bp, Unknown
  gut microbiota DNA sequence
tcagaagaaagaaaaaataaacaggattgtaaaagcctgaaaaaatgagatggtggatgaaataattggtttcatccgccatttttatcacgtaaatctattgcagaattgcagattttgtgttagactataaaaggttatccacaggaggtgtgaacgtatggatattttaaaaattgtgttaatgattatttttgtaatagattgtattgcgttgtcagcaattattcttcttcaggaaggaaagtccgcaggacttggaacgatcagcggtgcggcagattcttattggggacagaataaaggccgttctatggaaggcgctcttgtgaagtctaccaagtttcttgctattttatttttagtacttgcagcagtgctgaatctgaaagtatttaactaagagaaagcgataaaacactctatgcaaaaatagggtgtttttcttttatgaaaaattgacggaagtcgaatagaggatataaaaaaggaactactaagtatgaaagaaggtgaacgaatggaacatacatttgagaaacgaaaaaaggtgatttatgatttgatctgtgacgatctttatgtaccgatgaagctgaaggagattgcgatgcttctgcagattccgagagaacagagaaacgaattaaaggaagtattggaagccctggaggcggatggcaagatttacgtctcaaagaaagggaaatatgtcaaaggacagcctcagtatttaaaaggaatatttcaggcgaatcttcgcggattcggatttgtgctcagagaggatgaagaggatgtttttattccggaagagaatatcaacggtgcatttcagggagatgaggtggaatttctgattaccaagtcaccggagggcagacgaaaagaaggaaagatcgtgcgtgtggtatctcatggaacgacaaaagtgattggtctgtatgagaagagcaaaagttttggatttgtacgaccggataatcagagatttttaaaagatatttatattccggcaggcaaagaaaaaggtgcgatgaccggacacaaggtagtggtagaactgacgtcctacggcggggaaaatatgaagccggagggaaaagtcgtggagatcatcgggcatatcaatgatccgggaaccgatatcatgtctattgtgaaaggttatgatatgccggtggaatttccggagaaggtgctaaatcaggcggaacgtgtcggaaaagatgtaagtgaagcggatatggcagggcgcatggatttaagagactggcagatggtgaccattgacggagaggatgcaaaggatctggatgacgctgtttctctgacagaagtggagaacggatggaagctgggagtgcatattgcagatgtgaccaactatgtgcaggaaaaaagtgcattggatcgggaggcgctgaaacgcgggaccagtgtgtatctggcagaccgggtgattccgatgctgccccataagctttcgaatggaatctgttctttaaacgcaggagagaacaggcttgcgctaagctgtattatgactgttgacaaaaaaggtgagattgtggatcatgtgatcgcagagacggtgatccgggtggaccagagaatgtcttatacgagtgttgcaaaaattctggaagcgcaggatgagcaggagagacaaaaatacgaaaagctggttccgatgtttgaacagatggcagaagtttcagggctgcttcgggaacgcaggaaaaagagaggcgcaatcgactttgattttcctgagacgaagatgattctggatgaacagggaagaccagtggaattgaaaccatatgagcgaaatgtggcaacgaagatgatcgaggactttatgcttgcggcaaatgaaacagtggcagaagagtatttctggagagagattccgtttttatatcgtacccatgaggcgccagaagaagataaggtaaaaaaactgagtacgtttatcaataatttcggatatcacatccatatgggaaatgaaatccgcccgaaagaaatccagaagctgctggaaaaagtggagggaactccacaggaggctctgatcagcagactggcgctgcgttccatgaagcaggcgcgctatacaccggaaaatgcagggcacttcggtctggcggcgcagtattatacacattttacgtctccgatccggcggtatccggatctgcaaatccacaggatcattaaggagaatctgcgcggcagactaagtgatgacagaatggcacattatgaaaagattctgcaggaggtggcaacacagtccagtgagatggagcgcagagcagaagaggctgaacgtgagaccgtaaaattaaagaaagtagaatatatgcaggatcggatcggagaggaattcgaaggtgtgatctccggtattacaaaatggggagcatacgtggaactgccgaatacgatagaaggtcttgtacatgtggtgaatatgaaggacgaccactatgagtaccgggaagagcagtatgaactggtgggagagcatttccgtaatgtctataaactgggacagagagtccgtgtgcgtgtccttggtgcagaccggctgcagagaacgattgattttgagttttgcgaagaaaacgagtagagtttaacgggaagaagagaggaaagtgcgatggcaaaaaaagaaggcaaattgatcgccaacaataaaaaagcatatcacgattattttattctggaaaaatatgaggcgggaatcgtactgcatggaacagaggtcaaatccctccgcatgggacagtgcagtatcaaggaagcgtttatccggatcgaaaacggggagatgtttatttatggaatgcatgtttctccttatgaaaagggaaatatctttaataaagatccgctgagaccgagaaagcttctgctccataaaaaggaaattgacaagattttcggcaagatgaaggaaaagggaaatacagtggttcccctccaggtgtacttcaacggaagtcttgtaaaagtggaagttggacttgcgaaaggtaagaaattgtacgataagcgggatgatatcgcgaaaaaagaccagaaaagagaagcgcagagagaatttaaaatcagaaatctgtaagaaatatgccatcgggcggaagttattcttccagtccgatggcatgtttgatttctgagagattctctccagtaaagaccattccattcatcccgagcttctgagcagctttgatgttttcgggtttgtcatccataaaaaagcagtcggacggattcagtgaaaaggtatcaaacagatgctggtaaatatccggatttggtttgaattttttgatggatccggaatagactgcaccgtcaaataagcgggtaatctcgaaaaaatctgcatgttcttcaaagaaaatcggagcgttggaaagaatgtaaagccctgtgtgctgttcttttaatctgtggatcatatcccacaccggctgaatcgggatcatgtgttgataccaggtggcaaagcatttgcgggcagtgtcatgaaggcagtccggcagcaggtgaagtgtttcctcctggtattcttcatagggaatacttccctcatccaatgcctgccagttgtggtagatggcatttttcagaatgggaagatcttcgcgattgcagtaggagcgcaataagtcatctgattgaaaggtagcaaggacatttccgaaatcaaagataatatgtttataattcataagtaaaatcctttctgaagcgtatttgaaactctgtttatcatagcacagaacaggagaaaattcatctatggatcttatgagaaaggaagtgtgcttttgagaaaaatgtggtaaaatggataaaagcatatttttctaacattcatttgattccacatgtgtaatgtggaatatcttattcatttcaaaaacaggcaaacgcctgtcctttcagaaaattcatgcttttcaaatcaagcaggcaggagttttcggaaggcgaaatctcctgaaagaaaaaaagaaggaggttttgtatggaaatgcaaaaagaagaagccaaaatgcttcagtggcatcctgcatttttcgcagagatacagatcgaactgcaggaagatgccgaacatctgatttttgagaatgagcatcagctgggaaccaaaccaaaagaaatcgatgttctgatcatcaaaaaggacaagggtcgggtaatccgaaagaatatcgggcggattttccgacaacataatatcgtggaatataaaagtcccctggattatctgagtatcgatgatttttataaggtgtatgggtatacctgtttttacaaatccgataccagtcagatggacagcattccgatagaagaacttacgattactctggtaacaggaaaatatccacgaaaattgatgcaccacttgaaaacaacactgagatatcaagtaaaaaaagctgaaagcgggatttattatgtgacgggagataaaattccgattcagattattgtaacaaaagaactgacagaagctgaaaatctgtggctgaaaagtctgaccaacgaactggaacagaatgagaccgcagaaaaattattggaagaatattcaaaaaatcaggcaaatgcactgtatcgctccgtcatggaattgatcgtgcgggccaacaaacagaagtttgaggaggtaaaaggaatgtgtgatgcactgcgggaattgatgaaagatgagattgatgcggaagtgaacaagcgcttggaaataactaaaaaggagagctctgaagcagtagaaaaacgaatcaatgctctgaatctggcgctttctaaggcagaccggatagctgatattataaaggcagcagaggatcatgattatcagcagaaattattcgaggaatttggtctgtagaggagagaaaaatgaagtacaatcatgagctgatcgtgccggatgaggggctgcccttcaagatgtttatttttgagggcaaggatggcaattataagcgtgagatgcactggcatcgttctgtggagatttttgcggtctgtgagggggaactttgtttctatatcaaagagaagccgtatcctcttgtgcagggagaatttatgatcgtgaattccaacgaagttcattccgtgcattctccaaagccgaaccagacgattgtattgcagataccgatccggttgtttgagaactattttacgggagaaggattcatctggttcacacacaatccggtggatcgggatgaacggctgatggagttgatccgccagatgtatgaggtgtacataaaaaaagagcgtggctatgaaatggaagtgaaaggtctgttttatcttgtgatgcatttgctggtatctgagtatcagcggattgatgtgaccgaggcgcagcttcgggacaataaaaatctgaaccgtctttctacgattacgtcctatattaaagaaaattatgcatcagaaatgacactggagagtctggcgaagatttttggatattctccgacctatctttcaaggatgtttcagaaatatgcgggggtaaattttaaagcctatctgcaggatatccggttgagatatgcatggaaggaagtcaaagacagtgataagaccttaagtgagatcgctatggagaatggttttccaaacagcaaggcgctcgccagatcatttcagaaaaaatacgggatgcttccaagcgaatatcgaaaaagagagaagtgactgttcacaataacaaagagcaagaaattgacataaaatagataaataataggtcgcagaagcgaaaaaaagttgataaaatgacctcaatgggaaacttggagacaggtttttgattggaggtcattttttatggagattcagaaagttacagataccgcatttgccaaatatggaaaagtgatgtcagatattccggtagagcggatcttaaaagagatggaacacacgccgcttccggaagatgtgatttatgttccgtctgtggaagcgctggaagtacttccggatgcggtggcagtcagagaaaaaggatttggagggctgccgattcagattgggtattgtaatgggagcaatgtgaagttgaatgcactggagtatcacagatcctcagagattgatatcgcagtgacagatttgatcctgctgcttggatgtcagcaggacatcaaagaagatacctatgatacagctctcgtggaggcgtttttcgtaccggcaggaacggcagtggaattgtatgcgactacgttacattatgcaccatgtaatgcaaaagcaggcggtttccgatgtgtggtcgtacttccgaagggaacgaatgaggcacttccgtttgcaccggaagcaaagggcgagagcagacttttaacagcagtgaacaagtggctgatcgcgcacgaagacgcagagattgagggtgcggtgaacggcttaaaaggtgaaaatataacaattgtgtaaaaataaaaagcaaacagaaaggatggtaacagtatgagtaacatgccagaattaaaaatcggagtcgttgcagtgagcagagattgttttccggagagtctttccgtgacaagaagggaaaatctgatcaaagcatataaagaaaaatatggagaggcggatatttatgagtgtccgatctgtatcgtggaaagtgagatccacatggtgcaggcactggaggacattaaaaatgcaggatgtaatgcacttgttgtgtatcttggaaacttcggaccggagatcgcagagacattgcttgcaaaacattttgacggaccgaagatgtttatcgcagcagcagaagagcgcggagacaacctggttcagggaagaggcgatgcttactgtggtatgctcaatgcaagctataatctgaaacttagaaatgtaaaggcctacattccggagtatccggtaggaaatgcagaggaatgtgcggacatgatcgcagagtttcgtccgatcgcaagagctgtcattggactgaacagcttaaagatcatcagctttggaccgcgcccgttaaatttcctcgcatgtaatgcaccgatccagcagttgtacaatctgggagttgagatcgaagaaaactcagagctggatttatttgaggcattccataaacatgatggagatgaaagaattccggcaatcgtaaaagagatggaagaagaactgggagcgggcaataagaaacctgagatcctcgcgaaactggcacagtatgaactgaccttgaaagactgggtagaagagcacagaggatacagaaaatatgtagcaatcgcaggaaaatgctggccggcgttccagacacagttcggatttgttccatgctatgtcaacagccgtctgacagcacagggaattccggtatcctgtgaagtagatatctacggtgcactgagtgaatttatcggaacggttgtcagtgaagatactgtgacacttctggatatcaacaatacagtaccgaatgacatgtacaaagaagatatcgaaggcaagttcccatatacacagaaagatacatttatgggattccactgtggaaatacagcgtcatccaagctgtcattctgtgagatgaaataccagatgatcatggcgagagcacttcctgaggaagtgacacagggaactctggaaggagacatcatccctggagatatcacattcttccgtctgcagagtacagcagactgtaagctgcgcgcttatattgcgcagggagaagttcttccggtaccgacacggtcctttggatcaatcggagtgtttgcaattccggaaatgggaagattttaccgtcacgtcctgatcgaaggaaactatccgcaccacggagcagttgcattcggaaaatggggaaaggcattgtttgaagtattcaaatatatcggagtggatgtcagtgaaatcgggtataaccagccaaaaggtgtcagatatccaacggaaaatccatggaatgagtagagcgggaggagtcgtatgttatacataggtgtggatcttggaacatcagcagtgaaattgctgctgatggatgaaaatggcagtattcacaaaattgtatccagagagtatccgctgtattttccgcattcgggctggtcagaacaaaatcctgaggactggtttgtacagagtatggaaggaattcgtgagctgacagcagagtgtgacaaaagtcaggtcagaggaatcagttttggcggtcagatgcatggtctggtggtactcgatgaagcggaccatgtgcttcgtccggcaatcctctggaatgacggacgaacagaggaagagacggattatttaaatcaggtgatcggcaaggaaacactgtccaaatatacagccaatattgcatttgccgggttcacggctccaaagatcctgtggatgaaaaatcatgaaccggagttgtatgaaaagatcgcaaagatcatgctgccaaaagattatctggcatataagctgtccggtactttttgtactgaatattcggacgcatcgggaatgttgcttttagatgtacagaacaaatgctggtcaaaagagatgctggatatctgtggaatcagagaagagcagctgccaaagctttatgaaagctatgaagtggttggtaatttgaaaccggaaatcgcagaagaactgggacttggtacagatgtaaaagtcattgcaggcgccggagacaatgcggcggcggcagtgggaaccggaaccgtaggagacggtcagtgtaatatttcccttggaacatccggcacgatatttatatcaagcaagacgttcggtgtggatcagtacaatgcgctgcattcatttgcacatgcagacggcaattatcatctgatgggatgtatgctcagtgcggcatcctgcaataaatggtggatggatgaaattttaaagacaaaagagtatgcaaaagagcaggaagagattgtaaagctgggggaaaatcaggtgttctatctgccttatctgatgggagagagatccccgcataatgatccgtctgcaagagctgcatttatcgggatgtccatggatactacacgtgaagagatgacgcaggcagtacttgaaggcgttgcattcggacttcgcgattctctggaagtggcgagaaatcttggaattcagattgaacgcacgaaaatatgcggaggcggagcaaagagtccgctctggaaaaagattattgcaaatgtgatgaatctgaaagttgatgtgatcgaaagtgaggaaggacccggatacggtgctgcgattctggcagcagtcggatgtggagagtttgaaaatgtggaaagtgctgtggataaactggtccatgtggtggaaactgtggagccggacacagagcttgtggaaaaatatgaaaaatgctaccgaaaattcaaaaaatactatccggcattaaaaggattgttttaattgtgaagaaaatggtacatgctagaaagtagatagttctaaacaggggcaagtatgactcatgcgagtcgctttgcccctgtaatttttctataaaaagaaaaagatagataacaactgctatcttacgagaaaattcttaatcattcagaaatatcttgcaggagtttttaaaaaagttttttccgaaaaacaatggtttcatattggcgaatattaccgttcttatttccgtagatgatatcccccttttttggcagtactatgtcgatattgcggtatgaaaaattttgtataaagatatattcgtattcatcatctgtccgacttgttacctcaatcccatcaggaattgtatttagaatagaatgaatatgatgtttagctaaaattttggcataaaaatcatggtaaaaaagttcttcagcgtcggcacagatgtagtaagcatatcccttaccatactgatttactgtcagtgcaggtgtgccttgataaaaatcctttccgtaattcatgagtggtgtggcaccgtcgagttgaattaaatcgcaaagatttttacatttataggacgtattcagctgcaaagaattttcagtgactggaatgagtaaattctcttcccattcatagagtccgtcaatttctttacttctaagtcccaatacatcgagcaagccatgtggagttccctcgaggtagcacagatcagtttcatttacgattccactccagtatgtcatgattagtatcccgccattttcaacgaaagtacgtaactttatttcgatgccagctcgaaatatatataacattggtgcaaccacgagtttataagaatcaagggattgctccatgttaatgatatctatattgagggcagcttttcgaagcgtctgataggattttaagacactttcatggtagaaaagcccttcatttcgtggtcctttcgcgtcttccattgcccatctgttttccatgtcataaataatagcagcggatgaatctactttgcttccaataacttgttttaattctatgagggatgcaccagtttcagttacttcgttgaaaacgcgtgtatcagatccaccataatgatcaatgaccgctccatggaatttttcgaaacttccacgactttgtctgatctggaaatattgtacgctgtccgaaccatgtgcaattgcttgtagagaagcagattgtaacaatcccggtttttttagtttacttattgcttgccagtttggactggaggggcaggattccattaaaagaaatggcttctgtttcatactccgcatgaggtcatgctgcagtgctgtattgtatgctgtacgaatttcgtcttctttattccatgcaggatagctgtcccaagatacataatcgatgtgctttgccagattgtagtagtttaagcccttataatcatccataaaattagttgtaacgggctgagttgcaccaccatctcgcagagcatgtatctcttcgcacataaaatcaactgtctgatctgttacaaatcgtttccaatcaagattgaggccgtgtagtccgtggtctcctatggaagatggactttcaatttgatggaatgaattataggtatggctccaaaaggttgtccaccatgcccggttcaagctgttaatatctttatatttgttttttaaccagttgcgaaaagcttcttgacataatggacagtggcattcacctctgtattcattggaaatatgccacaggattactcccggatgatttcgaaatgttttagccaacttttggttgatgattcgaacacgttctctgtaagcaggtgaggtgtagcaatgattatgccgctccccgtatagttggcgtgtacgatcttcacggacacggagaacttcggggtatgtttctgccaaccaacgcggacgggctccagatggtgtggcaagtatgacctggatgccgttgtcgtagagtttgtcaattatgtcaatcagccaggtgaaattaaaacaatcttttattggttctaaagtagaccaggagaaaacacccagtgttacagtatttatgtgtgcctttttcataagaagtaaatcctgttttaggatatcgggtctatccaaccactgttctggattataatcacccccatagataaatttatcaatatttaaatcattttggatcattcttcttatcccttctatcagtagtaataaatttgttataaaatgcagtttaaaagttttcctaaatttacgcaataataaatataaaattaggcggttacatttttgcacagcgaactggcaaaaaaatgaatttttaaaattcacaagttggtgtagaatgagggcatgagaaagaggaaggagagtaaggatgagacccaagtatcatatttcaccggaacaaggttttttgaatgatccaaatggtctggcacaatttcgtggaaagtatcatgtgttttaccagtggctgccagatgttgttccacaggggagtaaacaatggcgacattgcatttcaaatgatctggtgcattggacggacgaagggagcgcactacagcctgatgagtggtatgaaaaaaatggttgctattcaggctcaggtattacaacagaagataagtattttctgttctatacaggtaatgtaagggatgctgaaggggggagagaaacatatcaatgtgttgctgtatctgacgatgggaagtcttttcagaaagaaggtcctgtgatctatctgcctgatggatatactgcacattttcgagatccgaaagtatggaagaaaaatgacagatggtggatggttgtaggagcacagacaaaagaattgaaaggcaatgtggcaatatttgagtcgaatgacctgaaaaaatgggattaccggggaaatctgctggatacttcgatggactgggggtatatgtgcgaatgtcctgatgtaatggatatagaacaacaatttctggtagtcagttgtcagaaagaaaccgggtgtaaaggaatcgtttttagtggaaggatggactacgctgaagcaaaatttcaattacaggatgaggggaatttgctggatgaaggattagatttctatgcgccacagagttttgcagatgaatcaggacgatgcattttaattggatggcttggtgcaggtgagttggagtatcagatgagtcagcctacggtagaagaggggtggctgcatgcactgacaattccaagagagttgtttatacagaatggaaaacttcatcagaggccggttaaggaattcgagcgtatcagaagacatgagcgggtgatcgaagcagaaggatacactttcattgatcaggaaacatggagcgtggaattactggcagagcagttatccagtcaaaaaatttcttttaattttgggaatgtattgaaaacttattttgataataacaatttgcttattcaaagaaaacattggaatatgaaaggatatgatgaagtacaagtggagatttctgagcttgaaaatatccaggtgtttttagatcagtctacagcagaaatttttgtgaataatggagaaaaagtatttacattcaaagctttctttacagatgagaaagggattgaaattgaatctgaacaaacaattttgtaaaattttatatctaatttttgattatccgtataaacactatactttcaaatattttgaagtatagaaaagcactcattttaccacgaatttaccataattaaacgagccttgatatgactataaataacactaaaaagacatcattgacacctaaacggtgtcttttttaaaagcagtcaatcataagaccaactgctttgtaaatatagatattaaattgttaagctgagattttacttagatttatctttcactggtttgctattttcatcattttctccttcaagccatgccattatgccaaagttacaaaatggataaattattacttctttataaacttcttgctcacaacgagggcagatgacatattcttcactttttacattttttaattaccgaaatgcccttttttatttgcaaattacatgtcttatagcttaccatgtttttcgtatcttgcgactcttgatattttgttatcctcatctacaaatactactttaggtggatttttctttacctcttctggagtcatctgtgcatagcacattatgattatcttatcacctgtctgaacacatcttgcagcagctccattgagacatatcattccgctgcctctttctcctgcaattgtgtatgtctcaaatctgttcccattatttatatctacgatacttaccttttcatactccaaaattccggcactgtcaagtaagtcttcgtctacagtgatgcttcctacataatcaagttctgcttgaactactgtagctctgtgtatcttcccctttaacatttcaaatgtcatatttaacccccgtttaaccttcgtaaataaagttgtcaatcaatctggttttgccgatataaactgccatggcaactagtactggtgctgtcatctccttgaccggtttaactgaaacagcgtctacagcctgaacataatctattttcgccataggctcagtttcaataagcttaatcatttctgatacaattttatctgtatctttttctcctgcttttgccatatcttctccgagcttaactgctttgcttaaaattagtgccgcctttctctcatctttgcttagatatgtatttcttgaactctttgcaagaccatcctcttctctaactatagggcagcccacaatttcgatatcaaagttcaaatctctaaccattctttttataatcgcaagctgctgtgcatccttttgaccaaagtaagctctgtcgggatttacaatattaaaaagtttagatactactgtgcctacacccctgaaatgtattggtcgtgattttccacaaagttcctctgaaagactttctatgtttacatatgttgaaaaatcgtcaaaatacatattttccggctcaggattaaatattaaattagcacctgcctcctcacatagcatagtatccctttccaaatccctcggatagctttccaaatcttcccctactccaaattgagtcggatttacaaaatcactgacaacaactctatcgttttctgaaacagcccttgtaattaaactcttatgtccttcgtgcaaaaatcccatagtaggaacaagacctactgtaagaccttctttcttccattctttgactataactctcacttcatctacggtttttactattttcatcgttctatctcctaatataacttgttaattacatcttctgaaattttaaatgtgtgttcaggtgctggaaagcttccctgtttagtttcttctatatatgcagcaaaggcttctttcattacatctcctacctttgcgaattgttttacgaatttaggtgtaaagtcagagaccattccaagcatgtcctgataaacgagaatctgtccatcgcagccagatcctgcacctattcctattgtaggaatattaatgctttcagaaataatttccgctaattttgcaggtacgcattccaaaacaatcgcaaatgctcctgcttcttcaacagcttttgcctcttcaatgagtttctttgctccctcttcactttttccctgaactttaaagcctccaaaaacgttcactgactgaggtgtaagtccaatatgtgccataacaggaattgaagcagctgtaatagctttaatctgtggacaaacagaggctccaccttctagctttactgcttgacatcttccttctttcataagtcttcctgcgttatacatggcctcttcaattgaaacttgatatgacataaacggcatatctccaactactaaggcatctttggcacctcttgtaactgctcttgtatggtgaatcatatcttccattgttaccggcaaagtattttcgtatccgagcataaccatgccaagagaatctccaacgagaataccgttaatacctgactgatccatcaatttagctgtcgaatagtcataggctgtcagcattgtaatcttatcgcccttaaccttctgttctttaaaagtggatactgtgtttttcatttttaattacctccgtcatcttcaaatagtcactgtctaaatgtttttcctgtgcaatactgagaagcttttctgaaagcaaaagatatatcatctcatatcccaccttttcctcagactcgtttatccatgctgcctcaatagcttcaatgtgttttgtgatagtcgacaaatcatttcgctcaacaggacctgtgagggcagccgcaactcctttttctgccaatgtgtcggcatttccagtaaacaaaggcactaaggctttctttgcatcttttttatcaaagccgcattttacaagcatttcagcccccacttgaaaaagtccgtttacgagattgcttacaactactgcaccgcagtggtaaagagatttattttccgctcccattgcgattaccttatttcctgctcgctcaaagatactcttaatctcatctagattctctgccgaaccctccacagtaaaataagccttattcaagtgtttccatgattcgcacttatcacttattgcatataggggatgtaccgaatagatatttgcaccgaggttttcaccatcaaaaaaaacggtagatgaaatcgaaccgctgcaatgacaaatatttttatttttaatatccagattcttcatataatcccatactttgcttatttgtccatcaggcacagtaataaacagggtatcactgtcacttaagatattctctatactcttatatagttttgtgttagtaaaatctgctgctgatttagctgattccggtgatttgctgaagtaacctgtaatctctacgccgttttccttcaggtattttccaagggaaaatcctactttccccgctccgataaatcctgctctcatatcgatcactcctttctgggaagtgacaatcatgaaaatctgcatggctgaggtctcgttcaaactgatacaatcctcatggcttaaaaataaaaaatatgtggtatagtttctgttcgaatactatctacccattactatagcacctatttaagtgattgtacagagaaaaaaacaaggcaccactctaactaatttatcattaaagtgatgctaatataaatcgtgttatttagcttttctgtatttaatcattttcacaatctgaattatcaaagtcgggataaaaatataaagcatgacaaaacacttcttcatttttcgcttgattacccaccacagaaaagaaagaaccctgtaaagagccttaccaccattggtggtgctttgcactcttgattgggctttttgtttgctgtatctttcatgcaagaggaaaattaaagccctctattccatttctctgaagatttggaaaggaaaggtgagtaatgatggaacagaccatgaattatgtaaaaccggaactgattgttgtagcagtagtactgtattttattggaatgggattaaaacagtctcagacagtaaaggataagtacatcccacttattttaggcggtattggcattgtattgtgtgcagtgtgggtgattgcatcttgcccgatcagtaccggacaggagattgcaatggcggtatttacagcaatcgtacaggggattttagtggctggtctgagtacatatgtgaatcaggcaattaagcagatgcataaggaagaataaaatagattgaaccatgaagaaaagcatggtatgataaaaaacagaacaaccgtgttacagggtggctgacctctattctacatagaatggggtggtgctgatggacaagaaaccgtttgattttaaagaccttatggcatttggaatgttcattctggcattgctgacattcgtatttacgtttatcagataatgttttgagcatagaaaaaccaccctctaaactttgaccgagtgccgagggtggcaattctatgatttgtcactaatgctatgaggtcaaccccttgtgggcggttgttcctttgaatataatataccatttttaacaaggttattcaagaaaaaagtgaaagtgggtggtttgcatggcagtattaaaagcgtcagataattccgaaatgattatttcttgtaaatgtggatgtgatgatgggcttaggatcaaaatagaaaaagatgaagaagattattgttttatgacttatttaagcggaaactggtataaggagcaggcgggatttattaaaaagttaaagaaaatttgggctatcatacggaataaggatttttattattctgaaattatactcaataagaaagattgggaagagtataaaaagtggatcaatgaaaaatgaaaaaatattatcaagagggcttggaaacaggctctcttttattgcacaacaggaggtgagaacatgagagaacagaacgaattcggaagaataacagcggaagaactggaaaaagcatttgaaacggaagaacaggaggaagagaaagaatgaaaattggcttaaggggagggcattccccaaattgtaaaggtgcaataggtctgatcgatgaacaggcggaagtgcggaagatctacaacgaacttgtaccgatgctacaggcagtcggacatactgtgattgattgtaattccaacgcatcgaatgtgtctggtgagttgtctgacggcacaaataaggcgaatggagcaggatgcgatatctatgtcactctgcacatgaacgccgcaggagcggcatcagcagggggcacagaggtgtggttatatgatgcatctaaccagaccatgaacacgatcgcaagcaacatctgtaataattttgcaggaaaaggatttactaaccgtggtgtaaagtacagttcgggataccatgatctgaatgcatctaatatgcctggcatgatcgtagagacattattttgcaccggcacagatgatgtagcacggtatcgtagtttaggcacaaaaggaattgcggagccgattgcaaaggcaatcgacagtagagcgtctgcatgcagcgaacaaaaaaataaccagaatacaggaatcgaacaggaaggagaagaagagatgaaatgtttatttacagtagagggaaaaggtgcagtgtattattttgacggtcaaaaagtaataacattgggtcatccagacgaattaaaaatcatccagcagatttacaaggacaacaatggtaaggacatgccgtgttacaagtggagtcctaaagcgccatggtatgcaaggctcatgtcggtaatttacagtaaagagaccacatctatttaataaaaatcccctcggagatcgttctctgaggggtgaatattgtatcatctttcgtgttgcatatcgtgttgcatatcagtgtaaaatgcaacacaaattataaaatattatattttttataaaatagtatatccgataaagccaataaaaaagggaatctgcgatttctcgccgttcccttcaaaatggacctggcgggagtcgaacccgcgtccaaaagcctatcccatgtacttctactatcatagtcagttctttttgattcccccgactgcacgaaaacggacatccttacagcttcggtagcttcatgatacgcctgacagctcaaagcttaactgccatcgtttctcacaaaagtcgatgccagattctcaaggtgtgagtgccctgaggctgacaagcagcaactaggctgctaacgcgtaattttcgtctgcgtttaattttaagtttgcgatttgacgcatctgcctgcggatagcttctccatcttcaagacccctgtcgaaaccagtacaagccctgaatcatacggtttatcaccgttctacttataatataggagaatctgataaaaagtcaaggggaaacttgtaacagatttggatttttcgtttattttctggaaaattgtgataagatataaaataggttttgaaaaaacaaaagcagcgggagttttgattgaagaaaggggagagcatatgccgacaacgtatacacattatcgatttggaaaagatgttctggatgcacttccgagaagaatccggacggcaatggagacaaacagagaattatttgacatcggtctgcacggaccggatattttgttttattatagagcgctgattcccaattctgtgagcggacagggatatggaatgcataagcagatggcggatttgttctttgaaagggcgaaaaaggtaatcgccgatgcagatgacaaaactatgagcagggcttatatctatggctttatctgccattttgcgctggacagtgagtgtcatccttatgtagaaaagatgatccagaaaagtggaatcggtcattcagagattgagatggagtttgatcgttatctgttgacagaggacaaatttgatcctttgacttacaggcagacggagcatattcacgctactgagaaaaatgcaaaggtagtcgcgccgttttttgatcatgtgactgcccagcaggcgagaaaagcactgaaagggatgcagttgtgccataaagcgttgtatgcaccgggaaaaacaaagagaaatctgttgtttggagcaatgaagacagcaggacagtatgacaagttccatgggctggtgatgagtgaagaaccgaatccaaaatgcagggaatactgtctgttattgaataaattgtatgagggtgcaatccctgtggcagtagatttgatcatgaagtatcagaattatctgcttggaaccggtgatcttccgaaacggtttcactgtacgttcggggcaggtgacaagtgggaggaactggtgctgtgagaaagaaggcatggacgtttggcattctgacaggactgctgttgtctgtgctctgcccgtttacagtacaagctcagattgcatcaccgcaggcgtttcaaaatctgtcctggaagatggtgaaggaagagtcgatcgaaacagaacatggagtagtacagtccatatgtgcgacagacgattacatcgtttgtctggaaaacgtgctggatggaagtggacagccggatattgtaaaggcatactatcgcaatgacaaggataaaaacggcaatccggtcgagcagtattcccttgcaatgcaggtacaggagacagattatgaacatgccaatggaatggcatataatccgaataccaatgagatcgcggtcagtctttataccagttatcagaaggaaaacagaggatgtctttttatcatggatgcagatacactgaaattcaagcgcaaggtgaaagtgacagattcctataatatcctgggaatcggttatgattcggcaaatgacaggtatgtgatccagacaaatgcagatggaggatatcagtttaagattttaaataatgagtttcaggtcacagaagacctgggagatctgggcggttatgcaggggatggaaattatcaggatctgtgcgtgacagaagattatgttttgaattttcctctgacactgttctcgggaaatggtgattttctgaatgtatactctctttctgaaaagaaactgctgtattatgaaaagctggattttcagtttgaggataatgtcaccagtgatgagccggaatcaatctgcgagttagatccgggagtctttctggcggttgtgaatgtcacattatctgacgggacaaagaaggtcagattgtacaggatggaagtgccttaccagtatgaggttgaagtaaaggttcaggttggggaggacaagccgtcagtttccaggaaaacagtgctgcgcggagaagcatttgaggcagattatccggagaaagaaggatacagaatcgcttcagttaagattgataaaaaagagatcgatctggaaaagtatcaaagcaaatatactttgaaatccgtacagggggcacatacgatttctatcgtttatgaaaagaaactcgcaatgtggaagatcatactgcctgtttgtgtcggagtggtacttttgtcagcgggctttgtcttttacttaagagtcctgcagatacggcggatccgcaggcgcaaactggaagcggaaaaacgccgcagagcgcgaatcaaatggcacaacgacgagtggaatatcgacgaaatttattgaattttcagaaacagttcataaaaaaagaactgtttctttttttgcctcatgctataataaagcggaaaggatgggtaatgtatggacacatttgtaaagttggaaaatattacaaagatttatcatatgggagaagtggagatccgggcagtagacggaattgatttctcgatacaaaaaggtgaatttgtagtgattgtaggcccaagtggggcaggaaagacgacggttttgaatatacttggcgggatggatactgccagtggcggtcggatcacagtggacggtcaggatattacaaagtacagcgagaggcagctgacgggataccggagggacgatatcgggtttgtgtttcagttttataatctgatcccgaatctgactgctctggagaatgtagagatggcgcttcagatctgccgaaatccgctggatgcaagagcagtattaaaagaagtcgggctggaggagcgaatggataatttcccggcacagctttccgggggagagcagcagagagtttctatcgcaagagctctggctaaaaatccaaagcttcttctatgtgatgagccgaccggagcgctggattataataccggaaaggcgatcctgaagcttttgcaggagatgtgcagggaaaagggaatgacggtgatcgtgatcacacacaactcggcactggcaccgatggccgaccgtctgatcaagatcaaaaacggaaaagtatccagtatgaaagtaaacgagaatccgatatccatagatgagattgagtggtagggggatgagatgagaaaaaaagcactgcgaaaagatttttatatggaaatacgaaagagcttcggaagatttctctccatttttttcattgttgccataggaactgcgtttttttcgggaatccgggcagcggaaccggatatgcgcttatcgggagacgcgtattttgaccaaagtaagctgatggatctgcaggtagtcagtacgatggggctgacagcggatgacttgcaggcgatacgggaggtcaagggagtggaacaggcacagcctgtctattccatggatgccttatgtgatgtggacggcagtcagaaggtcgtacatattttttcctctcaggatgggataaatgagctgaaggtagaaaaggggcgtatgcccgagaaagcggacgagtgcgtggcagatgcagattttctggcatccagcggatatcagatcggagataagatcacatttctgaaggatgaggatacggaagtgacagaagaactgacacagagcacctttcagatcgtgggaagtgtgagcagtccggagtacatttccttttccagaggaagcagtatgatcggaaacggaagtgtcagtggttttatatcggtactttcggaaagctttcagatggatgcgtatacagaaatttcaattcaggtgaaaggcgcaaaagaagagactgcttttacaaaagagtatgataacctggtggatgagacgaaaaagcaggtggaagcgatccagtcggagcgtgaggatatccgtcgggaagagctgatgcagcagatggatcagaagcaggcagaattactggcagaagttccgccggaggcgatggaaattgcagcacctcagctccaacagcagatcgagcagcaaaagacaagcctggaacagggaaagtggtatgtaaatgacagggaagatctgacagagtacagtggatacggagagaatgccgaccgaatgcgggccatcgggagagtatttcctgttttattctttttagttgcggcgttgatcagcctgacttctatgacgcgtatggtggaagagcagaggactcagatcggaacactcaaagcgctgggatattccaggcgctccattgccggaaaatatttgggatatgcattctgggcgacagtgggaggctgtgtgtccggtgtgctggttggagaaaaaatccttccttatattattgtgacagcttatggaattatgtatcctcatatgaatacggctgtgattccatataacctttattatggagtttcagcgtcactgacggctctgttgtgtacgatgggagctacattgttctcttgctataaagaattgagagaacaggctgcggaattgatgcgtccgcctgccccgaaaaaaggaaaacgagtatttctggagaagattccatccttgtggagccagttcaattttatctggaaggcaacaatccggaatctgctgcgttataagaagcggttttttatgacagtgtttggaattggcgggtgtatggctctgcttttagtgggatttggcctgcgggattctattgttgatattgcgaagcttcagtatcatgaacttcagctctatgatgccaatattattttaaataccagcgccagtaagcaggagcagaataatgtggaacaggagttgtactggaatgatcaggtagataagactgcggtgggatatcttggtcagatgaaggtaaaacatgggaacgaagaacaggaagtatatcttaatgttccggaagatctgcaggactttgaagaaatggtagtatttcgtgatcgcagatcttatacacagtatgatctggagacggaaggggtaatccttacagagaagacagcgaaacttctggaagtaaaggaaggggatacgatcacgctctgccagacaggaaaagaagatgtcaaagtaaaggtcggaaagatctgcgaaaattatatcgggcactatctgtatatgagtcctgaaatataccagtctttgtatggggaagagccgcagtataacagtgtgtatttccagatgaaaaaaggatatgaagatcagctggagattttgggagaggatatcttgaaaggagaaggagcactgaatatcagctatacagattccattgaagatcagctggatgacatgcttggaagtctggatattgtaatggcagtgctggctatttcggcagggcttttggcatttgtcgtattgtataacctcaacagtatcaacattacagagagaagaagagaactggcaacattgaaggtacttggattttatgataatgaagtatcggcatatgtatacagggaaaatatgatactgactgtaatcggcggcgttgccggtattattctcggaagtattctgcaccggtttgtgatcgtgacagtagaagtagattctgcgatgttcggacgcagtattgaaatgtccagttatggatacagttttctgattacacttgcattttctgtatttgtaaatcttgtcatgtattttaaactcaaaaagattgatatggtggagtcattaaagagtgtagaataaattcagaaatttcacagtacggacataaatctttgatatgatgaagctaaagagtggttgctgttcacagtaacaaagagtggcaagatgaggagtgaggaaaagatggataagacgaaaattttagtagtagatgatgagagcaggatgagaaagctggtaaaggattttcttgtgaggcagggatataccgtgttagaggccgcagacggcatggaggcaatggactatttttatgaggataaagatattgcgctgatcattttagatgtgatgatgccgaagatggatggatggcaggtttgtcgggagatccgtatgcattcaaaggtgccgatcatcatgctgacggcaagatcggaagagcgggatgagctgcagggatttgatctgggagtggacgaatatatttccaagccgttcagtccgaaaatcctggtagccagagtagaagcaatccttcgaaggacgcagggaagcggaaacacagatgagatttcagccggcggaatcgtggtggacaaagcggcacatacagtgatgagtgatggatcaccggtagatctgagttttaaagagttcgagcttttgacatattttatcgagaatcagggaattgcactttccagagaaaagattctgaataatgtgtggaattacgactatttcggggatgccagaacgattgatacccatgtcaaaaaactcaggagcaagctgggggacaagggagaatatatcaagaccatctgggggatgggctataagtttgaggtagagtaatgaaacattcgatcaaaaggcagatgaccgtagtattcagcggactgatcatttttattctggtcatgatgtttctcgtatattccaagtgtctggagacatactacatcatgcataaggagagggaccttctggaagtgcataagacagtaggaacggcactggcacagggaaataaggaagatgagcgcgcgtggaaagtgatggagcgtacgaatatatccatgcttgtcttacaggataatcaggtgattttctcgccgagaggagatcaggaacagcttgtcagccagctgcgcggatatgtatttaatcagaatcaggatgaaggagagcttctgaaaagtacggacaactatgaaatacgaaagatcagagatccggtagcaggaattgactatctggaaatgtggggaacctattctaaaggagcgatctttattctgaggagtccattggacagtatctgggagagcacggcgcttgcaaacaagctgctggtctatgtcggaattgcggcactggtgctgggaggaattctggtatctttgtttgcgagaaagattacagagccgatcacacagcttgcttccctttccagacggatgtcagagctggattttgacgcaaggtacaccggaggtggagaggatgagatcggaacgctcgggaataatttcaatattatgtccgagcgtctggagaagacagtttcggaactgaagcgcgccaataatgagttgatgaaggatattgagaagaaagaaaaaatggaagatatgcggaatgaatttctgggcaatgtttcccatgagttaaaaacgccgatcgctttaatccagggatatgcagaaggattgaaagaaggcgtcagtgatgatccggaaagccgggagttttattgtgatgtgattatggatgaagcttccaagatgaatctcatggtcaagaatcttctgacgctgaatcagcttgagtttggaaatgatgaagttatattcgaacgttttgatgtctccaaactgatccagggtgtgatccagagctgtgagatcctgatccagcaggccgatgcgaagattgattttatcggtgagagtccggtctatgtgtgggcagatgagttcaaaacagagcaggtgatccgcaattatctcaccaatgcgatccaccatgtggacaatgagcgcagaatcgaagtccgtgtcctgtcaaaagatgacattgttcgggtgacggtgttcaacagtggtcatccgatccctcaggaggatcttgcaaagttgtgggacaagttctacaaagtagacaaagcacataccagagagtatggcggtaacggaatcggactgtcgatcgtcaaagcaatcatggagtccttccatcagaaatacggggtcagaaactttgacaatggtgtggaattctggtttgagctggacgggaaatcagctttacatgaagaacaaaatgcgataaaataatctgcaaatgcaggcatacaacgtgccaactggaaacaggaggtgttttgtatgccttttctcataggaaagaacgttcagatgaaaggagcacatacatgacagtaattatcgattatggcgcaggaaatatcaaaagtgtagaaaaagcactgctctctctcggacaggaggtcgtgatcacagatgatgcagatacgattttaaatgccgaaaggatcatacttcccggtgtcggcgcgtttggcaacgcgatggcacagcttgaaaaaaccggactggatgaagtgatccgcgaagctgtaagaagaaaaatcccgtttcttggaatctgtcttggtcttcagctcttgtttgaaaagagtgatgaagctttgggagtgaaaggccttggggttttaaaaggggaagtgaagaagattccggcaaaaaaaggattgaagattcctcatatgggatggaattctctgcattttgcgcataatggaaagctgtttcagggaatcgaagagggcacatatgtttattttgtgcactcttattacctggaagcagaagaagagtcgatcgtgaaagcttctgccgaatatggggtacatatccatgcttccgtggaaaaagaaaatgtatttgcctgtcagtttcatccggaaaaaagcggtgagacaggtctgaagatcctgaaaaattttacagaactgtaagggggaagaggcgatgtttacgaagagaattatcccatgtctggatgtaaataacggacgagttgtaaaaggcgtgaattttgtggatttaaaggatgccggggatccggtagagattgcgaaagcgtatgacgcggcaggtgcagatgaacttgtgtttctggatattaccgcatcttctgacgggcgcgggacagtgatcgatatggtacgggaagtggcaaagtgtgtgtttattccgtttacagtcggcgggggaatccgcacagtggaagattttaaagcactgcttcgcgagggggcagacaagatttccattaattcttctgcgatcgccaatccgcagctgatccgggatgcagcggataaatttggcagccagtgtgtagtggtggcgatcgatgccagaaagagagaggatggaagcggctggaatatttataagaacggcggacgcgtggatgtcgggatcgatgccattgaatgggcgaaaaaggtggaaaatctgggcgcaggagagattcttcttacaagtatggactgtgacgggacaaaggcaggatacgatctggagctgaccaaagcggtggcagagagcgtgtccattccggtgattgcatccggcggtgcgggaatcgtggagcatttcaaagaggcgctgacagacggcggcgcagacgcagcactggcggcatccttgttccactataaggaattggagatccggcaggtcaaagaatatttgagggagcaggggatttccgtcagactaatataaaacaaaagagaggaagtgaacatcatgtctggaatcaatggagactggtatgaagcattaaagggggaatttaagaaaccttattataaaacattatttaatacagtcaatgaggagtatcggaccagacagatttttccgccggcaaatgatattttcaatgcgtttcatctgacacctttaaaagatgtgaaggtagtgattctcgggcaggacccgtatcacaattttaatcaggcgcatgggttgtgcttctcggtgaaaaagggagtgcaggtgcctccgtctctggttaatatttataaagagctgcaggatgatttgggctgtaccattccgaaccacgggtgtctgacaaaatgggccgagcagggagtactgatgctcaatacggtgctgacggtgcgggcgcatgaggcaaattcccacagagggatcggctgggaagaatttacagatgcagcgatcatggcagtcaacgcacaggatcggccgatcgtgtttattctgtggggagcgccggcacagcgcaaaaaacggatgctgaacaatccgaagcatttgatccttgaggcgccgcatccgagtcccctgtctgcatacagaggatttttcggaagcaggccgtttagccagaccaatcagtttctggaagaacatggggtgacaccgatcgactggcagattgagtaggaatgtcaggaattcagatatagctgattcatatgatgcgaaatggttgcagttgtcaaggagagcctttttgccagatcactctggtaagtgggttcttttttattacaatcttaagaaaattttaataatttaccaagcagaaatttttaaattcttttatataatgtagtgcattgggaggaggtatggtgtgaaaaagatcattgaagtaaagaatttatacaaactgtataagcttggagattctgcagtgcgagcactcaacggagtcagtctggagatttatgagggtgaattctgtgccattgtaggtacttccggctcaggaaaatcgacgatgctgaatatgctggcaggtctggaaaaacccacaaaaggagaagtcattatagacggacagcatattgagaatttaaaagaagatcagcttgtcagattcaggagagaaaaagtaggatttatctttcagtcttttcagcttttaggcagtatgaatgcgctggaaaatgtggcgcttcctttgagtttccgcggtgtgccgaaagcccaacgcctgaaaaaagcggataagatgctggatctggtcaagctgaaaaagcataaaaagcatctgccaaaccagatgtccggaggacagcagcagagagtcggtgtggcaagagcactggtggtagatccgaagatcatttttgcagatgagccgacaggaaatctggattcccgtacatcccgggaagtcatggcgctgatgcagcaggtggtcagagagcagaagaaaacactggtcatggtaacccatgatgatcatcttgcgggatatgcagatcgcatcttccatattatagacgggaaaatcgtcaaagtagaagacaatagaaaaaaagcaggggaacatgcagagcagggaggaaatgagcaatgagacgatggaaacaggcaatgggagtgatcgtaagttttgcactggtggcggcaatgctgcttccgatgagtgcactggcaagagagcaggcgattcccacgatacgactgacactcggaaacggacagacaacaccacagtatgcagcaggagagacaagtgaactgttgattcgggtctggaacaagggaacacaggatgcggggaatgtaaagatttctccggtacttgatgatggggcgagctggccgtttgaaatcgccgatatgaacaacgaactggagctgggaacaatcccggcgggacagtacgcagaagcagtctggaaagatttaaaggtacgcgatgatgtggagacaaaatcatacaaactggcgtttacagtgacttatgatgatggtgagaaccaattccagagtacaccgtacatctttgcgaagacaacggcaaagccggaggaaaaaccagatgacaataataacaataacaatgcacagccggaaacaccgcaggagccacagggcggcggggaaagtctggctggtggagtaacaaacacggatccgatcatctccggaggaggaagtggcggtggaacttctactgcttcagtaccgcgagtgatcgtgacagggtttaatacagatccgggcgatgtcaatgcgggaagcaactttaaactgatcattcatttgaagaatacatcttccacgacagcggtttccaatatgctgtttgatcttcaggcaccggcttccggaacagacgcagcagcagaggcgccggcatttttgcctgcatccggttccagctcgatttatctggatggaatcccggcaggagggacaaaagatatttccattgatctgaatgcaagagcagatcttgtgcagaaaccatacagtattgcgatgtccatgaaatatgaggacggcaatgccacacagtttgaaagtgcttccagtctggcaatcccggtaaagcaggcagccagatttgaattgagtgacattgaagtggcaccggaatccgttgctgttggagaagaagcaaatattacctgcagtctttacaataccggacgaatcaagctttacaatgtaaaagccaaatttgaaggggaaggtctgacaggaaaagaagtatttgtaggaaatatagagccgggggcaacaggttctattgacggaatcgtaacagcaaatcaggagatggatgagacgaaaaagtgtaaagtcgtgatttcttatgaagatgaagccggaaagagtgcgagtatggagaaagaatttcctctgacagtaacacctgcacagaatcctgcggatatgatgccgatggaggcagaagcaccggaaaaaggacttccggttgttccgatcgtgatcgcggttgttgtggtggcaggaattgttacagttgtattgctgcgcagacataagaagaaaaaaatggcggctttggaagaggaggacttgctgaatgaggtggatcgatttactgaggatgagtagcaacagtctgaaacgaagaaaacttcggacgtttttgacagtgctgggtgttgtcattggtactgcatctatcgtagtcatgatctcgctggggcttggacttcaggaatcgatgtatcaggaaattgagcaatccggaggtgttacaagtctgacagtgacaggaaaaggttcttcccagatgggcggtttctatatgggggataccaacaacgaagaggaagcgaccaaatatacaacagatgatgtgatcgaacagattaaaaagctggatcatgtggcagacgtgcagccggttttgtcaattgatgcacttttaaagaaaaacggatatatcggatactgtcctctgacaggtatgacagaggaagggctgaaagatctgaacatcaagctggcaccgggcggaagccttccgaaagcaggcagtgcggaactggatctggttatcggaaataatgtcattacaaacttttcagaagaatcaacaggaaagatgtattgggagacaggagtgcttccggatatagatctggctcatgattcattgtttttgatcctggatcaggaggcatattattcgagtcagtcgccatctacgggagcaacagcaccggagagcggtggagacggcaagacacagcagagtacaaagccgccgaaaaagtatgtcgtgcgtgcaagcggaatggtggaaggggatgtggatacatataatgcaaattcctactcggtgtattgtaacctcgagacattgaaaagtatgctgaaaaaggagttcagcggcagagcgattccgggacagccgactacaaaatccggaaaaccatataaggattttgtatattcctcactgaaagtcaaggcagatgacattgacaatgtagacgcactgtccacagaaatccgaaatatgggattccaggtgactacaaatgtggagtatatggacagcatgaaaaaacagtttgcaatggtgcaggcggttcttggtggaatcggtgccgtgtcactgtttgtagcggcgatcggaattgccaatacaatgatgatgtccatttatgagagaacaaaagaaatcggtgtgatcaaggtattgggatgcagcctgcgcaatatcaagcagatgtttctgttagaggcagcgtttatcggatttatcggcggactggtcggaaatatcttaagttttttgatctcttttgtgatcaatgcgatcgtggccagcagcggggcaatgggagtggaaggaaatatttcctatattccgatctggctggcagcggcatccatgatttttgcagtatttgtggggatggcggcaggatatttcccggcacttcgggcaatgcggctgagcccattagcagcaatccataacgaataaaggcaaattattaattcaaatatttcgctattgcagaggatgtattttttatgtgcgaagtttgagtataagaaaagcaggaatcagtgcagttcctgctttttgaaatcataagtttcgggatatttctctgatatgcggaaggtaatcggaatcaaggcggctaaatactctgccagaatttcccgacagccccttttacgtaataagaaacgatggagttttcaaggggaaaatgaatttcaactttctctttttaaataatcgtgctataatgcagaaaagcataaaaattctggttttctaagcggaaccataccgcatcttttattctaagtcatatcggaaaatctctatgctttgatttcaatctaaaacagcagagaggtttgagggaaagatgccgtattggaaagcctcctgcagctatttttattcaaggaggtatttatatgaaccagacaacacagacgcagcccgtaaacagactgtacaaatcgaggatttttgccatgctctacagtgacaggaaagatctgctcgatctgtacaatgcggtcagcggaaagcattacgaagatccggaattgctggaaatcaatacactggaaaatgcaatctacatgtcgatgcataatgatctgtcctttctcattgattccagactttccctgtatgagcatcagtccacctacagtcctaacctgcccctgcggtatttgttttatatctcggatctgtattccgggatgacaaaagatgaaaacctgtatggtacgaaaaggattcagattccgactctgcagtttgtgatcttttacaatggaagtcaggaacagccggatcgaaaaattttaagattgtctgatgcgtattgcgtcaaagaagaatatccggcattggagctgactgcggtgatgctgaacattaaccgcgggcataatgaaaagttgaagggaatgtgcaaatctctgaaggattactcagaatatacagcaagagtgcgggagtacgcccaggtaaagccggtggaagaagcagtggaacaggcaatcagtgagtgtattcaggaagggatcatggcagagtttttgaaacaaaacagagcggaggcgaaacaagtgagtatttatgaatacgatgaggaaaagcatatgcgacaggagcgggaagcgtcctgggaagagggcagagaggttggaagagaagagggacgagaagaaggacgagtacaagggagagaagagggaaaattcgaagggaaaattgagcttcttagaatgcagattcaaaagaaactggtaaaaggaaaatctgtttctgagatttcagaggaacttgaagaagaggaagatgttattgcacaaatgatccgagagatgggagaagagagggcagcggacaagcatctgcccccaaaactttcccattgagtttacctgacgatgatccagtctataccctgaaaaaagtgatggaggagttagaatatacatcgaaaagaaaaaatacaaatctcctgtagaagatcaggtgtcaaaacactgattactacaggagatttgtattttaagatttagagcctaaaaattggcattaaccgacagcccctttctttggattttgattatagcgtatataggtatggattttcaagcactgtggataaagaaaaccgatggtatgaaagtggttgacatgagtattctaaagtcatagaatataaatatgaaaaagcgtacgattttatgtacggaaatgaggtggaattatgttggcggtgaaaagtatggatgtaagagggcattttaaagagtggtgtgataaggttttcagcggtgagacattgattatctcacgtcctaagaatgaaaatatcgtaatgatttcagaaacagagtataatgaaatgatgagaataaaacgaaatgtagagtatcttacacgtattgacaaaagtttggaggaattaaatgcaggaaaaacaatgtcattttcattggaagaattaacagaaatggaatcagagaatggatgaagctaacaggcttgtttatcagatagatgaattacaaaatataaaagtcatatcatgcagaggacactatgaagagtgatattgagaatagactaaaaaaggagaaaaacaatgtttcgattatgggcaaaagaatttaaagacaaccggatgctgcgggacacggtgatctgcgatgattcggatgagacacgcacacataaaattttcaatgcgctggaggaaatctgctatgagtttgatctcagcaagccgatctggttggatgtgacgattgcagaatttaagaagcatgcaaaggcaagattttatcaggataattttgtggattccattgattttgattatctggagatccagatcattgaggagtagcatatgaataagaatacattcagcaatcgggtaacatggtacaattttatactctgtatttttgttgtttggattcatgcacagaatacggatctgtttacagaagtggtaatgatagagggaaagccgttgtttaatcagattgagcagacgatcgtttcggatatcgcagtggtcggtgtggcaggattttttctgtgttccggatacctgttttacagaaattattcctgggggaaagtgctggaaaaatataagacgcggtttgtggggctgtttatcccgtatgtgatctggacactgctttactatttcattcatgtaggggtgtcctatatcacacctttgcgggctgtgttcaatgaaccaccgatcacagtaacctggaaggggatcgtggatgcggtactcaattacagatactgcgcatttttatggtttttacagtttctgatcctgcttgtggtgctctcccctcttatttatctgctgatcagcaataaatatatggggatcgtggcgatcgttctggtgcttgtcattgacagtaccggtatctgtggagatctggcattcggaagtgtacaggcgcaggcattttgcaactggctgtttatttatatgaccgggggatatatcggaattcatggaagtggtgcagtagaaagtaaaaacacaagctggctgctgcttttggcgagcgtgattcttgcggttctggcgtattattttttcaaatattcgccgagtatgttcaccaatctgatgtatcttctgttgtttgcggctgccttgtggtgccttgtctgcaagctgccgcttccgatggcggcaaactggcagaagcatacatttattgtatacatgacgcattttctgatcgtgcgtgggatgaacgtgttggtgagtaagtatctttccgcatctatgtggccgggaatccttttgtttttcctgcttccggtgctttgctttgcgctgacatcactgttttggcggatttgtggaaaaggccagtccttcgtgtggaaaatgttgtccggaaaccgatagagtgtggaaaactgattacttatgccggtaataaaatacagcgacctgtgttctgtcacgcagatccagtttatcgaggatggaactcaggtaattccggacggttccttcactgagaaacaggcgagaagcaatttctttgttactgagaccgtcagcgatcaggcgtatgatctcaagctcccgttcgctgatgtcgtagtcttccaggtggaatgtcggaccggtttgaagaagctcgggaatcttggaaatgatttcatttccgaaaacagtctgtccggagtgaaccgcgtgcagtgccgggatgaggctttcgtaatcctgtttgaggagatagcctttcgcaccaagttttaatgcccttacaatatactcatcatcggagaacgtggtgagaagaagaattttcgcatcgggaaattcttttaatatctcagcggatgcgtcaagtccgctgagttctttcattctgatgtccataagaagtacatcaggtctgtatgttctgaataatcttactgcgtcttttccgtccgtgcctgtggcggaaacggtaatatcaccgctggcttccagaatggttttcagtgcgccggagacaaaaatatcatcatcaataattacaatattcataaccttaatactcctgttcttttgggatagtgataaaaaggcggaagcctttttgtattgtgatctgcaggtttccgttcaggattttgagccggtcgttcatattggaaagaccgatccctctgcttgagaataatgcttcccggttgttttctgagagggaaagcccttcttccagggtgccattgtcttcgatacaaagctgatacagtgcagggtgttcccgcatggtgatctgtaccagagtggcattgctgtgtctggccacgttggaaagcgcttcttttacaatgctgataaaacaatatttgatttcccgcggaacttcaaatcccatgtcatagttcagggttgcaggacagaacgtaaaatccgaggtcaggctttcggctgcttctttcagattcagtgattcgtcatgaagatcgtggacactggtgcggatgctggtcattgcctgattcagagaatgatccagatcatccagaaccggtgagagtgcatcggaagcattgatggccttggcggcgcctgttatcaggatggagcgggagagcagatgtcccacattgtcatgaatttctctggcaatccggtttcgctctttcagtgtggccgcataaatttcgtaatcctgtttttccgcaagcatcctgtttttttcttccagaaggagatttttttcggtactgtcgtctcttagtttcatgagactttgttccagacattctgcggcttctgtgcggttttgcagacaaaaagccaggagaaacaagaagattccccagaaggaaaaaagaggaatttgttttccttctgaccagatgccgtaaaagtaaagaacgctgcatacaagagccggaacatgatattgatccagaaggagtacataaaatactgcggggaaaaacagaaacagctccgggatcagaaaagcggccgctataaaagcggtacacagaaccaggtgaagcctttttgactgtgcaaaataactggtacagcacaaacacaggcacaggagaaaggcgcatacaaaaaaataatccagttttctgaaaaaaaggaaaaagaagccggacaatatgaataatccagtattttcaagatggcgcatcgtacaattcctcccggtaaacagatttatctttggatatcctcagtataatacaaaatcaggatccgggcaaaggaaaaggcaaaaggaaagacggaaagtgacatttgtcatgtggggaaatgacagcgttcactaccggatggaaagcgggcagtttataatttgggtatcagctgtaggaaaagaacagcgttcgatcaaacaaggaggagacatatatgggtggaacagagcgttttcaggaaaatggaatcatacagatagaaaatcttgtaaaaagatacggttcttttgttgccctggatcatttgaatctgaatgttcgggaaggggaaattttcggacttctgggaccaaacggatcgggtaaaacaacggtgatcaactgtatgctggcacttttgaaatatgataaaggcagtatacggatattcggtcaggagatggcaccggatcattatgaggtgaaaaagcagatagggatcatacttcagaatgtggcggtttttgatgaactgacagtatatgagaatattgattatttctgcggactttatgtaaaagagaaagaaaaaagaaaaagtcttgtaaaagaggcgattgcttttgtagggctggaggactaccaaaagacaagaccaaagaagctctccggcggactcttaagaaggctgaatattgcctgtggcattgcacacaagcccagattgattattctggatgaacctacagtggctgtggatccgcagagcagaaaccggattctggaaggaattcaggagctgaacagacagggagcaaccattgtttatacctctcattatatggaagaggtggagcagatctgcagcaggattgcgatcatggatcatggaaggagtattgctgttggcaccaaagaacagcttaccgggatgatcaaaacaggggaaaaggtgacgatcgaggcggtcgtactaagtgaggagcagcttgcaggaatcagagagctgccgcatgtattcgctgttgattatcaaaatgacattcttactgtacagtgtacaaaagccagacataaccttgtgcggatccttcactgtctggaggagcaggggactgcttttggaagagtctactcagagctgccgactctgaatgatgtatttcttgagattacaggaaagcagcttcgcgattagagggggggagagagatgtttcatttgataaaatacagtgtgatcagaaaagtaaagaatttcagtatgttattttggccctgcatgtttccgctgattctcggaacgctgttttattttgcattcgggaacatttcagagtcagattttgaaactgttcaggctgcttttgtggaagagaatccgggagattcagtatttccgtcattcctggaagaagtcagcaaagaagaaactttgatccatgtggaaacaatgacagaaaaagaagcgttgcagaagcttgaggatcagaaaatctccggaattttttatggaacagaaacgccttatctgaaggtgggaaaaaacggacttgctcagagtattatgcaaagtcttctggagagctatctaaatggaaaggatacgctggaaacagtggcagatgtacatcctgaaaatatgaaaaaggcggttgccgcgatgtcggactatcaggaactggtagagaatgtttccgcaggcggcagaacgaccaacgggaacatgggattcttttatgcgctggctgcgatggcgtgcatgtacggctgttttatcggtcttggttctgcgatgtggctgcaggcaaacctgagtactttggctgcgagacaatgtgtatctccggtacacagactgaagatgatacttacggagctgatctcttcttttatacttcattttttaaatgtggtgattttaattgtttactgcaaatatgtacttcagatggaatttcagggaagtatgggaaaaatgctgctgattgtggcggcaggctgtgtaatcggagtgagtatgggaattctggtgtgcagtatcggcaagttcagcgaggggatcaaggttggaatcatgcttgggatttctatgacaaccagtgtgctggctggtcttgtgaatgtacagataaaacatgccgttgaccgtgcattgccccttgtaaacaaactgaatccggcggcagtaatctcagatgctttttactgtattaatgtgtatgacgatccggtacggttcagaaatgacattcttacactatttatcatgtgcgcagtaattcttgcagtttcatttgtggttgtcaggagggaacgttatgacagtatttaaaggatacatgaagattatcggtcagaacagaatgttgatactgctatatgttgctatttttttcggatgtacgcttctgtttcagtccacagcgggaaagtcagaaacaagttatcaggcggaaaagctgaatattggaattgtcgatgaggatggaggaagtcttgcagagtctctgacagagtatcttggaaatctgcatcatctgattcctgtagaaaatgacgtttctgagatacaggaaaagctgtattacagagaagtgtattatgtggtcagaattccggagaatttttatgagaaatgtatcaagggagacgaaaaactttctgtgacaaaaattccggatacatattcgggcagttatgtggatcagcagatcaacagctttctgaataatgccagaacgtatcaggcagcaggatttacggaggcggaagcagcgagtgctcttgagaggacacaaagcgtgaaggtaacctttttaaaggatgggaaaaacacagaagatgctccgtatgtatattattttcggtatatgccgtatctgtttctggcattatctggatttgtgatgggtaatattctgattgtttttcataatccagatctgaaaaaaaggatggcggcatctcctgtttccggaagaagacaaagtctggaggggattttgtgcatgagcctggcagggattgcgctgtggatctttgtaattgtaattgcgattgtattttttggaaaagatttttatacatcaggaaattttgcatattacctgttgaattcggtattcatgcttttcgtagcgattgcgctggcatatctgatgggaacaattgcaccgaacagagacgcgttgaccggaattgcgaatatcatttctctgggaatgtgctttctgggaggtgcgtttgtgcctcttgagttcatgggaaatgatgtaaaagctgtgagtcagttccttccggtatactggtatgagaaagcaaatgatattcttgctgatttcggacatctgacagcttctgcaaaaggacagttcttgcaggcgattatgatacagcttgttttcgcagcagcatttgtctgcctggtactggtggttgaaaaatataaaagagtggattcatagcaggatgcggactgtgactgtggtggagcgactgcgggaagtggagaattaggaaaaaaccaacttgacaaacaggaattgtcagtgtaaaatgcaaaacatatcagacaaaggcgtcttttacgtatatttttacgtgaagggggcctttttttgttgtgataagagaatctgattacaggaggggcttgattatgtgttcaattataggatattgcggtatttgcgatgatctggatgagtttcagaaaggatttgataaaacgatttccagaggaccggatgacagcaggattgtagataccggaaatggtctgcttggattccacagacttgcgatcatggggcttacggcatccgggatgcagccgttttcactgggtggcagttatgtggtatgcaatggagagattttcggatttgagcgtttgagagaaagcctttccgacagatatacgtttcagagtgattcggactgcgaagtgcttctgccgctctatgagacatatggcacagaaatgtttcgtatgctggatgcggagtttgcctgcatcatctatgacggaaaaacacaggaatatattgcggcaagagatccgatcggtatccgcccgctctattatggatatgataagaagggaattatcgtatttgcaagtgaagccaaaaatctgatcgggctgtgtgaaaaaatccgtccgtttccgccggggcattattataaagacggagaatttgtctgctactgcgatattacaaaggtggatgagatctgtcaggatgatctggagcaggtgtgtgccaatattcgggagaaactggtgaccgggatcgaaaagcggctggtggcagatgcgaaagtcggatttcttctctccggagggctggattcgtcgcttgtgtgcgcagtggcagcgagaaagagtaaaactccgatccgtacatttgcaattgggatgcaaaaagatgccatcgatttgaaatacgcaaaagaggtggcagattacatcggaagtgagcatacagaagtaatcattacaaaagaggatgtgctctcggcactggaggatgtgatcggacttttgggaacgttcgatattacaacgatccgtgccagcatagggatgtatcttgtctgcaaagccattcatgagcagacggatatccgggttcttctgaccggagaaatttcagatgaactgtttggatacaaatatacggattttgcaccgtcggcgcaggcatttcagaaagaatcagaaaagcgggtcagagagctgcatatgtacgatgtccttcgggcagaccggtgtatttccgtaaattctctggaagccagagtgccatttggagatctggactttgtccggtatgtgatggcaatcgatccggagaaaaagcagaatgtgtatcggaaaggaaaatatttgctccgccatgcgtttgagaaaggggactatctgccggaacatattctctggagagaaaaggcagcattttcggatgcggtgggacattctatggtagacgacctgaaagagtacgctgatacctgctacacagaggaagcgtttgaaaaggaacgtcaaaaatatacttatgcacagccgtttacaaaagagtctcttttgtatcgggagatttttgaaaaatattatccgggacaggcggaaatgatcgcaggcttctggatgccgaatcaggagtgggagggctgtgatgtgacagatccatctgcacgcgtactggcgaactatggcgccagcggagagtaaaaggtgtgaacagaaaaataaacagagaggaataggatagaatgaaaaattacatggaacaagagacaaaaagtctgtatcgggaacaatttgagcatgataactgtggaatcggcgcggtagtaaacagcaaagggatcaaaagtcacaaaaccgtggaaaacgcgctgaagattgtagaaaacctggaacacagagcgggaaaggatgccgaagggaaaaccggagatggtgtcggaattctgcttcagatctctcataagttttttcagaaggtctgtaaagagctggggatcagcctgggagaagaaagagagtacgggatcgcgcagtttttcttcccgcaggaagaattacagcgcaatcaggcaaagaagatgtttgagatcattgtagaaaaagaagggctggaacttcttggatttcgtgaggttccggtgcatccggaggtgctgggagaaaaggcaagaagttgtatgccgcacattgttcaggcattcatcaaaaagccggagcatgtggagaaaggactggagttcgagaggaagctttatattgcccgccgggtgtttgagcagagtaatgacaacacctatgtggtatccatgtccagcagaacgatcgtatacaaaggaatgtttttagtgggacagcttcggacattttttgcggatcttcaggatccggattatgagtctgcgatcgcactggtacattcccgtttcagtacgaatacaaatccaagctgggagagagcgcatccgaaccgttttatggtacacaatggagagatcaatacgatccgcggaaatgcagacaagatgctggcaagagaggaaactatggaatccggtgccttgaaaggagagcttcacaagattcttccggttgtagataccagaggatctgactcttccatgctggataacacgctggaattcctggtgatgagcggaatggagcttccgctggcgatgatgatcgcaattccggagccatggagcaaaaatgccacactttctcaggatgtcagggatttttatcagtactatgcgactatgatggagccatgggacggtcctgcttccatcgtgttctcagacggagatatcatgggagcggttctggatcgaaacggtctgcgtccgtcccgttattatgtgatgaaaaacggagatttgatcctggcttccgaagtcggagttctggatgtgccggaggaagaggtcgtgttaaaagaacgtctccatccgggaaaaatgctgttggtcgatacagtaaaaggcaaaatatatcaggacgaagagctgaaggaaatgtatacaacaaagcagccttacggagaatggctggacagcaatctggtggaactcaaagacttgaaaattccgaatatgcgtgtagaagagtacgagccggtaaagagaaaacagcttcagaaagcatttggatacacatacgaagaatatcgcaattcaattcggaacatggcattaaacggaggcgaatccattgcggcaatgggtgtggacacaccgcttgcagtgctttctgataagagacgtccgttgtttgattattttaaacagctctttgcgcaggtgaccaatccgccgatcgatgcgatccgtgaggaaatcgtgacctgtacgactgtctatgcaggaaaacagggaaatcttctggaagaaaaagaagaaaactgccgggtattaaagatcaacaatccgatcctgacaaatacagatatgttgaagatcaaaaaaatgaaaaaagaaggattccgggttgcagttgttccgattacttattataaaagcacgaagctggagagagctctggagcgcctgttcgtggaagttgacaaggcatataaagacggagcagacattctggtactgtctgaccgggatgtggatgaaaaccatatggcgatcccgtctcttctggcagtttctgcagtgcatcagcatctggtggcaacgaagaaacagacctcactttctctgatcctggagtcgggagaaccaagggaggttcatcactttgcgacactgctcggatatggagcgtgcgcagtgaatccgtatcttgcattggatacgatccatgagctgatcgaagaggagatgctggacaaggactactatgcggcagtggaggattatacactggcgatcctgcacggaatcgtgaagatttcatccaagatgggaatttccacgatccagtcttatcagggagcgaagatctttgaagcgattggaatttcaaaagaagtgacagacaaatatttcgcaggtacagtcagccgtgtgggcggtatcaccatggaggatatcgagaagcaggtagatgaataccatacaaaagcatttgatccgctgggactgacaacgaatctggcgctggagagtatgggaaaacacaagagacgtgcagatggtgaagaacaccgctataatccggagacgatccatttgctgcagcaggcgacctggaccgggaattatgaattgtttaaagagtatacgaaaaagatcgatgcagaggagacgggatatctgagaagcctcatggattttgcctatgcagaaaaagagattccgctggatgaagtggagagtgtggaagatattgtgaagcgatttaagacaggagccatgtcctacggatccatttcacaggaagcgcatgagacactggcaatcgcgatgaatcatctgcatggaaaatccaactccggagaaggcggagagagtgacgagcgcctggattccgcaaatacagaaacagacagatgttctgccatcaaacaggttgcatccggaagatttggtgtgacaagccgttatctggtcagcgcaaaggaaatccagattaaactggcacagggcgcgaaaccgggtgaaggaggtcatctgccggggaaaaaggtgtatccgtgggtggcaaagacaagacattccacaccgggagtgagtctgatttctccgccgccgcatcacgacatttattcgatcgaagatctggcacagttgatctatgatttgaaaaatgcaaataaatactccagaatctctgtgaaactggtatcagaagcaggcgtcggaaccgtagcagcaggtgtggcaaaagcaggagcacaggtaattctgatttccggttacgacggcggtaccggtgctgctccggaaagttccatccacaatgcgggacttccgtgggaacttggtctggctgagactcatcagacactgatccagaacggactgcgtgaacgtgtgaagatcgaaacagacggaaaactgatgagcggaagagatgtggcgatcgcggcacttctgggagcggaagaattcggatttgcgacagctccgcttgtaacgcttggctgtgtgatgatgcgcgtatgtaatttggatacctgtccggtgggaattgctacacagaatccggaacttcgcaaacgtttccagggaaaaccggagtatgtagagaacttcatgcggtttgttgcccaggagctcagagaatatatggcgaaactcggagttcgtacggtagatgagatggtaggaagaacagacctcttaaagagaaatgaaacgaagcattcccggatggcagacaagatggatctgggtgagattctgtatcatccggcaaaagaaaatgtgacatttaaagaaggaaaagcctatgacttccagctggaaaaaacactggatgagagagttctgttaaagaaactgaaaactgcggtagaaaaaggaaacaaagcagttctggaaacagaggtgaaaaatatcgaccgttctgcaggtacgatcctcggcgcggagattacccgtttccacaaagaaggactgccggaagataccattgttgtaaactgcaagggagtcggcggacagagcttcggagcatttattccgaagggactgaccatgacactctgcggagataccaacgactattatggaaaaggactttccggtggaaaactggttgtatatccgccgaagaacagaggatataaagccgaggaaaatatcattgtcggaaacgtggcgctttacggtgcaacggcaggaaaagtgttcatcaacggtgttgcaggagagcgtttcgcagtccgcaattccggagcgtatgccgttgtagaaggggtaggtgagcacggatgtgaatatatgaccggcggacgtgtggcagtgcttggaaaaacaggaaagaactttgctgcgggaatgagcggaggaatcgcctacgttctggatgaaaacagtcatctttaccgcaatctgaacaaggccatgatcgcaattgaaaaagtggagaacaaatatgacatccaggagcttcgcgcaatgatcgaggagcatgtggaaaatacaggttctgcgcgcggaaaagagattcttgccgactttgatgcgtatctgcagaaatttaaaaagattattcctcatgattataagaagatgatcgcactggcttccaagtgggaagaacggggaatgagcagcgaacaggcacagatggaagcctttaatgagagttttcagatgaaagaaagtgaggtatagaaacaatgggaaaaccaacaggatttttagattacgaaagaaaaaatacaaaggcagaaacaccgcttcagagaatccgtcattttcatgagtttaaaacttcactgcctgtaaaagaacaacagaaacagggcggacgctgcatggactgcggcgtgccgttctgccagaacggcagcctgctcgcaggcatgacatccggatgtccgcttcacaatctggtgccggagaccaatgatctgatctatcgcgggaactggaaacaggcatatgagcgtctcgaaaagacacattgttttccggaatttaccggaagagtctgcccggcgctctgtgaggcggcatgtacctgtgccttgaacggagatccggtggcaattaaggacaacgagaaaatgatcattgaacatgcattccagaacggatgggtgacagcacagccgccgaaggtgcgtaccggaaagacggtggcagtgatcggaagtggaccggcaggtcttgctgcggcattactgctcaaccgaagagggcatcaggtgactgtatttgagcgaagcgacagaatcggaggacttctgtgctatggaattccgaatatgaaactggaaaaagacattgtagagagaagagtccggctgatgaaagaagaaggcgttctttttaaaaccggagtgaatgtaggaaaagatgtgactgcagcagagcttcaaaaacagttcgaccgggtgatcttagcctgcggagcatcgaatccgagagatatcgaggtgccgggaagagacagtaaaaatatttattttgctgtggatttcctgtcttcggtaacaaagagtctcctggatcaggatctgaaagagggcacttttatcccggcaaaagggaaacatgtgctggtgattggaggcggtgatacaggaaatgactgcgtggggaccgcgatccgactgggggccaaatcggttacacagctggagatgatgcccaagccttccaaagagagaacaaagtccaatccatggccgcagtggccgcgcacggagaagacggactatggtcaggaagaggccattgcagtctttggaaaagatccgagaatgtatcagacaacggtaaaggaattccagaaggacaaaaacggaaatgtcaaaaaagcagttctggtcagcctggagcctcaaaaagataaaaagacaggcagaatgcagatggttcccgttccgggcagtgaaaaagtggtggatgctaatctggtactgatcgccgcagggtttacgggcagccagaaatatgtaacagatgcatttggggtatctgtagatgcaagaacaaatgtagcgacaaaagaagaaacgtatgagaccaatgtaccgggggtatttgcagcaggagatgtgcgcagaggtcagtcgctggtcgtatgggcgatccaggaaggaaaacaggctgcaaaagcagtcgattattctttgatggggtatacaaatctgtaagagagaaatataataggatcatagtgtaagacaaggagaggatgttatggagaagtatagaaaaacagaaattctgcagatcgtggaggaagaaggcgttgagtttatccgtctgcagtttacggatatgttcggaaccttgaaaaatgtcgcagttccggtcagctgcctggaaaaagcaatggatgaccgctgcacgatcgacctggcttctttgaacggatttgcaaaagaagaggagacagagttgtatctcaagccggatttttctacgtttaccatactgccatggcgtcctcagaatggaaaagttgcccgttttctgtgtgatgtatgcacagaggatggcagcgaatacgaactgagcccgcggctgatcctgaaacgggcactggaaaaagcagaaaaacagggctatacactggaagtgaatccggagtgtgaatttttcctgttccatacagatgacgatggaatgccgactaccgtttcgcacgaaagagcagggtatctggatacgtcgccgatcgatctgggcgagaatacaagaagggacattattctgacactggaggagatgggatatcagattacatcttctcatcatgagattgcgccggcacagcatgagatcgactttgcgtttgaagatgcgctttccactgcagataaggtgatgacatttaaaatggcagtccgtacgattgcaaagcgctacggtcttcatgccacatttatgccgaaaccacggcaggatgtaaatggttccggtctgcatctgcacatgcggcttcttaagaacggcagaaatgtgtttaccggtgaaaacggtgaattgagcacagacggcgaagcatttctggcgggaattctgggacatgttgtggggatgacagcagtgtttaatccattggtcaattcttataagcgtctggttccgggatttgaggcaccttccgatgtgacctggtccagaacacagagaaatgcgctgctccatgtcagaaaacgcagaggagaaggcgtggatctggaactgagaagtccggattgtgcggcaaatccatatctgcttctggcactttgtctggaagcaggactggatggaatcaggaaacagcagaaagcgccaaaggaactgacagaagatatctgcagactgtccgatgaggagaaaaagcaacgaaaaattcagagccttccggaaaatctgggagtggcactggatgcaatggggcaggatctgttggtgcgggaagtgcttggagaatcctatgttgcggaatatcagaaaatgaaacgccgagaatggaaaaactatctggaacaggtaacaaagtgggaactggagcagtatctgtatctggtttaagaaaatcaatggaggccgcagatgggagtcatcgttgtcgtattaccaaagcttgagaatgcgaaaaaagtgaagaaaatactgcttgaacacggatttcagacggtgtttgcgtgttcttctgcctcttcggctcttcagatggttggtgaatattcgtatggtcttgtcatcagcgggtaccggatgccggatatgtattatctggatctggtagattgcctgccgcgggattttgaatccattctgttaggatccgaggagacggtggcacaagtcggtgcagggattttatccctgaccatgccgatcaaagcctatgatctggtcaataccgcagatatggtgcttcgtcagctggagcggcggatcaaaaagaaaacccggacacccaaaaaacggagtgagaaggaacagaattatatccgtaatgcaaaatttctgttgatggagagaaactatctgacagaggaggaagctcacaaatatctgcagaaatgcagtatggataatggaaccaatatggtggagacagcacagatgatcctgacgctgctgtttgatgagacataactggaaaatagtgaggaaaatagaatgccgaatttaaatgaaaattatttgaaactgcaggaaaattatcttttttcggagattgcacaccgtgttgctgcgtatacgaagcagcatccggaaaaaaatgtgatacgtctgggaatcggagatgtcacacgtcctctgtgtcagtgtgccggagaggcacttcttgaaggggcaaaagagatgatgtctgcggatacgtttaaaggatatggcccggagcaagggtatgaagatatcagaaaagccattgtggactattacaaaagaagtggtgtagagatcgatgcgtctgccgtatttgtgtcagacggggcaaagagtgatacaggaaatatcacggatctgtttgcacacgacaatgtgatcctgatcccgacaccggtttatcctgtctatgtggactccaatgttatgtgcggaaataaagtggagtatattgagggaaatgcagacaatgacttccttccgatgccggactgggatcagcatgcggatatcatttatatctgttcgccaaacaatccgaccggcgcatgctataacaaaagccagttaaaagagtgggtggattatgcgctgaagaatcaggcagtgatcctttttgatgcggcttatgaggcgtttgtgtctgatccggaacttccgagaagtatctatgccgtagaaggggcaaaacagtgcgcgattgagttctgttcactttccaaaacagcgggatttaccggaaccagatgtggatatacgatcgttccgcaggaactggtatttacagcgtccgcaggagaagagatgtcactgaatgccatgtggaacagacgtcagtgcacaaaatacaatggtacttcctatattgtacagaaagcggcagcggcagtgttcagtgaggaaggtatccatcagtgtcaggagaatctggaatactacagggagaatgcgcgtgtcattacagatacactttcagatcttggcatccggttttatggaggggtacattccccgtatgtctggtttgaatgcccgaaggacatggattcctggacgttttttgactatctgctgcatgagatccaggtagtcggaacgcccggagccggatttggagagaatggaaaacgctatttccgtctgacttcatttggtacttacgagaatacagtagaggcaatgacgcgcttccaggatcttctggaaacaaaataaaaaacggaagttagtattctctgataggaaaagttttctttcttaaaaaaacatgaagtttatgacagtaagagccaaatatggtatactaatagagactaagtgagaagggagattttccaagttgagaggagaacaccagatggaagacgcgatcaagaattatgaagacgtggacagttggaagaccgtcattttcttatataatgcagcaatgaaagaggtagggacgaagctggaaatcctcaatgatgagtttcagcacgtacataaatataacccgattgagcatatcaagacaaggatcaagacgccggagagtatcgtaaaaaagctcaaacgatacggctatgagacttcaattgagaatatgctccgctatatcaatgacattgcaggcgtacggctgatctgttcatttacttccgatatttaccgcctggcggagatgatcgggaatcaaagtgacttaaaagtgctggcaattaaggattacatcaaaaagccgaaagagagcggatataagagttaccatatgctggtttccgtgccgatctttctgtcggacagtgtggtagataccaaggtagagattcagatccgcaccattgcgatggatttctgggccagtcttgagcacaagatctattataagtttgaaggtgacgcaccggattatatcagtcgtgagctgcaggagtgtgcgcagatggtgtccgagctggatgataagatgctctctctgaatgaggcaatacaggcatgtctggaagtggagaatacgccggtacctgttgagctggtaaaggagaatcaggaacaggagaagaagcaggaagatatcgtagagcatattttgggaaaagaatcgtgatagaaaaacagccgtggctgccatgaaaagtggcagctacggctgttttttttgagtctgctttaagattttttcgtgcattacgaacataagaaccaagatgaaaagcagatataccgggaataaggctgggctgatcgtatttacgatccatccgaatacaggcggcataaggcaggttccgatataggcagacgccatttgtacgccgatcattgcctgggatcgatgtgcaccgaaatgctccggtgtggagtggatgatgcacggataaaccggggcgcatccaagtccgataaaaagcagtcctaaaagggcagttacttctccgatcggtaatagcaacaatatgatacctgataatatcacacattgtcccagccgtatcatctgagtgtcattgagttttagggttaaaaatccgctgagtgcccttcctgcagtgattccaatgaaaaacaggctggcaaatccggcggcagtttcagaagtcagcccccagtgtaaaaccagatagctgctgccccaaagtccggttgtctgttccagagcacagtaacagaaaaacgtgatcataatttcttttgcacctgaaatccgaacaatctgagagagagaaagcgcctgttcgtgatatgacgcagcagtatgactgcttttggtaggaacagttggctttttccaaaggggtaggctgaacagcagtacggccgtcagcaggatctgaagaatggaaatatagcggtatcccatattccagctgtgtccgtttgataatgcgtatcccataatatagggaccaagggaagctccgactccccacatacaatgcagccagctcatatggcggcttgtataatgaagcgcaacataattgttgagtgccgcatctacgcatccggcaccgagaccataaggaacggcccacagacaaagcgcgataaatgtatggcttgtggaaaatccgaatagtgcagctgcagtcatgaaaacactgacagcggtgatctttcctgcaccgaaacgtttagtcagacggtcgcttagcaggctggagatgatggttccgactgcaatgatcatggaaatcccgccggcataggaaacaggtacagaaaattcacgatacatcgtgggccagactgagcctaaaagagaatccggcaatccaagactaataaatgccagataaataacagctaacaatagttgaaacatatataacctcctgcttgaatgttcttgtgtaataatatcgacatagcaagcttgatacaacttaatttccgacatataatataaaaaaaacgccaagtttgaaaaggagatgtgaatatggcactgcaggagtgcagattgaatctgaatcagaaattaaaagaactccggccgcatggaacgctggaatttccatgtgcggggtattcttcatactatacagggcggcaggaggacagcattccgtggcactggcatgaagagattgagatggtatatgttgcagaaggtaggttggaattaaaaataccatcggaatcgttttatgttgaaacaggagatgcgtttgtaatcaattccaatgtgctccactatgcgatcgctgcggattattgtaaactacattctctggtgtttcatcctacgcttattttaggaaatgaagattcggtttttgcaaaaaagtatgtacgtccgctcgtatcctgtcacgcattttccggctgtgcggtttcccggtttgagaatgcacatgtgattcagtggttttgcagtgcgtttgacgcgatcgtacaggaacctccgggatttgaatttgtcgttagggagaatttatctagagtttgttttttcctgacagaaaaatttaaagatgagctggaggtaccggagacacttcaaagtcaggacaatttgcggatacgaaaaatgttggagtatatccagagatattattttgatgatattaagctggcggatattgcgaaggcggcagacatcggagaaagagaatgtttgcgctgttttcagaagacaatacagctttcgcccatccagtatgttttgaagtacaggatcatacggggagcggaaatgcttttgcataatccggaaaacagcatttctgaaatagcaactgcctgtggttttgaaagtcccagtaatttttctaagatattcaaacggttttataagtgtacgccgagagagtatcggaaaaaagaaaatgattagtaaacaaaaatatggtttactaaaattaaaaatacattttggtaaactgaggtaaaaagtaaactatatataatatttatgaagtgggttttagaacccgcttttatatgcataatacacaaaaaatatatcaataattcgttaataaattacaaaaacaagaaaagtgtacaagaaatatttgactttaggtaaaactggtttataatcaagttatagttaaccggttactaaaagcgagatgagtaagacagaagaaaaaggaaggaaaaggagaaaggcaaatgataggaattatcgttgcgggacatggaaattttccgacagggatcatgagcgcagtaagcctcattgcaggaaatcctgagcatataaaggcggtagattttgtgaagggaatgtcctcacaggaattaaaacagaagttagaagagcagatggaggcgctggggacttctgagatcctggtcatgacagatctgttgggaggaaccccgtttaatgtggcatccggcatcaaaacagagagtggaaaaagtatcaaagtgctggcaggaacgaacctggctatggcagtggaagcaatcttttctagagagctgatgggattggaagaactggcagaaattatcaggcagagcgcaaaagatggtgtggaggactttgacagtcttggaaatgatgatgagatgatatttgaagacggtgtctgatcgcaaagagggaaatcatgattaagaagataaatattgaagagattaaaaaacgagaagagtttttgtacggtaaactgttaacacgcaaagaggtagaatgtgcgctggaagaggcaaaggcttctgtaaaaagaaatatggagtatctgaatggaaagtttccgttttcagcagcctataattctgagccgtttccatcagaacgggacggaatgtacccgattacagaaaatgtagagtggacgacgggattctggacaggactaatctggctgatgtacgactggagcagggaagaatgttttaaagaacgcggaatggcagatgtaagatcgtttaaagaacgtgtagaaaaacggatcgatctgaaccatcatgatcttggatttctgtactctccatcctgtgtggcagcatatcagctctgccagtccgaggaaggaaagcaggcagcgcttcaggcagcggatattctgatggagcgttaccgggaaaacggacatttcattcaggcatggggaaatgtaggagatccgaaggactaccgtctgatcattgactgtatgctgaacattccactgttatactggaagagcagagtgacaggggatgagcggtatgaaaaggcggcaagagaacattttattacctcctgtaacaatgtagtgagggatgatgcatccgcttatcacacattttattttgatccggagacaggagaacctgttaaaggagtcacacgtcagggatattctgatgattcggcatgggcaagaggtcaggcgtggggaatctacggaatcgcattgaactacagaaattccaatattggggaagcgtttgatctgttcaagggaatgacaaattatttcctcaaccgacttccacaggataatgtatgctactgggatttgattttcggagacggttccggacagtccagggattcttcggcagcggcagtcgcagtatgcggaatgcaggagatgtgtaaatatctgccggagacagatgaggataaggaggtttataagtatgcaatgcatacgatcctgcgttcgctgattgaaaattatgccaaccattctcataaaccgggagaggcgcttcttttacatggagtctattcctggcattccggcaaagggatcgatgtaggaaatatctggggagactattattatgtagaagctctggtacggtttttgaaagactggaaggtatggtggtaaaataccgatttttatttatgggaggaaaagaaagatgacagacaaaccaaatatcgcagcgctgcgtattgatgagcgtcttgtccacggacagggacagctctggatcaaaacattaggagtcaacactgtgatcgttgcgaatgacgaggcggcaaatgatccgattcagcagacactgatgaaaacagtaattccgaaaacgattgcaatgagatttttcacagttcagcatacctgtgatgtgatttataaggcttctccgaaacaggtcatgttcatcatctgtaagtcggcagaagatgcactgaagctggtagagggaggtgttccggtgacagagatcaatgtgggaaatatccacagagcaccgggaaaacaggagatcagcccatacattgcacttggggaagaagacagggatgcgctccgaactctgaaagagaaatacaacgttacattcaatacaaaatcaacaccaacgggtgcggatacagcatccaatgttgatattacaaaatatttataggaacgaatatctataaggaggaagagaaatggaaattacaattgtacaggccgttttgatcggactttggacaggtgtctgccttagtggtatgcttttgggaatttacacgaaccgttgtctgatcatggctaccggagtaggtttgattttaggagatctgccgacaggactggcaatgggggcagtcggagagctggcatttatgggattcggagtatctcagggaggaagtgtaccgccgaacccgatggggcctggaatcataggaagtattatggcgatcacaatgaaaggcgcaggagtagatgttgcgacagcccttgcattatcgttcccgtttgcggttgcattccagtttgtaatcacacttgtttacacagcaatggcaggtgtcagcgccacagcgacaaaagcgctggaaaacaaacagtttaaaaaattcagactctgctgcaatctcaccgtttgggttttcctcgtgcttggctttgtgatcggatttgcaggtgcaatgagtgcagaaggtctggagaaagtgatcagtctgattccaacatggctgaatacggggctgagtgtagcaggagcaatgcttccggcaattggatttgccatgatcttaaatgtaatggcaaagaaagaactgatcccatttgtactgcttggatattgtgcgatcgcatactttaagctgccgatcatcggtgttgcgatccttggaacaacagttgcacttttggttcatttctatacaggaaaaggaaacaaatcaggtacagaaacagaagaagtggaggttgaatttgaagatggcatctaataaattacagaaaaaagattatacaagagcatcgctgagagcatacttccttcagaatggtatgaactacagtaactatcagggacttggatatgccaacatgctgtatccgggactgcgcaagatttatgacgatgatgatcagttaagagatgcactgaaagaaaatgtggaattcttcaatacaaacccaagtatggtaccattcatcggaaaccttcatcttgcgatgcttgatggcggagccaatgcaaaagaagtaaaatccattaaaatggcattgatgggaccaatggcaggaatcggagattcattgtctcagttctgtctggcaccgctgtttgcgacaatcggtgcgtcgcttgcacaggatggactgatcctgggaccggcgattttcttccttggaatgaatatcacgcttctgatcatcaaattattgatgggtaactggggacataagcttggggcaagtatcattgaaaagctgagcagctatatggaacagatttccacaatcgcaggaatgatcggtgttacggtaatctccggtctggcagttaattttgtgaagatttttacgaagctgcagtatgtggcacaggtttcggagacagaagagaaaatcatttctctgcaggagatgttggatgcgatgcttcctaatatgcttgctgtattgtataccggcttgatgttctatctgatcaaaaagaaaaaatggagtacatacaaactggttatctttacgattatcgtgggaatccttctttctgtgatcggtatacttggataaaatagaaaatgtattgaggatgtgggatgtttagcggaaataaacatcccataactggttttacgaaacgggagatatagatatgggttcacagatagaacaattaaaaaatagagcgaaggaatatgcaaaagcatatcatgaaaaagaagtaaagcggagtgtacacaaaggagaaatggaagaaattctgcgccaggcagactggctgatggaacaaaaattttgcttttgtgaccgttgggatatggagccatgcagtacggtatatgaagtttcaccgttttcctgggatgcctgcccgaacggagatccggaatggatatatatgctcaacaggcaagagtatctgaaaaaaatgcttatggcatactggtacaccggacaggagcggtatgtggaagggatgaagcagtatattctgcactgggtaaggcaaaacacgaaggaaacattcggctctctgatgacaaggacgatcgacaccggaatccggtgcgcatcctggacaccattgcttctgcatcttcttgccaaggagcacatcaaagaagaggaactgtttgaaattttagaaagtatggaacagcagtttttatatctgtatcaaagctatgtgccgaaataccggcagagcaactggggtgttttacagacgacttcgattctgcagaatgcggcatggtttggagaatgtttctgtctggaagagatgaaacggatcgcagagtgggcaaaggatgagctgctttatcagctggaatctcagatttatggggacggctctcattgggagcagtccatgatgtaccatattgaagtgcttaattccgtaacgacaatgctggtgttcagaaaaagagcgggtgtggagacttcgaaaagaattgaggaaatcctgtatggaatgtacgattatgtgatgcatgcggcggggccggatcattttcagattgcgcagggagacagtgatgtgacggacatccgggatgtgatgacaagaggcgccatgctgtttgaagagagcgcatttaaatatgcgggatatgaggagccggatctggagagcatatggtgttttggaatggagcagaaagagcagtatctgaaactgaaatcaaaacagccggaaacattgaacggtctttatacagacagcggaaacttttattacagaagcggttgggagatagacagcaactatacgtatcttcataatgggccgcttggaagctcccatggacattcggaattgacacatatatgtaattattacaaaggaaaagcgtttctgacagacagcggccgatattcttatatagaaggagaactgagaaaccgtttgaaatctccggaggcacataatgtttctgtgattaaaggctgtccgatgggagtgccggacggttcctggagttacgcatattttgcagacagtctgaacaattactgcaaaacgattgaggggatccactatgcagagatgccgtatgtgatgcaaaataaacaaaaagagcctgcatactgctgcagaaggattctaatctttccggagggaatctggctgctcagtgatgaccttcgtatggcgggaacgcaggaaagtaccatgtatttccatctggcaccggaggtgattgtaaaggaacaaaaagagcgggaagttcttcttgaaaatgaagatgtcaggctgatccttggagcagagtatcctttggagcaaaggcaggagattttgtccagaatttataacgaaaatgaggagcatacagtttttcaggcaaaaaccaactgggaaaatgaaggagtatgtacagcatggatgcacccggagaatgcagaattaaaagatacggtgatcatacaggcagaagggaaacaggtggctacatctgtggtggcaaaggaagtgtggatttcaggtgaactgtcctatgtggttattatgcgtacgcatgaaaattaccgtggtcggaaagttttcctataccagaattgtggcttttatggtaaagtagttatattgaagaaaacagaagaagggtttgaagtactccgcttccgggcgtagaacgaaaataaggtgggaaacaagatgaaaaaactgaccattaatgaaattgcagaaatggtaggagtttcgaagacaacgatttctttttatttgaacggaaaaacgaataaaatgtcagatgagacacagaaaaagatccagcaggtcattgaagagaccggttacacgccaagcgctgcgaccagaacagtaaaggcaagcgatgactgtatcggcgtgattcttggagatgtgtccaaaccatttgcggcaaaggcactgaaaggaattgaagaagaagcacatgaggccggatatcaggtgatcgtgggaagtaacgagatgtcatttgccaaagaaaaagaatatgttgagcatatgctgaaaatgggagtgtccggttttatcatacaggcaacatacaggtttggaattttggcaatggaattggaaaaaaagaataaaaaggtcgtatatctggatattccaccttatgattcacagggagtaagagttttgggagacaattatcaatgcgtatatgatgcaatcagtcaatgcattgagagaggatatgatcagcttctggttgtttcggatgccaatgaatcggagtataccggaatggataacctgcgaggcttcaaggatgcggcaaacgatgccggagtttcatttaagacctattttatagaagcggagacaacaagagaagagattcatgattatctggaacagaatatcagcgagtataagaaaacactggtgtatgcttcagatgtggaggcgcttcgaaaagtgtatcttgggattaagttatttccggattttcagtcattgtttccagagcgtctggggctgatcggatttgatgtgaccggatggacaaagatcgcagtaccggaaatctcagcaatcatgatccctgcttatcaggaaggtcagattgcctcccgaaaactgattgaaatgatcgagagtaaaaacagtatttcgaataaaaaagtaattataaaaaatgcagtgcgctggagagacagtacgctgtagcaggaggatattatagaatgatacagatcaaagtattagatgcagaaaaaaatattgttgcagaaaatggtgggcaggaggaagtgaacctgacgctgagaagagagtatcaggagggcgacaccattgtatttgaaattggtggagagacaggacattattggatgcaggtggatgatgtgcttggaaaatcactggtgtatctgacaggcgatcagacttatgagattccgtttgaagaaaagaagttcaatctttcaccaaaggcatttactggagaaaaacagttgctttgccttcgcaaggcaagaccttatgagatcaatatttatcgcaatctggcagaaaatgtcaacgatcagcatggagatgtgaactgttatccgcatgcatctgccaatgtagagacaagaggagaggcagtatttgcagcaaagaatgcaattgacggagtgacggcaaatcacgatcacggaaaatggccgtttgcttcctgggggatcaatcagagagacgatgccgagataaaactggaatttggtcgtgaaatcagcacagaccggattgtgcttcatacaagagcagattttccgcatgacaactggtgggtaaaagggaccgtagaattttcagatggaagcagcatggtgctggatctggaaaaaacagacggagcacaggaatttacattttcagagaagaagatcagctggctcgtattgaaggatctgatcaaagcagatgatccgtcaccgttcccggcgctgactcagattgaagtattcggaacagagtgctgatctgggagaagcaaaaatggagatccgtgagataaatgaaaacaaaaaagaatatctggagcttttgcttcttgccgatgaacaggaaagtatgatcgatcgctatcttgagcgaggtgagatgtatgtcttgtatgatgcaggtgaggtccgggctgtctgcgttgttacccaagaaaatgaccagattttggaattgaaaaacctggctgtgaaaccgcaatgccagcgtagaggatatggcagaaaaatgatccagtttctctgtgaaaaatacagaggaaagaaagcaattctgcaggcagggaccggggacagcccggcaaccctgcctttttatgagagatgcggattcacacaatcacatcggatccccggattttttgtggataactacgaccatccgatcatagagtgtggaaaacagttggtggatatggtgtatttaaaacaatttctttaatttctcaaaaaggatacgcgtatcttctgtaaaacaaacatcttctcattttggaatctataattttttcttcccctctctgtgcagaccagaggcagattcccgccacgcttttggagtcatgccactgattcgcttgaacagtcgggtaaagtagtggacgtctccgattccgcagcgcagtgcgatatctttgatcggaacatcggtattggcaagcagtgttttggcatggtcgatgcggtaatgattgacatagtctgtcagagaagttcccatttctttggtgaacaatgtggacagataacttgcattgacaccaagatgctgtgccagcgtgttcagagtcagatcggcagacagatccgtttccaggtaggcgacaactttccggatgatcgaggaatgaatcttgtgctgatgttctttgacgatccggcagtatccgagtgcgatggtctgttgtgcacgcaggcattgagttgcggaagtcagactttccaacatggttacattgcagttggaataggcgtcaatatggatcggatgtacaccagcctgctcggctgcttttcgaagtaatgtgttcagtgtgatggtataatttttcatatctcttaaattattgctgatccgttgtggaagaagccgggattcaaattttgaagttatttccagagcctggctttctctgccggaagtgacggcattgatcagcatattttctgcttcatatcgtttttcaatcacatcgatatttgaaaacggatgttcttcatcccgcagacaattcttataggcgttattccaatgatcaaaaaaatcagtattggaatagacgacttcacaggaatccccatagagcttttttccgaattccagaaacaggctttcgaacatggcataggagcctaaaaaaggaagtttctgataataggcctgaatcgagttatgataagtatctttcaaaggaaggcttgaaaacaattcttcaaagcggtttccctgtatcttttcaaatacgacaggaccgcagtaaaatactgtttttgtgccgggaagcagcagaaagacaaaggtacactggaacaggtctgtattgaaataaatttttcccggttttagtttttcaaacagatcattgaaaaatctggaagtattttttacgcccagaatatggcggagcagtccctgatccagatgatccagatcctcacagggtagctcaaagcgataaaccgggagataatttgcctccagtatcttttgtgtaaaatcgatcaattcttcgtatttcataaagtctcctttttaaatctgaaaattgtgcaaaaaactacaaaaatcatcactgttatttttctcaaaacttacatacaataatcatacaacaaatatgtgaaaaagctaagaaaaatggaaaacaaaggagaatggttatgcgtaatgtgataagtttaaacaaaaactgggcatttattcaggagaatgcagggcttccgggagaaatgccgacagactggcataaggtggatcttccgcatacatggaatgcagtagacggacatgatgggaacggtagttatgacagaggtacttactggtatgcgaaaacatttgaaacaccaaaacagcccctaggaggcggaaaggtctatgtagaaattctggcagcaggtcagcaggcaaccgtgtatgtaaatggaaaagaagtgacatatcacgaaggcggatattctacattccgtgcggacattacagatgtgtgtcacgaaaaaggggacaatcttttggtcattgcatgcagcaatgaaatgaaagacagtgtgtatccgcagtctgcagactttacattttatggcgggctgtacagaggggtaaatttgatcagtgttccggatgcgcattttgatctggagtattacggaggaccgggaattcaggtaacaccaaaaccgtgtgaatgtggaggcgctgcatttgagattgtttcttatgtgaaagagacagatgaaaactttaccgtattgtacgctatctgtgatgcagagggaaatgaagtggcaagtgcctgccgcccggctgatgaaactacagtaacagtgtatgttccggatgcaaaactctgggagattgatgctccgtacctgtatacagtaactgcgaagctgcagagaagaaatgaaacgtatgatgagatttccgcacgtgtgggtgtgcgcagtttttcctgtgatccgaacaaaggctttatcatcaatggggcagaaactccgctgcgcggagtgagccgccatcaggatatgctctataaaggaaatgctcttacaaaagaggatcattacgaagatgcaaggctcatcaaggagctgggggcaaacacgattcgtctggcacattatcagcattctcaggatttttatgatgcctgcgatgagatgggatttgtagtgtgggcagagattccgtttatcagcgtgatgaaccaggatccggatgcacatcagaactgtatcatccagttgaaagagctgatcattcagaattacaatcatccgtcaatttgtttctggggtatttccaatgagattctgatcggaggaatttcagaacagttagtggaaaatcacaaagaactgaatgctcttgcgaaagaaatggatccaacccgtctgacgacgatcgcgcatgtgtccatgacaccgatcgaaggaccaatgcatgggattacagatgtggaaagctacaaccattatttcggatggtatggcgggaaaatggaagacaatggtccgtggatggacaacttccataaaattcatccggaaatctgccttggattgtcggagtatggatgtgaaggaatcatcacgtatcacggtccgaacccggcatgcaaggactacagtgaggaatatcaggcgctgtaccatgagcatatggcaaaaatgctggaagaacgtccatggatctggtccagccatgtctggaacatgtttgatttcggatgtgcagccagaaacgaaggcggcgtagcaggacgaaacaataaaggtcttatgaccattgacagaaaagtgaaaaaagacagctactatatttatcaggcatactggaataaaaaaccgatggtacatctctgcggaaaacggtatgcacagcgtgcgggagaaatgacacagattcgtgtatattccaaccagccgtctgttatactattcctgaatggagaaaaagtagaagaactttccgcagacaaagtgtttgtatttacagtggcattaaaagacggatttaatatcatcacagcacaggcaggtgaggttcaggatacgatgacactggaaaaagtagaaaaagaaccggaaatctatgtacttccggaagtgaatgaacgtgctgagggtgttgccaactggttccagacagtcggagatatggatttaaaagcgccgatggaattcccggagggaagatacagtatcaaagatacaatggaagaattggcaaaaaatccggaagcaatggaaattgcttcaaaagcagtaaaactgatggcaaatatgatcgtatcaccgggggaaggcatgtgggatatgatgaagagtatgtcttttgaaagactcagtgagatggctggtgatctggcgccggagggatttgtggaaagtgtcaatgcgaaattgattcagattaaaaaagcataacaatctggaaggagaagaatgccatggcaaaaacaaatcaatcttcagttcctgcatttggaatgaaagataaattaggatatatgtttggggacttcggaaatgattttaccttcattttgtcctcgacgtttatgatgaaattttacacagatgtgatgggactttccgctggggtcgtaggtatgctgatgatggcggcgcggtttgtggatgcgttttcagatgtgacaatggggcagatcgtcgatcgttccaaacctacaaaggatggaaaattccgtccatggatcaagcgtatgtgcggtccggtagcaattgcaagttttctgatctttcaggcaggatttgcagatatgtcctatggatttaaggtggcgtggatggtgatcacataccttctatggggctctgtcttttacacagcaatcaatattccgtacggttctatggcttccgctatttcagcggagccaaatgacagagcatcgctctcaacatggcgtacgattggatccacgctggcaagtctggtgattggagcgggaacccctcttgttgcttatgtgactgtagatggcaatccagtactttccggaagccgtatgacgattattgcagggattttttctgtatgtgcagtcatctgttatgtgctttgtttcaaactggtcagggagcgtgttccggttccggcaaataatcagaaatttgatctggcggcactgggaaagaatctgattacaaaccgggcgctggttggaattattgtggcagcactgcttctgctccttgcaatgcttggaatgcaggggatggcaggatatgtatttccgaactattacagaagtgcgggagcacagtctgcagtttctcttttgagcaacattgcggtacttgtaatctgtgcgcctctggccggaaaactggcagccagatttggaaagaaagaactctctgctgcagcatgtctgatcggtgcggtcagttatcttttgtgtctgatcattcatccggataatgtgtgggtctacattgcattttatgttcttgcatttatcggacttggattgtttaacatggtaatctgggcaatgatcacagacgtgattgatgatgcggaagtgaaaaacggagtgcgggaagatggtacgatttattccgtgtattcctttgcaagaaagctgggacaggcattttcgtccggaatggtgggaggtcttctttccctgatcggatattcgcaggcaacagcattcgatcctgtagtgacagaaggaattttcaaaatttcctgtattgtgccgatcatcgggctcacagcagtggcacttgcattgatttttctatatccgctgaataaaaagcgagtagaagaaaacagtaaggaacttgcaagacgcaggggagaaaaatagagaaaatgtacgagagactgtctgaaaacagatcgtcgtaaacagggaaagcagcgattcatctgagtcgctgctttgttacgtcataacaaaccggaatgtaagaaaaatttaagatttacattgagttttttttaagccgccgatattatagtttacatagagtaaaggaatacaggagggcagcatgaacggtgaaacgatacttgttgtggacgacaatcaagaaattgtctattcgatcagtgagttactgaaatatgaaggatatcaggtggtaaaagcatatgatgggatggaggctctgaatgctttggagataaacaacattgatctgattttattggatgttatgatgccgaggctgaatgggttgtctgcattgatgaaattaagggagaactatcggattccggtgatcatcctgtcagcaaaaacagaggagagtgataaagtatccggacttgttctgggcgcagatgattatgtagaaaaaccatataatccggcggaactgatcgcccgcataaaagcacatctcagacggtatcgtgcatggggaggtgcagcgccggaagcagacagtgacaccgttgtaaatggagggcttgtgctggataaaaaaaggcgtatcatacttgtggacgggaaagaagtccggctgaccgccacagagtataaaatcctggaatttctgatgggacatctggggcaggtgttttcagcagaacagatttatgaaaatgtatggaaagaatcggcaaattatacggtggaaaatacagtgatggtacatattcggcatatccgggaaaagattgagattgatacaaagaaaccaagatatgtaaaggtggtgtggggcattggctacaaaatggaaaaatatcattgagacaggaaaacgtttgttaaagcaacagtggcaggtattagtaagtgtcatgttggcaggatgtggaatttttgtcttttatatcctgatcgcttatcgaacctattatccaacagaaaaaatcctgtattttgggatactcgggaatattctgttaggaagcgggactgcatatctgttagaaaagggactgaaccgaaaatatcagaactggatcccaaaaggagatgcttattatcaggaatggagagcagaaatgaaaaaaatggagcatcttcttcaagtgatcggtattctggcatttgcagcagcaggtatcttctttgtgctgcagagtaaatttcgagagtactggagctggtattacaattatgctgccggttatgtgatgctctttacagcattgattcagtatatggtgtggcagtttgtgcgccgacggtttgatgagaagagacgagaaatgttgatgggcaaactggaggaaatcaatcaaaaacggattgcagaagcgctggagagcgaaaaaaagagccttgcaaaagtttcacgcagtgaccagcttcgaattgatctgattaccaatgtgtcgcatgatctgaaaacgccgctgacttccatggtgggctatattgaactcatcaaaaaggaagaattgagcgaccttgtcagagattatgtggatgtgctgtctgaaagagcagaaaaattaaaagaaatgataaacagtttgttttctcttgcaaaagcaagcagcggtaatatcgaactgcatccggaaaagtttgaactgaatcgtctggtagaacagatttttgcagatatgcatgatcatgtgaaagagagtgagctgcagtttgtaaaacagtttacagaggaaaatacagaaatcatttctgataatatgtatttttacaggatctgccagaatctgattgagaatgcattgaagtattcggcaaaacatacgagagtgttcgtgaaaacttatcaaaaagagtcttcaaatcatctgtgtctggagatcacgaacaccgcaggatatccaatggattttacaaaggaagagattatcgagcggttttttcgtggggataagcagaggcccagtgagggaaatggactgggacttgcgatcgtaagtacgtatgtgaaagcgcttggcggagagtttgatattaaaatcgactgtgatcagtttaaggcctgtgtggagatgccgctttcggcaatcacgattacataaaaatcaaagaattacgaaataagcacacggggaattttccccatgtgtttatttatctgtattctccttaaatttttctttagacacaagaatttcttcgatagcatgttttacagccattttaattgtgaaatataagatagggatcaatactaataaaagcagtataaggtctaaaataataacatccaatagaaccaccccctacattgtctgaaatcattgccaaatctactaaaataattataagacacactctataaaatagcaataaaagttaaatgatatctgcctttttcaatagaagaggtaggtcataaacgggagtttgacagtcgaataatagaaaaataccttgacaaatcccttacattgtgattatatgaacatatgaacagttattcatatgttatatatggagggaaaggatatggcaaaagaagtattgacagaaaaaagacataaaaatgatcatcaccaccatgaagaatcatgtggatgtggtcacgatcaccatcacgaggatgcatgcggctgcggacacaatcaccatcacgaggatgcatgcggctgcggacacgatcaccatcacgaagatgcatgcggctgtggacacgagcatcatcatgaggagcacaaagaggcagatcatacttttgatcatgcagagaagcaggtgtatattctggaaaacctgggatgtgcacattgcgcgtctaagatggaagaaaagattcaggcactgccgcaggtagagtttgctgcaattaccttcgcgacaaaacaactgcaggttgtgacgaatacggatgcggagctgttagaggagtttcagaaaatctgtgcatccattgagagtgaagtggttgtgcgaaaaagagacggaggatcaaccggaaaaagggagtctgcaaaaggcagattttcagaaaataaaaaggatctgtgggagatcggaatcggagctgttctgtttgttctgggtctgtttacacaggagatgaatggatggatttcctttttcgcattgatcataggatatctgatccttggaaaggatgttcttatcactgcggcaaagaatatcggaaagggtcgtgtatttgatgagaatttcctgatgggagttgctacaattgcagcgatcgtaatcggagattacaaagaagcagtgggtgtaatgctcttctatcgtgtaggggagttatttgaagatatcgcagttgcaagaagcagaagtcagattatggaggcagttgatctgcgtcctgaggttgtgaatcttgtagagcaggatggaacgatacgggagattccggcagaggaggcaaaagttggagatgtgcttctcgtccgtgcaggagaccggattccactggaaggtgttgtactggagggggagagccgtctggatacttcaccggtaacaggggaaccggttccggttgccgttgtaccgggcagcagtgtgacttccggatgtgtgaatctttccggtgtgctgaaaatgcgtgcagagaaggttctggaagattctatggttacaaggattttgaattcggtagaaaatgcagcagccagcaagccaaagatcgaccgttttattacaaggttttcaaaagtatacacaccggtcgtggtagcactggcagtggcaacagcaattatcccgtcgatcctgaccggggactggaactactggatttacacggccattaccttcctggtaatcagctgtccatgtgcgcttgtgttgagtgttccactggcatttttctcaggaatcggagcaggttctaaaaaaggaattctgtttaagggtggagttgcgatcgaggcacttcagaatgtaaaagcagttgtaatggataagacgggaacgatcacaaaaggaaattttgtcgtacaggagattgttccggcaggatcatacagtcaggatgagctcctaaaggcagcagcatcctgtgaagaagcatcttctcatccgatcgcagtcagtattatggcagcggcaaacgagagaagactttctgttgagcatgcaaaacagataaaagaaatttccggaaatggaattttagcagaactctcagaaggaactgtactttgtggaaacagaaggcttttggagcagaatcaggtagatctgtctgcatatcagccgaaagcgtatggaacagaagtattactggcagtagacggtgtctatgcaggatatcttgtgatttcagacactgtcaaagaggatgcatcgcaggcagtggcagccatgaagcaacagaatatccggacagtcatgctgaccggagatgcaaaagagaatgcgcaggcagtggcagagaagattggaattgatgaagtgcatgcaaagcttctgcctcaggataaggtaacagaattacagaagatccgacagaaacagggaagtgtgatgtttgtcggagacggaatcaatgatgcgccggttctggcaggcgcagatgtgggagctgcgatgggaagcggagcggatgcagcgattgaagctgcagacgtggtatttatgacctcttctatggaagcaatcccgcagtctttgaagattgcaagagcaacgggaagaattgcaaaacaaaatgttgcatttgctctggtgatcaaagcactggtcatggtatttggtcttcttggtctggccaatatgtggatggctgtgtttgcggataccggtgtggcggtgatctgtattctgaatgcaatccgcattctgtataagaaactctaaatccaaaatcaatgatattaccgcagggcggcacagtcgaaaggctctgccgctctgttttcttatagaaacagataagacgttgacccgcacctgtttttttcgtataataaaagtcaatcggtgtctcaaaaacaagagcgggattacaggtttttggggaaccggaagggagaaagaatatgagaaaattagaagtggaacattgtgatctgatacattctcatagtgatacagtcagacagatacaggaaaagattccggaagagcaggagatcagagggctggcagatttttttaaggtatttgcggatgccaccaggatccggattctgtgtgtgctgtcctgttccgagatgtgtgtgtgtgatctggcgcagacactggatatgacacagtcggcgatttctcatcagctccgactgttgaaacagatgaaactggtagtcaatcgaagagaggggaagacggtgttttattcactggcggacagtcatattaagacgatcatgaatcaggggatggaacatatcagggaatagatatgaagaaagaagtaaagcgaagagccatagaatgtgcggcagctgccgttttgtatattgttgcgatcgtgggaagctcgtatgcggagctggaaagagagatgcgtctgctgatttttctgcttccgtatctgatcatggtttttgcgacggtcaggctgctctggaacaatctgaagaaaagaaagttgtttgacgagaatctgctgattttgcttgccacagcaggtgcatttgcagttcatcgctattcggaggcagtgggagcgatgctgtttttccagattggaaagctgctggaacttatttccatgagcaggacgagaaaatctattgagaaatttatggatatccgtccgcagtatgccaatttaaagatcagcggcggggagatgcaggtaccgccggaagatctgaatccgcggcaggttattattatcaagccgggggagaggatcccagtggatgcgatcgtgacacaggggagcagtacgttagataccaaggcgctgacaggagaatcggagccgaggcatgtgaagatcggcagtcatatttacagcggaagtatcaacttaagtggtgtgctggaagcacgggtattgaaggcgtctgcagattcgacagcatccagaatcattgatatgatatccaatgcggacaacagacgggcgcagacagagaattttgcagaaaaatttacccggtattatacaccgcttgtaacgcttttcggaatcctggtgatgatccttccgccgatgatgtttgaaggggcacagcagggggcgtggatctatcgggggctgatcgtgctggtggcagcgtgtccgtgcggacttctggtatccgtgccgctggcattcttaggcgggatcggagcagcttccagacagggtgtcctcatcaagggaagcaattttctggaagcattgtcaaaggcagagacttttgtatttgataagaccggtactctgacagagggagtattccgggtaaaagaagtgtgtccgaagtcgatgactccggaggaacttctggaactgacagcatatggggaagcatactccagtcatccgatctccggatctttaagggaggcttacggcaggccgatcgacaaagcaaggatcggggcagtcagagaatttccgggatttggtcttgaggctgttgtggacggaaaacaactggagattggaaattccaagtttatgaaccagcaggggtatttttatcaacgggtggctgatatcggaacagcagttcacgtagctgtggacggagagtatgcgggctatatcctgatcacggatgtggtaagaaaagaggccggcagacttctgaaatggatgaaaaaacaacagatcgaagcggtgatgatcaccggagataatgaacgggtggcagaagatgtggcccggcagttaaagctggattatgtatatgcaggcctgatgccggaggaaaaggtagagcaggtcagagaatttatggaaagccatatggaggatgagaagctggcgtttgtaggggatggaatcaatgacgcgccggttcttgcacatgcggatatcgggattgccatggggggcctgggctcggatgcagctctggaggcagcggatatcattttgatggaggatgatctttcccggatcgtgaatgcgatccggatttccagaggaacgattcgtgcggtgaagcagaatctgatctttgccattgggatgaaagttcttcttctggtgctggcatcctttggctatgtaacaatgaaaaacgcaattttagcggatatggcagtgatgatgatcaacttattgaattcattctgggtgctgaaatatccggaataaggggtgtacaacatgaaaagagcaacattgcttgcattggcagtatctgcctgtcttttgacaggatgtaccaatgcactcaaagacggaacagggtatctggaagacggaaattataaagaagcagtgaccgcatttcagaaagcggtggacgaaggcaagaagacggcgcaggcataccgcggtctgggaatggcatattatgagcaggaggactatgaatctgcaaaagatgcatttgagaaagcaatttcagcaggcggagaaaagaatcaggtcatttataatttactcggaatctgcgggatgaagctgaatgattacaattatgcactggagcagtttaatcagggaatcagcctgtctcagaacagcggtacgtccatggaagatgcagaaagttttagcgaagtgcttcaggagatgcggttcaatcagatcgtatgttatgaaaagctgggtgactgggagaatgcaaaaaccaagatcgcagagtatattcaggtctatccggacgatgcagatgcccagagagaagcaaaatttctggagaccagataaagaatacaagggaagaagaggatacgctgactgcggagaagattctgcggtcagcgtcctttattcccggggaggagaaaggagagcgtatgccgggatatcagattaccgagtattgtcatcggatgataagggagcatatcaaagaaggagactgctgtgtggacgcaacggccggcaatggaaatgatacagaatttctctgtcgtctgacaggggcagacggaaaggtctacgcattcgatattcaaaaagcagcagtagaacacaccagaaagcgtctggaagaggcgggactctcagagcgtgccaaggtgattctggatgggcatgagcatatggagaactatgtccgggaaaccgtgtcagcgatcacctttaatttcggttatctgccgggcggtgatcatcagatcgcgacacaggctgatacaagcattcaggcaattgaggcagggcttcgcctgctgaaaaaaggcgggatcatgagcctttgtatctatagtggaggagacagtggattcgcagagaaagaggcactgttgtcttatcttgagacactggattccagaacatttttagtgattgtaagtacttattataaccgccaaaatcatcctccgattccggcgtttgtgatccggatcaaagaagaaaggggagaataaatgggattttcaatggatgtgggagttcctgtagtgaccgtgtttttacaggggcttttaagttttttttcaccgtgtgtccttccgcttgtgccgctttatctgggatatctctcaggaggcgcagggcagggagaactgtacggaaaacgggggcggctgtttgtcaatacgatttgttttgtgataggaatcagctccgcattttttatgatgggacttggtgtgtcggcagccggaagttttctcaataagaatcaggcaatggtatcgaggatcggcgggattctggtgattttattcggtttgtaccagcttgggatttttggaaaatcaaagcttctgggtacagagcaccgtttctggttaaagctcgacaagttgaagatgtcaccggtcgtggcgcttgtgttcggatttacctttagctttgcctggacgccgtgcgtgggaccggctcttgcgagtgtgcttttgatggcgggaagtgcaggaacaaagctgacaggattccttttgatcggtgtgtatacacttggatttatcctgccgtttcttgcagtgggattgttcacggcaaaagcgctcgggtttttcaaaaagtacaatcatgttgtcaagtatacggtgaagatcggaggaatcctgatgatctttatgggacttttgatgtttacaggcaagatgaacgcgatcaccggatatttatcgggaacagcaggaacacagacttcctcaaaagagacaacgaaaaaggaaataaaagaagaaaagcaggatacgtacccggccacagattttgtgctgcaggatcagtatggaaaggagcacagtctggcagactataagggaaagacgatctttttgaatttctgggcaacctggtgtggtccgtgcagaaatgagatgccggagattcagaagatttatgaagaaacacagcaggaagaagacagtgatctggtgatcctgggaattgccgcgccgggattcggacaggaaggaagccaggaggagatcgaagcatttcttgaggaaaacggatacacttatccggtgctgatggatacgacaggagaggtatttatggagtatgggatcagcgcttacccgacaacttttatggtagacaaagatggcaatctgttcggatatgtgcaggggcagttaaacgaagatatgatgcgcagtattatccgacagacgatggaaggcaagagagagtaggagaaaagcaatggcgttatatgaaatggaagatgcgaaagaacgcgtcattttagtaggcgttcaggaaaatgatgcggagccggaggaagaatccttagacgagctggcagagctggcacgcacggccggtgcagaggtggccggccgtctgatccagaaacgagaggcgatgcatccggtgacgtatatcgggaaaggaaagatcctggagctgaaggaacttttgtgggagacggacgctacgggaatcatctgtgacgatgaactgacttccgtgcagctgaatcatctggaggaagagctggaatgtaagatcgtggatcggacacttctgatcctggatatttttgcgggaagagctgtcagcagagaaggaaagatccaggtagagctggcgcagttgaagtatcgtgcggcaaggctgataggacttcgaaattctctgtcccgcctgggaggcggcatcggaacaagagggccgggagagaaaaaactggagatggaccgccgtttgatcagggagcggatcagccgtcttaaaaaagaacttcgggaagtggaagagcacagagagaggcttcgtactcagagaaaacgctccaatctgaaggtggcggcgctggtgggatatacgtcagcaggaaagagcagcctggaaaatgcgctcacaggagcaggtgttttagaggatgcgatgctgttttccacgctggatacgacgacacgctctctgaggctggcagatacacaggagatcctgctcagtgatacggtcggatttatccggaagctcccacatcatctggtagaggcatttaagagcacactggaagaagcgaaatacgcggatatcatcatccatgtggtcgatgcttccaatccccatcaggatacccagatgtttgttgtctatgagacactgcgtcagctcggtgcggagggaaaaccgatcattaccgtattcaacaaacaggataaactggaaacaccgggatatttccgggattttcatgcagagtactcaatcccggtttccgcaaagacagggcagggcctggaagaattaaaagaagcgctgcttgagattctgcgaagagatcaagtatatatcgagaggctgtattcctttgcagaagcgggaaagatccagctgatccgcacccagggacagctggtgtcagaggaatatgtaccggatggcattgaagtgaaggcatatgtgccgaaagaaatctggggaaaagtgtaaaacttttccctatccccacacttcctgggcaatctctttcaccagtgcaagcttcgcccactgttcttcttctgtcagtttatttccaatctcgcaggatgcgaatccacactgcggacttaagtaaagccggttcagaggaatgtattttgcagcttttgcaattcttttctttatcacttctttttcttctaaaatcggtgacttgctggtcacaagaccaagtacgacttttttatcatcggaaacaaagcggagtggttcaaatcctccggagcgttcatcatcaaattccagataataggcagatacattttcattggcaaaaagaaacggtgcgatcggttcatatccgccggaggatgcccaggtggaatgataatttccgcggcatacatgggttgtgatcacaagatcttcaggtgcattttccagagcgaggttattcagccgcagatatttttcagcctcttcttccagactgacggaatcgttctgtcgtgcctcccagtaatttttgtcgcagaacatgccccatgtacagtcgtctaattggatgtttctgcatcctgcatcgtagagatcccggatgacagtccggtatgcctgtgcaatgtcctgaatcagttcttccagatctggatatacggccagagtctgtgttccattgtcttcccggaagagttctgcaagaagctgggcaggtgcgggaatggtctgtcttgcaatggtgtgctcatcctcaaactgtttgacaaatttgaaatgttccacaaaaggatgctgttctccgctgatttttcctgtcacgcggacagaaccgtgagtggtttcttccccgtggaagaaatagccgtgatccagttcaatgtgttcgattccctcaagtccccacataaaatccagatgccagtagcttctgcggaattctccgtctgtgatgacagggtatccggcagccttctgctttttgatcagatctgtaattgcttcattttcaatggattctagctcagcctttgtgatctgtccggcttcaaaatcagctcttgcctgttttaagtgtgcaggtcttaaaaaacttccaacataatcaaaacgaaacggtgcgttaaaatttcccatagtaattctcctgttctgtaaattcgtgattctatgggatttattgtagaagaggagaggtgttttgtaaaatactgaaaataaatagcttgctatagaatcaaactatagcaagcctgctgcgttttatgaaaatagtgttttataaataagggattccgggtacttccggataacttcccatggagatcagaagctgaagtcccacatctcttgcggtgagcactgcattttttacggcgcttgcatcgccggttacggcggcaatgatctcgttggaatgactggttccccggtttggagtcatgtatttgatgatctctaccggagaggatttcaatgcaaggtccgccatgacaagaccgatcgccgcaggagaaccgcagaagaatccgaacggtttcccgatcggggcgtcaaatgccatgttcagcgcctgagaagcgctggcagaataggtgaattccagatgcccggcctcactgatataaagctccccggcatatttttcggtgtattccagtgcgatctctacggcgcggcgcacatcagagacactgtagccgccgatgatgataaagtttccgtgaccgccccatcctttggtatccctcggaagttcgatggaaatgatctcggtgttggtagattttacggcttcatcagctgcattgatctgtccggctgcaccggtacgggagcttaacagtcccagacttttgtaaggcttgtcaatctgcatctgctgaagcagtgcgtcattgacgcccgggattacaagtccgatagtatccagtacggttgtcccgacaaattctgtcatggaacagtccatggatattttttgaatttcgttgatatctaacataatgaaaactcctttatgacatacttccaaattaaatataaccgccgtccaggccaatgatctgtccggtcaggtaagaatgaccggatgcaagggtgagcgccagcgcagccacttcctcgctgtcggcaaagcgtccggcggggatttcttctcttaaagcttcgcgttcttcttccgaaaactgtgcgttcatagcagtgtcgatcactccgcacgcaatggcattgacttgtacattacttggtgccagttctttcgcaagagcctttgtcagtccgttcataccggacttagtcgcagaataagcagcctcgcaggaggcaccgacggttccccacatggaggaaatgttgatgatctttccgcttttctgagagaccatgtgaccgatggcgctgcggcagcagtaaaatacagaagaaagattggtatttaaaatctcggaccactgggcatcactcatatcctgcaaaaggccgacaaaggaaatcccggcgttgttgaccagcacatccagccccgggcagatagattcgatgatggcaaacatctttctcacatcatcgggattacctgcatttcctgggagcagtgtgcaggaaccgtgttcgtcaaggatttctttttctacctgctgcagggcatccagagaatgccggcagttgagaaatacatgaaaatgatttctggcaaatgcaagtgcgcaggctctgccgatcccgcgggatgcaccggtgatcagtacatatttctggttcataacatactccatttccagaaggagaacagctgtaaaatgctgctccttcagctctcaattctgtagttattatacaggaagcagaaacgtttgtataccatatttccagaaaatccgaatggggaaagcgggttgcggttgtgattcacaggcccttgtgctattattttgatagagaaccggtgtgtgcacatagtaggaggaacggatatggtagaggaagcccgaagctttgcagaaaaagcacatgagggacagtttcgaaagggaacgaagcgcccgtatattgtacatccgctggaggtggcgaagattgtgtcaacgatgacggatgatgaggagatgatcagtgcagccttgcttcacgatacacttgaagactgcaggcaggtgacaaaagagcagatcaaagaggcgttcggcgagcgtgtgcttgagatggtcaggcaggagagtgaggacaagtccaaaacctgggtggagagaaaaagtacgacaatccgacatttgaaaacagcgcagagagaggtgcagatgatcgctcttgcggacaagctgtccaatatccgggatattgaccgggagtatccggtggttggggaagaattctggaaccgctttcgaatgaagagcaaagctgcaattggctggtattatattggggtaaaagatgcgttgcaaaaagattttgcgggaattcctgcatatgaggagtacagggcactggtagaaaaaattttcggcagtacatcagactggcaaaggagagaacacaatgaagaagacaaagatcatatgttttgcgaataataaaggaggaagcggaaagtccacgacttgttccaatgtcggatacggactgcgggagctgggatataaggtacttctgattgatggagacatgcagctgaacctgtcgctttccttgtttgatgaggatcaggtgcttgcgtttgcgcagagtgaaaagaacttgtatgagggattgaagcgccaggatgatctgtcggattacattgtacattccgcttatgaagggctggatctgattccgtcttccacattaatgagttcgatagagtatgaattgtttacgaaatggcagagggagtttattctccgaaaatgtctgaaacaggtaaaggaatccggagcgtatgattacattctgatcgatgcgcctccgactttgggcggctgggttatgaacatcttgtgtgcatccgatgagatcatcattccggtggagtctacgccgtggggattgttcggtctgggaaatatgtttgaatttctggaggaagtccgtcagatcacgccggatctgaagctgggcgggatcgtgatcacgaaagtagataccagaaagagttatttcaaacagactctggagactttaaagagtctggaggatgttcctgtatttgatacctatatccgggtggacagtgggatcgagtggtcgcaggataacaatgcgccgatcatggcatacaaaaaaagcagccgcagtgccacagagtatatggaactgacaaaagaaattgccaaaatggagtaggtgagtcatgcacagggaattgttggatgccttgtctgtcattacagaggaagagcagcggatactggatgaacaaagagggatcgacccacagctttatacagagaaaaaggaactgatcgtagacagcgaaaaattgttgaaaaaagggaagctgatacaggtacgtccacatacgagatttgttaattttccgaagcataaacacaattatgtagaagtgatctatatgtgtcagggaacaaccactcacattctgaatggaagtaaggtcattctggaggcgggggatcttctgtttttgaatcagaatgcagaacaggagatccttccggccggcgagcaggatattgccgtcaattttattgtgctgccggaattttttgatacggctttttccatgatggatatggaggaagaaaatgcgttgaaagaatttctggta

SEQ ID NO: 7064 - DNA, 146849 bp, Unknown
  gut microbiota DNA sequence
cattcaaggaggtatttatatgaaccagacaacaccaacacagcctgtaaacagactgtacaaatcgaggatttttgccatgctctacagtgacaggaaagatctgctcgatctgtacaatgcggtcagtggaaaacattatgaagatccggaattgttggaaatcaatacactggaaaatgcaatctacatgtcgatgcataatgatctgtcctttctcattgattccagactttccctgtatgagcatcagtccacctacagtcccaacctgcccctgcggtatttgttttatatctcggatctgtattccgggatgacaaaagatgaaaacctgtatggtacgaaatgcattcagatcccgactccgcagtttgtgatcttttacaatggaagtcaggaacagccggatcgaaaaattttaagattgtctgatgcgtattgcgtcaaagaagaacatccggcattggagctgactgcggtgatgctgaacatcaaccgcgggcataatgagaagttgaaggaaatgtgcaaatctctgaaggattactcggaatatactgcaagagtgcgggagtacgcccaggtaaagccggtggaagaagcagtggaacaggcaatcagtgagtgtattcaggaagggattatggcagagtttttgaaacaaaacagagcggaggcgaaacaagtgagtatttatgaatatgatgaggaaaagcatatgcggcaggagcgggaagcgtcctgggaagagggcaaattggaagggaaaattgagcttcttagaatgcagattcaaaagaaactggtaaaaggaaaatctatttctgagatttcagaggaacttgaagaagaggaagaggttattgcagagatgatccgggaaatgggagaagagagggcaacgggcaaagaagaacaatagaaaatacatatttggggctgtcgggaattaaccgatagccccttgctaactttgattgcgttggtgtttatacaaaagataaagaacaactcgaaaaatataatcttttaccggctaaagtcatgttagagatagcagaccaaaagtctgtgaaagggttaggatatattggcggagtaatgggaccgaaagaatttacggacagtaaatcttatgttgttcagatgctttgttccggcaaacacaaaatttcttatgtagaacctactcttgtgtatggaaacggacgcaatgatatcgtgtttagctcgtacaaactgtctgttttgtgcgagcttttttcatagctgcagttttctgttgtaaaagatgttgttatccgccatattatgcagaaatccggttcttgactttgtgtggtaaaatgtagaaaaaggagggaacagcatgaaaaacggaacagaacatgatatgacacaaggagcagtggccgttcctctgattggctttacgataccactggtactcggtaatttttttcaacttttttataatgcagcggattccatcattgtaggtcgatacgtgggggagcgtgcattggcagcagtcggaacatccacaccggtgatgaatcttgtcatccttttgatcagcggtctttgtatgggggcaagtattttgatgagttcccagtttggagcgggaaattatgaacagttatcccgtcagatcagtaccacattgttgtccggctgcggattttcaatcggtttttccgtgctgacaatcttggtgtcagaaccattgcttcggctgatacaggtaccgaaggaagtgatgccggatgcgcttgcgtatctcaggatcatttttatcggaattttgtttacgtttatttacaattttcttgccaatacacttcgggcactgggcgatagtaaaacgccgctgtattttctggttgccagtgcaattttaaatgtgctcggagatctgctttttgtggcagtatttggatggggcgtggcgggaagtgccatttcaacggtattaagtgaggccagcagctgtcttttttgtgcgttgtatatcaggaagcgggttccgcttttgtgcctgggaaagcggtggtttgtgtttgataaaagattgatgaaaaagactattagttatggaagcaccagtgccatgcagcaagtctgccttcagattggaaagacaatcattcaggcagtggtcaacacccagggagtcagtgtaatggcagcatttacggcagtaaaccgcgtggatgattttgcgtatattcctcagcagaacatcgggcatgccatgacgacttttattgcccagaataagggggcaggcaaaaaagaaagaatccgcaggggatttcagagtggaatcgggatcgaactggtatatggtctgatcttgctggttctgatgtattttggtgcagagaagattatgggattgtttacctctcaggaagatgcacaggtggtggcgctgggaaggtcttatctgcatctggtttcctggatgtatattcttccggcgataacgaatgggattcagggatttttccgtggcatgggagatctgaaggtgacactgtacagtacttttatgaatatggcagggcgtgtgctggcagttattgtgatgtttctggtattcaacttgggatttgtaagccttgcgtgggcgaatctgatcgggtggatcgtgatgcttctttttgaaatccctcttctgatgagacagttaaaagagttgagaaaataaagacgcagaaagaaaataggagtgtgagagtgaagacagatgctcaatcaagataatctgtcttttttctatttcggaatagaaaatatgcacaaaaaaataagaaaaaaatctatgatttatacaaagagtataaaatgaattgacagtgaaaaaatcatatgctatatttaagccaacttaatgatgctgttgtaaaataagagttgtaagactctatatattttacaacaaaaatgaaccggttcatttttaggaagaaaagaggagaaatagcatgaaaaagaaaaaagtaatgagtgttgtattggcagcgattatgaccgtaggactgttgagtggatgtggtacatcaaaggagtctgacagtaaagaaggggaacaggtgactttaaattattggacatggtttccaagcacagatcagatcgaagagacggtgaaagcgtttgaaaaagaaaatcccgatattaaaattaacatgactgtgatggagagcaaggcatttcaggaaaaagtgccgttagctttaagcacagaagaggatattgatgtaattggggttcagccatcggcatttgcagaagaagtacaggattatctggctaatttggatgaattaatgccagaggctgcaggagaggattggaaagaactgtattcagaaaaatgtctggagcagggaaatcatttgacaagtggggatacaaaaatgcttgtgctgacaaattcaggctccatgattggatattataatgcggcacttttaaaagagttgggatgcgatgttccaaaaacaatcgaagaatataaagtggctgcagaaaagttaaaagaaaaatatccggataaatatgcaggggtatttgcaggaaaagacgcgtgggtgatggatgaaatgatgcttactgtattgggacagcagggagattactataatcagtggagatatgacggagcagatgtagacagtaaagaatataaaatggcatttgaaggatttaaaaaattctttgatgaaggtatttttacaaaagatacattagatttagattatgcaagtgcaacggaagagtttaccaatggaaatgcgcttgtgtattatatgggatcgtgggaatctccacttctttcaaaacagttgagagaaaagaatggaattgaacttgaagatgttggtgcgatggcattgccgattgtggagaaggatggaacagcatctgtcagatcttatattgattctggaattggaattgtagactattcagagaaaaaagaagcagctgcaaaatttgtggcatatttgacacttggagaaggtgcagatatttttggaaaacagctgacagggacttcggcaaaaaaagaattttcagtagatgaaagcctgtttgcctcagatacagcaaagcaagggtgggataccgttgtagagttaatcaacaacggaacagcggacagaaataatgtttccggatattcagatatcgaaggggcagaagtgcaaagttatatcaatggtacgaagacggtagacgaggcattgaaaacttgtcagaaagagtggaccagcggaaaatattagaaatcatgattagagggcaggaaaatggcagaattaaacaaattaaacaagaagagccagaaaagaaataacagggcggggtttttatttctcctgcccttgatagtgatatttatcgggctgcttggatatagtttttattttttgagcgtaaacagttttcgtgacgttacgattaccttcaggcatacagagtttaccggacttgctaattataagacggttttgacagatttgaaattttggcgttctttgctgaatacctttattttatcagcggcgaatattttttgtggattgacatttggatttttcattgcaatcgttttaaatttcaagatgaaaggcaagcgtttttttcatgcattgttctttattccgtccatgcttccgattgccttgatggcagcagtatttagctccatgctggaatataagaatggaattatcaatcagctgttgcgaggcgttggattggatgtactggcacagagatggctggcggatcccagacttgctattttttcggtgtgttctgtctctgtttttttgattggaattccgattatgtattatactgcagatctgacaacgatcagtgacagtgtattagaggctgcaaccatggacggagcaaagacacggcatcagttgtttctggtgatttatccgatgttaaaaaatacacataaaacaattatcttatccatgcttctcgggggattccgtgagatggaaagagtgttcctgatgacggatgggggtccgggaggaaaaacggaaattataggaacttatatttatcgtgcaacgagatcagcaggttcgaatattgggttggtatgcgcagcggcaattgtcgttctgatcgtggcatttttgatttcctttattcagctgagacttacagaaaagaatggataggaggaatcaacgatgaaaaagaaacaggaaaaaatgcaggataaagatctgttttcgatctcaaaaggaagcaggagaggaatggtcgtatttttagttttgatgacactgatctggatgattcctatttattctctggtgaaagattcgttaaaagtaaatggaattcagaactatgtatatgtcttgaccaataagatcaacggagtccctttttaccggtattttatgaattctgcaatcaatgcagtaggtgcgtcgctgctgctggtgctgatttgttcctttgcaggctttgccttttctaaaattgagtttacaggaggaaaatggatttatagcatggtagtcatgtgtcttgcaatatcaggtccaattttgattattccgttgttttacatatataagacagcgcatttgtataacacacacttagcggttattttatcagaatgtctgattacgatcccgtttggagtccttatgatgaagaacttttttgatggcttgccgggggaattgatggaatcggcaaatgtggatggagcgaatattgtacagacctattttaaaatttatttgcctttggcaaaaccagctgtgatcaatctggtagtattgcagttaatgtggtcatttcaggattttttattcccgctgatgtttcttacaagggatcaggcatacacaacgacagttgcagtaaatgcctttaaaggcgcttatggaatgagcgcgcagagccttggacgatacaatgcggcgttggtattgatttcgataccgacaattttaatttttgtatttgcacagaaatatattgtaaatggagtgacatcaggagcagtcaaagaatagagagaaagcgagaaaagaaatgaatacaacattatggtatgaagcccctgcatcctctttttgtgatgcattgccagttggaaatgggagtcttggggcagttgtgtatggtggagtgccagaagaatgtatgtcattgaatctggatacattatggtcaggaaccggaagaagaatggagcagaaaattgccaaacatgtattggaagatgtaaaaaaacaatgcgcacaagaacattattttgaggcacagaatctgatcgaaaggaagatgctagggcaatataatgagtcttatatgcctcttggaagttttcgataccattattatggaatagagaatgtagaaaattacagaagagaattggatttagaagaagctgttgtgcgaacagagtttacgtgcgcaggccggcaatatcagtcggaggtgtttgtatcaaatccagatcatgcgatggtagtgcatctggtatcagaaacaaaaatgaagattgatttttggctggaaagtaaattgcagacaatctcaacaatacagcgggaaaacagccagatgatttctggaaatgcaccaagtcatgtagatcccaattatgtagagagtgagaatccaattgtgtacatgcatcaggaactgggaatgccgttttgctgtcaaatgcatgtggacacagtggacggagatgtttcttgtgtggacgggaaaatacaagttcgcgatgccagagaaatacgaattttaattacagcagccgatggatatcgaaaaggcagttatgatatggatccttctatagaacattgttttgcttcctgtgaacagtatatgaatcgtgtgaaaagcaggacatatcagcaaatcagaagtacacacagaaaggattatcaggcactgtttgaaaggtccagatttcagttagaaacagaggggcgggaagagatacccttaaatcaaaggctaaagaggatcaaacgtggtgaaacagatttgggactatattgcttatattatcattttaaccgatatctattgatctccagttctcgtcccggaagtcagccggccaatttgcagggaatttggagtgagagtacccgaccagtgtggagcagtaattggacgatcaatattaatacagagatgaattattggccagctggtatttgtaatctttctgagtgttttgagccacttttgtgcatgttggaagaaatgagtgaagcaggaaaagaaacagcaaagaattattttcattgcagaggatgggtggcaaatcacaatgttgacatttggcgtcagacagaaccggttgcaggtctggcgaaatatgcatactggccgatgggaggagtatggctgagtgcacagatttttgattattataagtatacggggaatcggaatctgctgaaaaacagaatttatccggttatgtctggtgcagcccggttttgtctggactggttagaagaaggcgaagatggaaaatacagaacaccgctttctacttcaccagaaaatactttcttggacgaagcaggcagggagtgtgcagtaagtgcgggatcgactatggatttggcactgataaaagagctcttccaaaatcttagccttgcagcagaagtgctggagattcaagacgatatagtggaagaagtcagaaaagtatggataaaacttccagaatatcagattggtcaatatggacaaattcaggaatgggagaaagactttccggaacaggatccggggcatcgccatttttcaggagtagtgggatttcatccggggacaaccatcaatccatatgatacaccagaattggtagagggagtcaggcggtttattgaaagaaggcttcaatatggagggggtcatattggatggagttgtgcgtggctgatcaatttgtgtgcacgcttgggagatggaaacagcgctttgttttttttggccaaccttttgaaaaaatcgtcctatgacaatttgtttgatttgcacccgccattgggagaaagcaaaggagaaagggaagtgtttcagattgacggaaattttggagcagccagcgggatagcaagtatgcttttacgaagttgttatggaatgatcgaacttcttcctgcattgccggatgcctggaagtcagggcgtatggagggactgcttgcggaaggtggtgtagaagtcagtattgagtggaaggatcatcagcttgtgttggcagtgctgaagtcgtgcgtttcacaggagatagaagtcagatgctgcggtcagaaatggaagattcatttacaggaaaatgaggagaaagtaatcaaaggataaagaaagagttcgcttttcagaggcgaactctttctttatccagaggggaacaaatgctgtctgtgtaatgaaagagtggggcatgaatcagtgtcttggggtaatcagattgatcacccagcatacgtcggtagagcaatttagccgctgtaagtcccatttcatcggttggctgttcagaaaaggaaagtggaggatttacgatatttacaagaggaagattgtcaaatccaatgagtgaaatgtcttctggtattttcaggttcaaattattgatggcaatgtaagcgccaatttccatatcgtagttgctgataaaaacagcggtggggggatctggaagcttcgcaagcttcatcattgcttcgtatccgccttctgttgagtaatttccgcattgaatataatgtttataaattggaaggtggcactcgcgtaatgccttctcatatccatttagtctctgttgagaggtataatgatcaattcctccggtaataattgcaatttttgtgtgaccaagagagattaatttttttacgggttcataggaagcgcgttgattgtccagaatgatcgtatccgaggggtgatctttgataatctggtcgacaacgatcaatggagtatggttattctggattaattcaatctgttttccggtggaatcataaggaatcaaaataataccgtctaccatgcgatctaaaagaaagcgcgctttttgcaactccattgctgcatcattatggcattcacatacgattacagtatatccttttggcaaaagataggattcaatggatgaaatcatagaagtacaaaaattagaagtcagcatgggcagtaatactgcaactgagaaagtctgcgaattgcgcagtccttttgcgatattattaggcttgtattgcagttcctggattgcctgttcaattaacagtcgattggtttctttcacgggatgaccattgatatatttgctgacagttcccagtgaaagaccggatttttttgcgacatcgcgaattgtagctgccatgtgtgaaatctccttttttcatatctttttttattttaacatgaaagcagaaaaagcactactgttgtgtttcgaaaagcggtgcaaaatactcaattctggttgctgtgatcttgctgcaagcgtataataaagaaggaatacatcacaaaagcttagtatgcagtagaaaagagcagctagcaaacgtgatcgggaaaaagaatttcgaaaaattgtagtgaaacatattaaaaaccatttgattgaggagggaaaagtgatgaatacggtaaagataagaaatctggagatcggaaaagggatgccgaagatctgtgttccgatagtgggtagaacaaaacaggaaattttggaaagcgcaaaggaagccattgtggaacatccggatgtggtggaatggagagcagactggtatacagaagtgttccgatgggaatgtgtggaatatatgctgcagggtatgcgtgaaattttaggagaaattccactgttgtttacgtttcggactcagcaggagggcggagaacaggcaatagagctgttggcatatcaggaactgaatgaaagggcagcaggtacaaaactggtggatctgatcgatgcagagttgtcctcaggagaagagacggtgaaaaagttgatcaaaacagcgcacgatcatcaagtgaaagctgttgtttccaatcatgattttgaaaagacaccgtctaaggaagagattgtgaaacgacttcgtaagatgcaggaacttggtgcggatcttccaaagatcgcggttatgccgcagtgtaagaaggatgtactgacactgcttacggcgacagaagagatggcacataggtatgcagatcgaccgatcattaccatgtctatggcaaaagacggggttgtcagcagaatgtgtggagaggtgtttggttcagcactgacatttggaaccgcgggaaaggcttccgcaccgggacagattgaagtgggaaaattacgagaggtgttggaaatttttcattaatgcgagggatatatgcgaatcaaagcaaaagaaattgcgcaggaactggggctttcggaggcaacggtatctctggctctcaataaccgtccgggagtcaatgccaatacaaaaaagcggattttggaatgtgtaagagcaaagcaggagaaagaactgaagaattttgagacacaggaaaaatctattcagggcaaagtgataatgctcaactacgttaaaaacggaattattatgaaacgaagtcaagaccgtcatcctgtgatcgaaacgataaaagagattgtggaaagatgcgggtattcatttgaatatcgtctgtttcaggaacagtttgaacatgtggagaatctgattgctgaatgcagggagaaggatgtaaagggaatctacatcatggcggcagaaatgggaaaatcagatatttatccctttttagaacttcagataccgatcgtaacaggagataatctgttttatgaagagggaatcaatagttttctgatcgataaccgggaaggaatccgaagaggtgtggattacctgatagataaggggcatagcagaatcgtatatctggcagaagatattgatattttcaattttctcgaaagaagagaagcgtttgttctggagatggcaaagcgggagtgtggagatgcaagcaatcgtatcaggcatcttggcagcaatgtagaggaagctgctttttctatgggaaaatatctggatgaagggatgcggggagtgactgcatttattctggaaagttctgtcatttccatgggggtgatcaaagcacttcttgagcggaatgtacggattccaagagacatctctctgcttggatttgatgcagtcgcaccagtggaacttccgggatttgaattgacactgatcaaaggtacccatacgaaacgccacatagcagcagtgaagcatctgctccgttatatggaagatgaaaacgaagaaattatgagagtgtattataagacccggttttcagaaggggaaacagtgttcgataaaacaaaatatatttatgaatgaaaaatatttgatgacgggtgtttaaagaaaatttaaatacctgttatttttttataaatttgaggagagaatcagaggatatcggaagtgaaatctgcaaaatagcagaaaaaatgaaaggggattgagagtttttctgtcagatgttatcttggttttagataaagaacgcgcgttatgagtttacgaaaagcaggaggaaggataccatggcgaagaaaaactatgagaagctggcaaaggaaattgtcagatatattggcggaccagaaaatgtaaatgctctggttcattgtgcaacaaggctccgatttaaagtaaaaaacacacagaatgtagataagaaaaaactggagcagttggagggtgtgattacagtacttgacagcggtggtcagatccaggttgtaatcgggcagcatgtagcggatgtatatgatacaatttttgaagttacagacttaaaaaaggagaatccgagtgatgcagaggaatcaggggagaaaaagaatctcctgaatacatttatggatacgatttctggtatctttgcacctgtacttggtgtcatgagtggtgccggtatgctgaaagcgttgttgattttatgtacaactttcggttggcttaaggcggatatgggaacctatcggattctgtatgcggcagcagatggagtctttacgtttatcccggtatttctggcatatactgcagcaaaaaaattcagagcgaatgagttcgtggcagtgggagttgcagcggcattactctatccggatctgacagctgcatattctgccggagaggcattgacctttttgaaaattccggttgtgctggtaagctatacttcatccgtgatcccaatcgtgatttcagtatatgcactttccaaactggaaaaaggattgaagaaaatcgtgccgacagtatgcaaaacctttttgacgccgcttctcagtctggcaattatggtgccggcaacttatcttgtgatcgggccgattgcagatactgtaggaaaagcactggcttccggatatacaggactggtgggattgaatccgattattgcagggggactgcttggtctgatctggccggcagcagtcatgtttggtgtacactggggatttgttccgattgttatgaataatattgcagaatatggacgagatacattgtttaccatcaccggccccaataatatggcacaggcaggagctacacttggtgtattcctgaaaacaaaagacaaatcagttaaggaactggcaggtccggcagcgctttcggcagttctcgcaggaatcacagaacctgcgatctatggagttacattgcggtttaaaagaccatttttcatcggggcggtattttccggaattgcaggagctatcgtagctgctgcaggaacaggagcaccaacacttcttggaacaagcattttgacattgccgggatatatcggcgtcggatttgtcggatttttaatcgcgtgtgcgatcgcctattttggatctgcgattgtaacgtatttctttggatatagtgatgatatgcttccgaaaaaagaagaaaagaaagaagaaccacaggaaattattccggcaaaagatgaagcgcttctggcgccggtcagtggaaaagtaattcctctttctgaggtaagagatgaagcgtttgcgggaggaatcctcggacagggtgcggcagtaattccagaaaatggagaaatctgtgcaccgtgtgacggagtaatcagtgtgatgtatccaaccggacacgcagtaggcattaaatcagatatcggagcagagattttgatccatgtaggcatggatacggtgactttaaatggaagctgttttgctgtaaaagtgaaagccggtgattatgtgaaagcaggacagcttctggtcagagcgaatattgaaggaatcaaaaaggaaggtttggatattacaacaccggtcattgttgcaaatacagcagattatatgcaaattaagacggtagcagaggaatccgtgaagagcggagaagttctgctgaactgtgtttccaaatagaaacgaaaggagagtatcatgagcagagtaacagtaagtgaggataaaagcacattttgtcgggataaaaagccattcttttatctggcagataccatctggagtgcgtttacaaatataaccgaggatgagtggatttattatctgaagagacgcaaagagcaggggtttaacgttctccagatcaatacaatgccgcagtgggatcgttgtatctcggatatcggactgtatccctttgcgacagcggatggacatcggtttgactttacaaagtggaatgaggcgtattatgagcatgcggtcagaatgtgtgaactggcggaagaggaaggatttcagttggcgctggtggtgctctggttaaattatgtgccgggaacatgggggagcaaggttacggattgtaatgtgatgccgaaggaattcgttaaaacatatacagaaaagattgtacatgtttttgatcgatttgagccgatttacattgtaagcggagatacagattttgatacgccggaagcagtgtcctattatcgggatgcactggatgttttatgtgaaaaaagtccgcatacattgaaaacgatgcatatcaaacggggatatgattttcttccggaagaatttttggaaaaactggatttttatatgttccagtccggacataatcgggaagggcaggatatggcatatgttcttccagaaaatttccgtaagaaatatccgaaaaaaccattgatcaatgcagaaccatgttatgaacagatggggttcagcagaaaaatatatggtcgttttcaggcagaagataccagaaaagcagcatggagcagcattttgtccggggcttgtgcaggggtggcttatggagcgcatggaatctggaactggcaaaaactgaacaaacccgcaaatccaatccttggagaaggatttgacgcaccgtttccatggaatgaagcactacagtttccgggagcgtgggattatggaatgatccgtcagcttcttgatgagcttcatataggagagttgataccggcacaggaagtgttagagaatgagacaacacagattcgtatggcgcagacaacagatggcagatatctgttgtatcttccgcacagtacgaaggttgtgttaaacagagagttgaatggatgcagtgtcagggcagtggatctggcatccgggcacagagcatatgtaagtgcagtatgcagagaaggaaaaacagagattgcaatgcatccattttactatgatgcactgctggtcgtggaagcagacaaaacagacgttgagaaaggcagggattaaggtatgagcatatttccgaaaaactttttatggggtggtgcggttgcggcaaatcagtgtgaaggagcatatcaggaagatggaaaaggtttgagtgtgcaggatgtattgccgagaggaattcgtgggagcaggaccaaacttccgacagaagagaatttaaaactggaggctatcgatttttatcacagatatccgcaagacatcaaaatgtttgccgagatgggatttaaagtatttcggacatccattgcctggagtcggattttcccgaaaggggatgaagagcagcctaatgaagcaggacttgaattttatgaccgtgtatttgaagagtgccgaaaatatgggattgaaccgctcgtgacactctctcattacgagacaccgttgtatcttgcagagacttacaatggatggacagaccgcagaatgatcggattttatgaacggtatgtgcgtactgtttttaagagatacagaggaaaagtaaaatactggctgacattcaatgagatcaattcacttcttcatgcaccgttcatgagtggtggaattgcaaatatgcaaggactgacagaacaggatctgtatcaggcggcacaccatgaactggtagccagtgcattggcgacaaaaattgggcatgagatgatgccggacgcaatgattggctgtatgattctgagtatgccgacatatccgctgacaccatcaccagatgatgtgatcgcggcgatggatgcagagcatcgcaactatttttatggagatgtgcatgtacgaggaaaatatccgggatatatgaaacgatacttcagggagcatggaatccagattcagtttgctccggaagatgaagaaattctgaaaaatacggtagattttgtatcatttagttattatatgagtgtctgtgcgacatcagatcctgaaaaacagaaaaaaggtcttggaaatcttctgggaggagtaccgaatccaacactcaaagcaagtgactgggggtggcagatcgatccgaaaggattgcgctatgtgctgaatatgttttatgatcgctatcagaagccgctgttcattgtagagaatggattgggagctgtagatgttctgaacgaagatgagaatggaaataaaacagtagaggatgattaccggattcagtatcttaaggatcacctgatacaggtgggagaagcagttcaggatggtgtggaaattatgggatacacatcctggggatgtatcgatgttgtcagtgcatctactgcagaattaaaaaaacgatatggatacatttatgtagacagaaatgatgatggaacaggtacgatggaacggtataagaagaaatcattttactggtatcagaaagtgattgaaagcaacggggaagtgctatatagtgaagaagatataaatttaagtgaatagtattgtgtgggagaatgacggttctcgcgtttccgtatgagtgggtgcaattttttcccatcagggaagatacaatagtactcattttcaaacatctgttttaaaaccaggatcagcgtgttagaatctgtcaggttattgattacatagctatggacaatgaaataattctctaatgaagatataaacacacaggtagagtttcagagaatgtcataccttctttatgtgaaaaaggaaatgaaataagcgtataatactatttttgagtgcatattcagtttcggaatatgcacttattttttataatataggtaattgagaaacacgtttgcaatcctgatggaaatgtagatagagtcctacgttgtcagacaatcagaggtttcaggctacggatacttatattgatgaattttattagcaactattgcggtaataagttatgtaatgtcagcgagcaataaatcatcaggaagataggacatacaaattttatggtaggaatcttactttgcaaatgagttttgaggagatattttattttgtaacaaaaaaggctgtatctatgcggtttgtggtgttttgcaaacgcatatttatagtaatcaaaaggaggcaacagatgatttcaacagatgaaggatacatgaggctggaatatttctctgaaaatgttgcagcggataaaaaaagaaaagagttcgatataaaaaatcatgcattatgctacacaaaccaaaagccagattttctctttattggggattccattacagagtattgggagctaaatgcatattttggaagtggtaatcactttcttgttaataggggcattgcgggagatacaacaaagtacttaaaaaagcgattttatacagatgcagttcaattacgtccaagatattgtatcctgggaataggaattaatgattccatagagctggaaggggattattggaaaagattggagccgacaccgtataatcaagtagtggcaactgcaaagctgcatattacagaaattgtacaacaggcaaaagaagaaaatatctgcttgattctaacatctcttttaccaattcatattccgatcctgatggatgaaaggagtagaaaaaattatatcaaagagctgaatgagtggctggcagaagtggcgaagaagaataatcttatttttgtaaattattatgctacaatggtatttccaggaacagacaagccgttggataagattacctatgatggtctgcacccaaatgccaaaggataccagatcatggccacagttttacgtaatacgttaaaaaaatatgagattctaatttgaaaggagataccagagatgatatttgattcgattcagaataaggaaaactataaggaagacaggaaaatctatcaggcattatgctatttggcagaaataaaaagatgggaagaagcatttccggataccgtaattcagaaaggagtcatagtggcgaacccagtatcatttgttagcaaggaagaaaaggagtgtatgtatgaagcacatcaaaagtatatagatgttcattatattattgaaggagtggaaagaattgcaactgctgatgtaagtagtctgcaaatccaaacgccgttcagtgaagaaaaagatatcgggttttatcaaggggatgaatcaggcggttatctattgaaggcaggagagtttatggtgtgctttccaagcgatgcacataaggttgcaatgatggataaatcaccggaaatagtaaaaaaaatagtcgttaaaattaaagtttaaagaaattatgatgaaagcagctataatacatagttaggtttttccgatctttgaatctgttttaaaggaatattcaaagaaagggagaaatcttggtgtgtcattatagccgtttttttaatcaatggaggatgatatgtcagtggtagataacatacgatttacgtttttatatattgagttttattccatgggaagaacatgggtgtatccggaatcagtgattccgtatagtatattccgatatattgaaaaaggaaaggcggaactttgtattgacggggaagaaattattgtggaggaaaatcagattgtatatatcccgcagggatgcaaaatgtcttgtcgtgcgctcggtgaatcctttgagttttacagtcttcgttttactacctcggtattttatgaaggggaagacatgttggcggaatattatgggattccaagagtttcggtcaatgagggagaagatgtttactttaaagaaatttataagtgggtaaaaaaggattccatggtaaaaaaatgctttgtaagagggaatttggatcttctgattggttcgctggctatgcacgggaataaggttgataaggtgactggagatttcgtggaaacaatagaggaaaagtcattaagggataggaattcaaagaagaatgagcaaatcgatccaaggatctatatagtggcagattatattattctgcatccaagtgaaaagtacacgccacaaaagatggcagaaatggcagatcttagtaaacagagattcagcagcctatttaagattaatatgggaaagacaccaatggaatatgtgagagagattcggcttacaacagcagcaagggctttactggtaagtaatgacaatatcaatgatattgcgtatgcatgtggatatgaagacacgaattattttataagggaatttaagtcagcctttggttttactccgaatcaatatcggaaagtagcaagagagtaaaaaatgagtgtaaaatgctattattgagtgtgcgtttagtagatatgtataaaaatagtgactaaaataagattacaataaaacaaatgatgtggctgcattgggaaaatgaaactaaataacaacataacgaacaaatgagggtaagattatgaagaaaaaaacagctattttattagccggaacaatgattgcatctaccatacttgcgggatgtggttctaaagaagagggcgcagcaaatcaagtggcatccgaggagctgaaaggagatattacattttggcattcttttacacaaggaccaagactggaagtgatacaggaaaccgcggaccagtttatgaaagataatccgggagtaaatattaaaattgaaacattctcttggggagatttttacacaaaatggacaacggggctggcttcaggaaatgtgccagacatgagtactgcacttccagggcatgtggtagagatgatgaatgcagatgctttggtgcctgtggatgacttaatagatgatattggaagggacaaattttcaaagacggcattatcggaaggtgaaaaagatggggaatgttattccttgccactgtattctcacgcacaggttatgtggtatcgtaaggatttattggaggaagcaggactttctgtgcctaagacatgggatgaatttgctgaggctgcaaaaacacttacaaaagatggtgtgtatggctgttccttcccttgtggttcaaatgatcttatggcaaccaggtttttgaatttttatgtcaggagtgggggagggagtcttttgaccgatgaccttaaagcagatctgaccagtgacctggcaatagatggaatcaaatactggttggatatttataaaaactgttctccgaaagattctgtcaattatgctgtattggatcaggcaaatttgttttatcagggaaaaacagcatttgattttaattcgggtttccagattagcggggtggaaaccaactctccggatttgatcgatcagatcgattgtgcgccacttccaaagctgaatgcagatgatccagattatggagctgagacttctaatattcctatggtcatttggagaaattcaaaacatccggaaatctgtaaagcctttatgaaaaaactgtatgagagagatacctatattaaattcctggatgcgactccagtaggaatgcttccttccattagtggaatttctgatacgccggaatataaggaaaacgagacagttcaaaagttctccaacgcagtcgatgtgattacagatgcaatggagaagggaaccgctatcggatatgagcatggtccaagcattcaggcaggtttccttacttctcagggaatcattgaaagtatgttccaggatattattacgaatggtacggatgtgaagaaggctgccaaaacagcagaaaagcaattaaatgaattattcagtaccgtgcagcaatgaaaaaacgggttagatagatagcccaggaaatgaggaaaggcatatatgatgaaaagaaaagaaaaagtagattatgcccgttggatttttgtactacctgcgttgctggtggtaggtgttttgctgatatacccaatattttccagcctgtattatagcatgacatcaaagcacttgattcggctgacctatgattttataggaatggcgaattataaggaagtgttgacagatccaaatttttataaggcattcctaaattctattttatggactataggctcattattagggcagttatttattggatttacagcagctcttgcaattaaccgtgtaaaagtaggaaaaggtatttatcgtacgttgatgattattccgtgggcatttccatccattgtaatagcattgtcctggaaatggattttaaatggagtgtctggatttattcccaatatgctggttcagcttggaatatgcagcgaattaccacaattccttagtgacagcagtctggtattcctgacgttaatttttatcaatgtatggtttggtgcaccgatgatcatggtgaatgtattatctgctttgcagacaattccgcaggatcagtatgaagcggcacagattgatggtgcatctaagtttcagcagttttggttcattacagtaccgcatattaagattgttgttggacttttagttgttcttcgtacaatctgggtattcaataactttgatattatttacctgcttaccggtggtggaccggcaaatgcaacaacaacaatgccgatttatgcttacaacatgggttggaatacaaaactgttaggaagatcctctgcagtcaccatgttattgctggcatttttgctgttggtatgtgtagtgtactttacaattattgcaaaatgggaaaaggaggataaatgatgatgaatcgaaaaggaaaagtcggaaatgctttctgccatttatatttgataatcttatcattgattgcgtttttcccgttagtgtggatactgttgtgttcggtgaaggcatcgggagaattgacatccaatcctaccagattcttaccgaaacattttaccttagataactttacccatgtgattcaggatttgggatttgctaaaaatattggaaacagtttgttcatagccattatcacaacgtgcattgcaattgtgatttcttccatggcggcttatgggattgtacgtttttttccaaaactgggttccattatgtcaaaagtacttgtagctacatacatgtttccacccattctgctggcaattccctattctatggtaatggcaaagttgggattagttaatacccggatcggtctgattattgtatacctatcctttagtgttccttacgcagtctggatgctggtaggatttttcaaaacggtgccattggggattgaagaagcagcaagagtggatggtgccaataaatttcaaacgtttgtacagattgttcttcctctggtcatgccggggattgtagcaacagcaatttatacatttatcaatgcatggaatgaattcttatattcattgattttaattaacagtacagataaaatgacggtttccgtggcattaaaatctttgcagggagctgaaatattgaactggggagatatgatggcagcatcaactctcgtagtagttccatccgttatattttttatgtttattcagaataaaattgcaggtggaatgacagatggtgcagtaaaataaaaaaattggaggtattaagtaatgaaaacagtaggatatgcaattgtaggaacaggatattttggtgcagaacttggaagaattatgaaggaacaggagggtgctaggattgtggcagtccttgatccggaaaacggtcagaccatagcagaggagttggattgtgatgtggaaacggatctggatactctatatagcagggaagatgttgaagcagttattgttgccacacctaattacttacataaagagccggtcatcaaagcagcagaacatggcgtgaatgtattttgtgaaaaacccattgcactttcctatcaggattgtgacgaaatggtaagaacctgtcaggaacacggtgtaatctttatggcaggtcatgttatgaatttcttccatggggtacgctatgcgaaaaaactgattaatgatggggtgattggaaaagttctctattgccattctgcaagaaatggatgggaagaacagcagccaactatttcctggaaaaaaatcagggaaaaatcaggtggacatctgtaccatcacatccatgaattggattgtgtacagtttttgatgggaggaatgccagaagaagttaccatgacaggtggaaatgttgcacatcagggagaggcttttggagatgaagatgacatgttgtttgtgaatatgcagttttctgataatcggtatgcagtattagaatgggggtctgctttccattggccagaacattacgtcctgattcaaggaacaaaaggtgcaattaagattgatatgtgtgattgtggcggtacactgaaagtagatggcagggaggaacatttccttgtgcatgagtcacaggaagaagatgatgatcggacaagaatctatcatggtacggagatggatggtgccattatgtatggaaagccaggaaagaaaccgccaatgtggctccacagcattatgaaaaatgagatgaaatacctaaatggcattctccatggaaaggaagttgacgatgaattcagaccattgctcacaggagaagctgcaagagctgcgattgcgacggcagatgcctgcacgaaatcaaggttcgaagatcgaaaagtgaaactcagtgagattatcggagagggaagtacgatatgaataagtataaaaaaattgtttctatagcagcaactgcagtgatgtgtgttgcaccaatgagtgtatatgcccaagaggcccagacagatgtgattgaggctgtagcagagaagaaacaagatacagaatcttcttcggtaccagtgttgcaaaaggaaggaatcgaaatctcggaaggtacaggatatgatttgagtaaagaacctggggcagcaacagtaaaagcattggaacagggaactatcgttatctcctataaaacaaccagtgaaaatgcgattcaatcgttattgagtgtgggaaatggtacaaaaggaaatcaggatagacatttccacttatatatcacaaatgcaggcggcgtaggcatggaattgagaaatacagatggcgagtttaaatatacgttggattgcccggctgctgtgcgtggtagttataagggggaaagagtatccaacacagttgcattaaaagcggacaaagaaaataaacagtacaagctatttgcaaatggcgaattaatagcaacgctggatcaggaggcatttaagtttatcagtgatattacaggagtagacaatgtaatgctgggcggtaccatgcgtcagggaaccgttgcctatccatttgggggttccatagagagaatgcaggtatatcgggatgtactttctgatgatgaacttattgctgtgacaggaaagactatatatgcagagaatatcttttatgcaggagatgctacaaaatccaactatttccgaatcccatcccttttggcgttggattctggtacagtgattgcagcagcagatgcaagatatggtggcacccatgatgcaaaaagtaagatcaatacagcatttgcgaaaagtacagatggtggaaaaacgtggggacagccgacattgccattgaagtttgacgattatgtagcaaagaacatagactggccacgggattcggtgggcaagaatgtgcagatacaagggagtgcttcctacatagatccggtacttttagaggataaggaaacacatcgggtatttctttttgctgatatgatgccggcaggaattggaagttccaacgcttccgtaggttctggatttaaagaggttgatgggaagaaatatttgaaattgcactggaaggatgatgcggcaggaacgtatgattactctgtaagagaaaatggaaccatttataacgatactacaaattcagcaactgaatatagtgttgatggtgaatataatctgtacaaaaatggaaatgccatgctatgtaaacagtatgattacaattttgaaggtacaaagttgttggaaacacagacggacacggacgtaaatatgaatgttttttataaagatgcagattttaaagtattcccaacaacttatttggcaatgaaatactcagatgatgagggagaaacctggtctgatttacagattgtaagtacctttaagccagaggaatcaaaatttctcgtattgggaccaggtgtaggcaaacagatagcaaatggagaacatgccggaagattgattgttccattgtattcgaaatcatctgcagaactgggatttatgtatagtgatgaccatggaaataactggacatacgtagaagcagaccagaatacaggtggggcaaccgcagaagcacagatcgtagaaatgccggatggttccttgaaaacttatctgcgtacaggatcaggatatattgcacaagtgatgagtacagatggaggagaaacctggagtgagcgagttccactaacagaaattgcaacaacagggtatggaacgcagttgtcagtgattaattattcacagcctgttgatggaaagcctgctatcttactatcagcaccaaatgcgaccaatggcagaaaaaatggaaagatatggattggtttgatcagcgaaacaggaaattccggaaaagataagtattctgtagattggaaatattgctattctgtggatacccctcaaatgggctactcttattcctgtctgacagagcttccggatggcgagatcgggcttttatatgaaaaatatgattcctggtcaagaaatgaattgcatctgaaaaatatattgaaatatgagaggtttaatattgatgaactgaaagttcaaccataaggtgtaatattcctgataattaaagaaaataggcggtatataccgtgaccgcttattttcataaagaggaaatgaatgatacggaagttaaatccaaggaggaaaaagagatgtatcagaaagtggcaaatctgaaggggaaattgattgtatcatgccaggcattgccgaatgaaccactacattcttcttttatcatgggaagaatggcactggcagcaaaggaaggcggagcgagaggaatccgtgcgaattcaaaagaagatattaaagagattcggtcaaaagtggatcttccaatcattggtattgtaaagagggattatgaagacagtgcagtttatattactccaacaatgaaggaaatagaagaattgatggaagtgaaaccggatattattgcaatggatgcaaccatatccaaacgtccgagcaatcagactttggatgaattcttccacgaagtgaaagaaaaatatcctaatcagctttggatggcggactgttctaccatagaagaagcccttcatgcagatgatcttggctttgattttattggaaccactctagtcggttatacggagcagagtaagggagataaaatagagaagaatgattttgaaattctgagagaaattattgcaggagtcaaacacaaggtaattgctgaaggaaatatcaatacaccccaaaaggcaaggcatgtcattgaacttggtgcgtacagcgttgtagttggttcgattatcacaagaccacagttaatcacaaaatcatttgtagaggaaatggaacgctaggggagaaaacaaaatgaatggcttttatgaagcaaaggagcaaaactatgagaaatcttgagaagtataaaggtgtgattccggcattttatgcttgctatgacaaagaaggaaacattagtccagaaggtgtacagggactgacaaaatattttgtaaaaaaaggggtaaaaggtgtctatgtaaacggttcttccggagaatgtatttatcagagtgtggaggaccgtaagattgtacttgagaatgttatgaaagtagcggaaggtaaacttacagttattgcccatgtggcctgcaataacacgaaggacagtcaggagcttgccagacatgcagaagggctgggggtagatgcaatcgctgcaattcctcccatctattttcacttaccggaatatgctattgcgcagtattggaatgccattagtgcagcggcaccgaacacagactttgtaatttataacatacctcagcttgctggtgttgcacttacacagaatttatttgtagagatgaggaaaaatcccaacgtcattggtgtcaagaattcctctatgccggtacaggatatccaaatgtttaagcaggctgcaggagctgagtacattatctttaatggtcctgatgagcagtttatgagcggacgtgttatcggggcagagggtgcaattgggggaacctatggtgctatgcctgaattatacttaaagttggatgagtgtataaatgcaggaaagatgacagaggcaagaaaaatccagtatgcttgtaatgagataatttacaaaatgtgttcagcgcatggaaatatgtatgcagttattaaagcaattctaaagattaatgaaggactggaacttggtgcagtaagagagcctcttccagcattggtagatgaggacatggagattgtaaaagaagctgcacagatgatctgtgatgcgaagaagaaatttctataatgataatacgtagacaagattccatgtaggaatacttgttagtagtgatgcccggctcagcttaaaagccgggtgttgctttttaggttgaaaagagtttgatttaagatgcagatgggattaaataagaaagtaaatgagggtatgaaatgaagaagtatataagtattgacattggggggacggcaattaagtatggcatcatttgtgaaaatgcggaaattattttgaaagaaactttgagaacagaagcgtggaagggtggacctgcaattctgaagaaagttatagggattgtggagcatctgattgaacaaaccaagggaaagatttcgggtatctgcatttctactgcaggaatggtagatacaaaaagcggttctattttttattcagcaccactgattcctgactatgcggggatggaatttaaaaagacattagaggataaatttcatataccatgtgaagtggaaaatgatgtaaactgtgcagggcttgcagaatatagttcaggtgcagcgaaaggatgcagggtggttttgatgttgaccataggtacgggtattggtggctgtatcgtgttagatgggaaggtatttcatggttttagtaacagtgcatgtgaggttgggtatatgcacatggatggcagtgattttcagacgcttggggcagccagcattttaagtaaaaaagtatcccagtggaaaggagattctgaagataagtgggatggataccatatcttcgaggaagccaaaaaaggagatatgatttgtaatcgtgccattgatcaaatggcagaaatccttggaaagggaattgccaatatttgctatgtgatcaatccagagattgttgtgcttggtggtggcatcatggcccaggaagagtttctgcgaggtaaaattcaaaattctgtcaaaaagtatcttatatccagtattgaggaatgtactaaaatagtattcgcaaagcaccaaaatgatgcaggaatacttggagcgttttatcatttctgtggagtaaacaaaaaattatagatacaggaatgtcattgggcactaaccgtcaacagcttacatatccaaataaggaaagtgtaagctgttgattttttcttatttgatgatcatctttgtatcccaatttttatctaatacaagctcttatcgtttcctgcattcctccgctttatcctcattccagacaagttttccggtctgtactgcttcttcataccgactgatcttgtattccaggcgttttaacatttgcgaaatcttgttctgttgttcgatcagatgttctttctgttccagtaagagatggagtcttgcggggatcgtctcgtctccttcctggaacagatgcacgtattcgatcatggattcgactggaagacctgcatttctcatacacagggcgagttcaatccagcccagatccgcttctccgtaattacgaataccaccggacgttcgaggaaccgccggaatcataccgatgcgttcatagtagcgcagggtgtcctgtgtgatctgatatttttcactgacttctttgatcgtcaaagagaatccctcctttttggaaattcgagtatttgtgtactcttgatataagaatactataaagcatggagtgtgctccaagtcaatatatttttgaaaaaatgtcgggcagattagattccgggttgctgacagaggatggcaagagtataatgaaaaaaatgagaattcttctgattcgcagaaaggagcagaaaatatgaatgttgaacaagactatattatgcgtatgatcaaggaatttgcaaatgtattgggaagactgctattcaacaagaagaaacccatgtatgaactggatgtaacgaacagataccatgtaggagatgatctgtatacacgtttatgcaggatggctgatgaaggaaagatcaatgaagcggaaaatcttctctatgaagaaatggtaccgggagatatggattatctggagatggcgctggcattttatgcgtatttgaattgttttgaggacgaggtccttcacaggtatcattacacaagagatgagatcaaagaaggaatggaagattttctggacagatatggatgcagtgatatgaaagaattactgggggaataaatacaatggaaagatcaagagaagaattggatacacgattaaaacagcagatacagtttattgtagaagtagataaagtaaagaatattttcaggcagacatatcttgcggatgcaaacagaaaagagaatgacgcagaacattcctggcatctggcgcttatggcagtacttttaaaggattacatgaaagaagagatagatctggcgaaggtgatgatcatggttctgatccatgatcttgttgagattgatgcgggagatacgtatgcatatgatgaaagtggtgcagcgaccaagagagaacgggaagaaaaggcggctgatcgtatttttggattactgccggaagatcagggacaagaattccgcaagttgtgggaagagttcgaagcttataagactccggaagcaaaatatgcccatcttctcgataatttccagcctcttttgctgaatgatgcttcaggtgggaaaagctgggaagagcacggagtacacagaagtcaggtgtataaaagaaatgagcggatcccggagacttcagagataatctgggagcagatgaaggagatcattcagaagcatattgagcagggacacttatttgaagattgataaactgtaaatagaaactgacaaagaggtgggaaacatgtatgaagcaggagtagagagactgcaggaaatgatcgatgagagcagcaatattgtatttttcggaggagcaggggtatctaccgaaagtaatattccggattttcggagcgcggatggaatttatcatcagtcttataaatattcacctgaggaagtagtaagccacagtttttatgaaaagcatccgaaagcgttttttgagttctatcgggagaagatgatggtattggatgcaaagcccaacgccgcacatttgaagctggcagaacttgagaatgcaggtaagataaaagcagtcatcacacagaatattgacgggctgcatcaggccgcgggaagtcaggttgtgtatgaactgcatggaagtattcatcggaattactgtgaaaaatgcggacggttctatgatgcagggtttgtgaaagcggcagaaggagtaccagtgtgttcatgcggagggcggatcaaaccggatgttgttctatatgaagaagcgctggacggaacgataatcgaaaaggctgtcagggcgatttcgcaggcagatatgctgatcatcggaggcacctctctggttgtatatccggcagcaggatttatcgactattttcgcggaaagtatctggtagtgatcaataaatcagagatggcaaaggcagtcagagcaaacttaagtatttccgcgccgatcggagaaattctgggaagaattaaagtgaaataaaaatctgcagagagtgcgttgagaaattatattcggcactttctgcagatttttgcttttatttgttttagttgcagctttcccatcttccggatgcaccgcaaggcagtacaagaccagtatttttgaccggaagaccgatttcctgagattcgacttttccgttccatggttttaactcagttgcaagcatataggtcagaacagcaggagcaagtcctgttgtataagaattcacaaggaagaacagagcatcctttgacagaatcttcgtacacaactgaatgagcgggtggatcatgtcttcaatcttccagatctcacctttgggacctcttccataagaaggaggatccatgatgatggcatcataagtgttgcctctgcggatctcacgttctacaaactttacgcagtcatcgacaagccagcggatcggtgcatccttcagaccggaggagagcgcattttcctttgcccatgtgaccattcccttggacgcatccacatgagtgacctgtgcgccagctgcagccgcagccagtgtggcgcccccggtgtaggcaaaaaggtttaagactttgacagatcttccggcttttttgatcttttcagagaaccagtcccagttggttgcctgctccgggaagagcccggtgtgtttgaaattaaatggttttaaattaaaggtgagagatccgtaatgaatctgccactgctccgggagactgaaaaattcccattcgccgccgccttttttgcttcggtgatagtgtccatttctggatttccatcccttgtctgtctttggagtgtcccagatgacctgcgggtcaggacgaatcaggatataatctccccatcgctccagtttttcaccttttgagcagtctatgacttcgtaatctttccaattatcagctatccacataataatagagttcctttcgtactgtatgattgttttatcttctcataaatagaagaaattttcaactgtatgagcaaaaatgataagcaaaaagcacggtaaaaaccgtgctttttgcttttggtatgtcattgagaggttttcctcgttgctttgcagtttgtattattatatacaaatctggggaatatcctacaatgaggatgtatatataaattggagttcaccgtcgcaagactgttcttgggggaaacagtcggcgaaagtataactgcaacagcaaccaaattaaatggtcgatgacttatgactcattcataagtcggttttaatatatcacgcagaaaaaagagtgtcaagaaatcagaataaaaaaattttgatttttactatttgacaagaaattgtgaaaatctaccgaaaaaattgtgcgatttttgttacatgtgctacttccgaaacgatacgacaataagaaaaaggttccgattctgtgggatttcaaaaatggcaaatcttaaagaagggaaaaaggaaaagattgtaaaagagtttcttcatattataatagatccttttctttgcatgtgagcatgacagttcagagcctatgtctaacatcgagtgtgagcggctgtattgtattaaaaaaaatacaaaaaaataaaaaaagtacttgaaaaatgagaataagttcgttatactaagagagctgtggcatgatagcgttgaagcgtgaggttgccgcttagtgagaaatcacatagcgggttttccgtggagcgaatgtcaagttaggaaactggcgacaagtcactgtacgaatcacaactgattactgcttaccgataatgggtaaaggtatgaaacaacgtgtgagtttctcacgacacacacgggagagtgtacagtcaccgcttgtcgtactgatgtgaaaagtacgaaaaggaggcgactttttttatggcaagtcaagtaatgagaatcacattgaaagcatatgatcaccagctggttgatgcatctgcaaaaaaaatcatcgaaactgtaaagaaaaacggagcacaggtaagcggaccggtaccacttccaactaagaaggaagttgttacaatcttaagagcggttcacaaatacaaagattccagagagcagttcgagcagagaactcataagagactgattgatatcactacaccaacacagaaaactgtggacgcgctttccagactggaaatgccagcaggtgtttacatcgatatcaaaatgaaaaacaaataagaaagtccacaaaatgcgggcagcaaaatgagacagtaacaatcctataatttaggatgagcgcgaaagcgttccgctgtaaatcacaggaggtaattataatgaagaaagctattttggctacaaaagtcggaatgactcagatcttcaatgaagagacaggagtcctgattccggtaactgtattgcaggctggaccatgtgtagtaacacaggttaaaacagttgagaatgacggttacaaagcagttcaggtcggatttgttgacaagaaagaaaagattgtcacaaaagacaagagcggtaaaaaagagattgcacacagaaatggtgtgacaaaagcagaaaaaggacactttgacaaagcaggtgtttccggaaagagatatgtaaaagaattcagatttgaaaatgctgaagaatatacattggctcaggaaatcaaagctgatatcttcgcagcaggagataaggtagatgcaacagcaatctccaaaggtaaaggtttccagggagcaatcaagcgtcacaatcagagcagaggacctatgacacacggttctaagttccatcgtcacgctggttctaacggtgcggcatccgatccgagtaaagtattcaaaggtaaaaagatgccaggtcagatgggtggaaagaagattacagttcagaacctggaagtagtaagagtagatgcagagaacaacctgctgttagtaaaaggttccgttccaggacctaagaaatctcttatcacaatcaaagaaactgtaaaggctaactagtctgacggacagaaaggaggaacacacagatggcaaacgtatctgtttataatatcgaaggtaaagaagttggtacaatcgatttaagcgatgcagtgtttggtgttgaagtaaatgaacaccttgtacacatggcagtagtaagccagcttgcaaacaaacgtcagggaacacagaaagcgaaaactcgttctgaagtttccggaggcggaagaaaaccatggagacagaaagggacaggtcatgcaagacagggttctacaagatctccacagtggacaggcggtggagttgtattcgctccaacaccaagagattactccatgaaactcaacaaaaaagaaaaaagagcagctctgaaatctgcactttcttcaagagtagctgagaacaaattcatcgtgatcgacgagatgaactttggagaaatcaaaacaaagaatttccagaacatgctgaacagcctgaacgtaaacaaagctttagttgtactggaagatggaaatgtaaacgctgaactttctgcaagaaacatcgcagatgtaaaaacagcaagaacaaatacaatcaacgtatttgatatcctgaaatacaacacagtaatcgctacaaaagcagctgttgcaaatatcgaggaggtgtacgcataatggcaaacattcagtattatgatgtaatccttaaaccggtaatcactgagaagagcatggaaatgatggctgataagaaatacactttccaggtacacacagatgctacaaaatctcagatcaaagaagctgttgaaaaaatgttcgcaggaacaaaagtaaaaagcgtcaacacaatgaaccttgatggtaaaacaaaaagacgtggaatgacattcggaaaaacagctaagacaaagaaagcaattgtacagttaacagaagagagcgcagatatcgaaatctttgaagggctgtaagatttgacattaaacggtgcaaatccgtgaaacaaataattaggaaaaatgaaaggagagacagtaatgggaattaaagtatacaacccatatacaccttccagaagacagatgacaggatctgatttctctgagatcacaaaaacaactcctgagaaatccttactggaatctaaaaatagaaaagctggtcgtaacaaccagggtaaaatcactgtaagacaccgcggaggcggagctaaaaagaaatatagaattatcgacttcaagagaagaaaagacggaattccggcaactgtaatcggaatcgaatacgatccgaacagaacagctaacatcgcactgatctgctacgcagacggagagaaagcttacatccttgcaccagaaggattaaaagacggaatgacagttatgaacggagcagaagcagaggtaagagtaggaaactgcctgccactttctgaaatcccagttggtacacagatccacaacatcgagttatatcctggaaaaggcggacagatggttcgttcagcaggaaacagcgctcagttgatggcgaaagaaggaaaatacgcaacacttagacttccatccggtgagatgagaatggttccaatcatttgtagagcatctatcggtgtcgtaggaaacggagatcacagcctgatcaacgttggtaaagcaggacgtaagcgtcacatgggtatcagacctactgtccgcggttctgttatgaacccgaacgaccatccgcacggtggtggtgaaggtaagactggtatcggtcgtccaggtccatgtactccatggggtaaaccggcacttggtcttaagacacgtaagaaaaataaagcttctaacaagatgatcgtaagaagaagagacggtaaagcaatcaaataatttagtttacaaggaggttagaacctatggctcgctcacttaaaaaaggaccatttgcagatgccagcttactgaaaaaagtagatgctatgaacgctgcaggtgataaatcagttattaagacatggtcacgtcgttctacaatcttcccgtcatttgttggacacacaatcgctgttcacgacggaagaaaacatgtaccggtgtatgtgacagaagatatggttggacacaaactcggagagttcgttgcaacaagaacatacagaggacacggaaaagacgagaagaagtcaaaagtcagataatatagattagattattcggaaggagggttcatccatggcaaaaggacatagatcccaaatcaagagagaaagaaacgagcagaaagacacaagaccatcagctaagatttcttacgctagagtctctgttcagaaagcatgctacgttttggatgccatcagaggtaaggatgtacagacagcacttggtattttagcttataatccaagatatgcttcaagcgtaatagagaaattattgaaatcagcaatcgcaaatgctgagaacaacaacggtatgaacgttgagaacctttatatcgaagagtgttatgcaaacaaaggaccaacaatgaagagaatcagaccgagagcacagggtagagcttacagaatcgaaaagagaatgagccatatcacaatcgtgctgaatgaaagataaggaggacactcatgggacagaaagttaatccacatggtttaagagtcggcgttatcaaagaatgggattctagatggtacgcagaaaaagactttgcagataacctggtagaagataacaagatcagaacatttctgaaaaagaaattatacagtgcaggtgtttccaagatcgagatcgaaagagcatctgaccgtgtgaaaatcatcatctacacagcaaaacctggtgtagtaatcggtaagggtggttctgagattgagaaagtgaaagcagaacttgctaaattcacaaacaaaaaattaatcgtagacatcaaagaagtaaaaagaccagataaagatgctcagttagtagctgaaaacatcgcacagcagctggaaaaccgtatttcattcagacgtgctatgaaatcctgcatgtcaagaacaatgaaatcaggagcacttggtgtgaagacatctgtttccggacgtctcggcggagctgatatggctcgtacagagttctacagcgaaggaacaattccgcttcagacactgagagcagacattgattatggattcgcagaagctgacacaacttacggaaaagtcggtgtaaaggtttggatttacaaaggcgaagttcttccgactagagcagataaggaagggagcgataaataatgttaatgccaaaaagagtgaaacgtcgtaaacagttccgtggtaccatgaaaggtaaagctttaagaggtaacacgatttcatatggtgagtatggtattgtcgcaacagagccgtgctggattcgttctaaccagatcgaggcagcccgtgttgctatgacacgttacatcaaacgtggtggtaaagtttggatcaaaattttcccagacaaacctgtaacagcaaaaccagcagaaactcgaatgggtagtggaaaaggaacattagagtactgggcagcagtagtaaaaccaggtcgtgtaatgttcgaaattgcaggagtaccagaggaaacagctagagaggcacttcgtcttgcaatgcataaattaccttgcaaatgcaaaatcgtttctcgcgcagacttagaaggcggtgataacagtgaaaattaatacatttgtaaacgaattaagagcaaaatctgtagaagaattaaatgaagaattagtagctgctaaaaaggaactcttcaatctgagattccagaatgcaactaaccagttagataacacaagcagaattaaagaagttagaaagaacatcgcaagaattcagacgatgatcacagaagcttctaaagctgaataggaggtcgtactgtggaagaaagaaatttaagaaaagttcgtacaggcaaggttgtcagcgataaaatggacaaaacaatcgttgtcgcagttgaagaccacgttaaacaccctctttataagaaaatcgtaaaaagaacttataaattgaaagctcatgatgaaaacaatgagtgtaacgttggggatacagtaagagttatggaaacaagaccactgtctaaagacaaaagatggagacttgttgagatcgtagaaaaagcgaaataattgattcgcactttgaagattcgttcaaagaatggaaaataaaggaggattacctgcatgatacaacaggaaagtagacttaaagtagcagacaacacaggtgctaaagaattactttgtatccgtgtgcttggcggttctacaagaagatatgcccacatcggagatgttatcgttgcgtctgttaaagatgcaacaccaggcggcgttgttaaaaaaggtgacgttgttaaggctgtagttgtccgtactgtaaacagtactcgtcgtaaagatggttcctatatcagattcgatgaaaatgctgctgtaattataaaagacgatatgaacccacgtggaacacgtatttttggaccagtagccagagagctcagagacaaacgcttcatgaagattgtttctttagctccggaagtactgtaggaggtgcctagaatgtcagctatgaagattaaaaaaggcgatatggttaaagttatcgctggtaaagataaaaacaaagaaggcaaagttcttgctgtaaataacaaagacggaaaagttctggttgagggaatcaacatgctcacaaagcatacgaaaccaagcgcagcgaatcagaatggtggtatcgttcatcaggaaggctacattgatgcttctaacgtaatgcttctgcatgacggaaaagctacaagagtaggattcaaaatggatggagacaaaaaggttcgttttgcaaaatcaacaggtaaagtaattgattaatttgggaaaggaggaccagaactttgagtagactgaaagaacagtatcagaatgagatcgttgatgcaatgatcaaaaaatttggatataaaaacattatggaagtgccgaaactggacaaagttgtaatcaacatgggtgttggtgaggcaaaagaaaacgcgaaagtattagagtcagcagtagctgatcttgagaaaatcgcaggtcagaaagcagttcttacaagagctaagaactcagtggctaacttcaaaatcagagaaggtatgccgatcggatgtaaagttactttaagaggagaaagaatgtatgagttcgttgatcgtctgatcaaccttgctcttcctcgtgtacgtgacttcagaggtgtaaatccgaacgcatttgacggaagaggtaactacgctctcggaattaaagagcagctgattttcccagaaatcgaatacgacaaagtggataaggtcagaggtatggatgtaattttcgttacaactgctaagactgacgaggaagctcgtgaattattgacacagttcaatatgccattcacaaagtaaaggagggaaattcatggctaaaacatcaatgaaaatcaaacagcagcgcaaacagaaattctctacaagagaatacagccgttgcagaatctgtggacgtccacatgcatatttgagaaaatatggtatctgccgtgtttgcttccgtgaactggcatacaaaggacagatcccaggcgtaagaaaagcaagctggtaagtccggaacaaaggaaactacccgtataaacatataggaggtcatataaatgaacatgagcgatccaattgcagatatgcttacaagaatccgtaatgcaaatactgcgaaacatgatacagtagatgtacctgcatccaaaatgaaaaaagcaatcgctgagattcttttcaatgaaggatacatcgcaaaatatgatatcgtagaagatggacactttgaaacaatccatattacactgaaatatggtgcagacaagaacgaaaaagttatctctggtctgaagagaatctccaaaccaggtctgcgtgtgtatgctggaacagaggatatcccgagagtactcggaggactcggaacagcaatcctttctacaaacaaaggtgttatcacagataaagaagccagaaaacttggcgtaggtggagaagtactctgcttcgtttggtaggcactgaacaccgagatattctgtgtaaaacatagataattgtaactgaaaacagaggagccaaagcagctcctccgaaaatctaagttaaggaggaaacaggtatgtcacgtatcggaagactgccagttgcaattccagcaggagtaactgtggaagttgcagcaaacaatgtagtgactgtaacaggtccaaaaggaactcttgtaaaagagcttccagttgaaatggaaatcaaagttgaaggtgaagaagttgttgtaacaagaccaagcgatctgaagaaaatgaaatctcttcacggtcttacaagaacactgatcaacaacatggttgttggtgtaacaaacggatacgaaaaagttctggaagttaatggtgttggttacagagcatccaaatccggaaacaaactgacattgaacttaggatactctcatccagttgaaatgatcgatccggaaggtgttgagactgtactggaaggtcagaacaaaatcacagtaaaaggtatcgacaaagaaaaagttggccagtttgcagctgaaatcagagataagagaagaccggaaccatacaaaggtaaaggtattaaatatgctgatgaagttatcagacgcaaagttggtaagactggtaagaaataattaaggagagtgtgaaaatggttagtaagaaatcaagaagcgaagttcgtagaaaaaaacacatgaaattacgtaaccgtttcagcggtactgctgaaagaccacgtttggctgtgtttagaagtaataatcatatgtatgctcagattatcgatgatacagttggaaacactctggttgcagcgtctacacttgaaaaagatgtaaaagcagaattagaaaaaaccaacaacgttgaagcagcagcatacttaggaaaagtaattgctgaaaaagcaaaagcaaaaggaatcactgatgttgtattcgacagaggcggattcatctatcagggaaaagttaaagcgttagcagatgcagctagagaagctggactgaatttctaaggaagggagaacacagatgagacaggaacgcattgatgctagtaatttagaattaacagaaaaagtggtatcaatcaaacgtgttaccaaagttgttaaaggtggtcgtaacttcagattcacagctttagtagttgttggcgatggaaaaggccatgttggtgcaggtttaggaaaggctactgaaattccagaagctatccgtaaaggaaaagaagatgcagctaaaaatctgattaaagttgcattagatgaaaacgagagcattacacatgatgtgatcggaaaattcggcagcgcttccgtactgctgaaaaaagctccggaaggtactggagttatcgccggtggtccggctcgtgcggtaatcgagatggcaggaatcaagaacatccgtacaaaatctctgggatctaacaacaaacagaatgtcgtacttgcaacaatcgcaggtctgaaaaacgttaagactccggaagaagtagcaaaacttcgcggcaaatcagtagaagagatcgtaggctaggaggtaaatgaaaatggcaaatttaaaagttacattagtaaagtctacaatcggtgccgtaccaaagcataaaaaaactgttgaggcacttggattaaaaaaagtgaacaaaacagtcgtattaccagataatgcagctaccagaggtatggtacagcaggttagacatttagtaaaagttgaagaagaagcttaatttcagacgataaggaggtaatatcatggacttatctaacttaagaccggcagacggttctaagcacagcgataatttcagaagaggccgtggacacggttctggaaatggtaagacagctggtaaaggtcacaaaggtcagaaagctcgttccggagcaacaagaccaggctttgaaggtggtcagatgcctttatacagaagaataccaaagagaggattcaaatgcagaaactctaaagaaatcgttggtatcaatgtaagtgcattagaaagatttgaagatggcgcaacagtttcagtagaaacaatgatcgagtgcggtcttgtaacaaatcctagagatggtgttaaaattcttggaaacggagagttaactaagaaactcactgttcaggcaaatgcattcagtgcaggtgctgttgaaaagattgaggcccttggtggaaaagcagaggtgatctaatgctcaagactgtgcgaaaagcatttcaaatagaagacattagaaaacggcttttctatacatttttaatgctgatcgttgtaagatttggttctcagctcccgactccgggagttgacccgacttacattcagaatttacttgcgagccagaataacggtgcatacagcttttttgatgcattcaccggtggttcgttcacaaggatgtcagtcttcgcactgagcatcacaccatacattacatcttccatcattatgcagcttttgacaattgcaattccaaaacttgaggaaatgcagaaagaaggtgctgagggaagaaagaaaattgcggcaattacacgttatgtgacagttgctcttgcactgatcgaatccattgcaatgtctatcggttttggtcgtcagggactcctggaagaatttaactttgtaaatgtagcgattgttgtgtgtacattgacagccggttctgcatttttgatgtggatcggtgagcgtatcacagaaaaaggtgtgggaaatggtatttctatcgtactgttgatcaatattctttcccgtgtaccgaatgattttgtgacgctttatacacagtttattaaaggaaaaactctggcaaagggtgctatggcagcaatcattattcttgcaattctgttggcagttgtgttatttgttatcattctgcaggatggtgagagaaggattgcagtacagtattcccagaaagtacagggaagaaggacatatggtggcaaggctacacatattccgttaaaagtaaatacttcaggtgttattccggttatctttgcatcttcactgatgcagttcccgattgtgattgcccagtttttaggcaagggcgacggaaacggatggggaagtcagattcttcggacaatgaattccaataactggtgtgatcctgataatttagtatattcaataggactgatcatttacattgcgctgacaatcttttttgcatatttctatacatcgattacatttaatccactggaaattgcaaacaacatgaaaaagagcggaggctttattccgggaattcgtcctggaaagccgacagtagaatatcttcagaccattttgaaccgtattgtgttcattggtgcatgtggacttgttattgttcaggtagttccgttcttctttaacggtgtatttggtgcgaatgtttcttttggaggaacttcactgattattatcgtaggtgttgtacttgagacgattaagaagatcgagtcgcagatgcttgtccgcaactactcaggtttcctgagcagcaagggctcatcaaagtaaaagggttcttggatatgaaatgagacaatttagctcgttgtatgctgtccctttttgggacggaatacggcgggttaaagtgctatatggagggatactgttatgaagattattatgttgggtgctcctggagcaggaaaaggaacacaggctaagaaaattgcagagaaatatgatattcctcatatttctacaggtgatattttcagagccaatattaaaaacggaacagagcttggacagaaagcaaaaacatatatggatcagggacttcttgtaccggatgaactggtagttgacctcgtggtagacagggtaaatcaggaagactgttccaaaggatatgtgctggatggtttcccgagaacaatcccacaggcagaggcactggataaagctctgtctgcaatgggacagaagatggattatgccatcaatgtagaagttccggatgaaaatattgtaaacagaatgtccggacgcagagcatgtgtagactgcggagcaacataccatattgtatatgcaccgacagagaaagaggatgtctgtgataaatgcggtggaagtctgatcttaagagatgatgacaaaccggaaacagtactgaaacgtcttggagtatatcacgagcagacacagccactgatcgactattatacaaaagcgggaatcttaaaagaagtagatggaacgatcgatatcaatgatgtgtttgcagcaatcgttcagattctgggagagtaattcatgcagctggaaccgggaatgcttgcgcgttcgaaagcagggcatgataagaattgtatatatgtcataatttgtgtcaaagatgaatatgtatatctggcagacgggcagcttcgtccggtctgccgggcaaagaagaaaaacctgaggcatgtgcagccgatcaaaaagcttcacagtacttcagtgaccgatgatgaaacaatcagaaatgtaataagaaagtattccaaatctattggatgaggagtggaagcgtcaagagcgcaggaggatttagtatgtcaaaagctgacgtaatcgaaattgaaggagtcgtagttgaaaagctgccaaacgcaatgtttaaagtagagctggagaatggtcatatcgtgctggctcatatcagtggaaaactgcgtatgaattttattaagattttaccaggtgacaaggtgacattggagatgtctccatacgatctgagcaaaggaagaattgtttggagagataagtaaaaaggtattgactttattagatatagggtgctataatatcaaatggctgtttttgggtaggtgtgtccaaaaacagttggaaacgtaagggttttagcaaaggatggaaggaggatttgacatgaaggttagatcatcagtaaaaccaatttgtgaaaaatgcaaaatcattaaaagaaaaggaagcatcagagtaatctgtgagaatcctaagcacaaacagcgtcagggataattgctggtttgtgaaatgaattaggcggctgacagcgcgacacaccaggaagtgtgtagagctgtttaatatacagtaaggatacaccactgctacgcatttggcagattgcctctcaagaaggctggtggtcttgacacatacacgagaacttggatacaggttctttcttctgcattcggcaggacagtatgtgtgtgtatattgcttctaatacccgacggtcatttgcgtaaaaagatttacgtgtcgggaaagggtgcatcatatttgcacctggtgtgattcagcaaagtctgacacacccagttaaagacaatattaaatttagattcaaaatggaggaaagacacatggctcgtattgcaggtgtagacttaccaagagacaaacgtgtagaaatcggacttacttatatttacggaatcggaaaaacatccgctatccgtatccttgcagatgcaggagtagatccagatacacgtgttagagatttgacacaggacgacgttaagaaaatcagtgaagtgatcgatgagactcaggttgtagaaggtgatctcagaagagaaatccagttaaacatcaagagacttaaagaaatcggatgctaccgtggaatccgtcacagaaaaggacttccggtacgtggtcagaaaacaaagactaatgcaagaacatgcaaaggtcctaagagaactgtagcaaacaagaaaaaataatataaagtaatatccccgccaagtggggaatacaagaattcaagaaagtaggttagtttaaatggctaagaaagttacaaaaaaagtgacaaagaaacgtgtcaagaaaaacgttgaacgaggacaagcacatatccagtcatcttttaataatacaatcgtaacattaacagatacacagggaaatgcactttcatgggcaagtgcaggcggtctgggatttagaggttcaagaaaatctactccatatgcagctcagatggcagctgaaacagcagcaaaggcagcattagtacatggtctgaaaacagttgatgttttcgtaaagggtccaggatcaggaagagaagctgcaatccgtgcattacaggcttgcggtattgatgtagtaagtatcaaagacgtaacaccggtaccacacaacggatgccgcccaccaaaacgcagaagagtctaatttcggacttggcggcagttttttgctgcaggtgagctaacagagaatttgagcaatgagcatagcggattactgcagttccgctgatttttaaggaggataaacatggcagttaatagagttccagttcttaaaagatgccgttcattaggtatggacccaatctatttaggaatcaacaaaaaatctaacagacagttaaaaagagctaatagaaaaatgagcgagtacggtctccagttacgtgagaaacagaaagcaaaattcatctatggtgtattagagaaacctttcagaaactactatgcaaaagcaaaacagatggaaggtatgacaggtgaaaacctgatgattcttctggaatccagactggacaatgtaatgttccgtatgggattcgcaagaacaagaaaagaagctagacagatcgttgaccacaaacacgttttagtaaacggaaaacaggtaaacattccatcttaccttgtaaaagctggtgacgtgattgaaatcaaagaaaaacacaaagactgccagagatacaaagatattctggaagtaacaggtggaaacatgattcctgactggctggaagttgatgctgagaacctgaaaggtacagtaaaagagcttccttcaagagaagcaatcgatgttcctgtagatgagatgttaatcgtcgagttatattctaaataatctctcagtgagtagcagaagttttagaatccggagatttaacattgtaccccctcaacatatattaacccataaggagggtctgtgtagtgtttgattttaataagccgaatattgaaattacagaaatttcagaagataaaaaatatggaaaatttgtagtggaacctctggagagaggatacggaatcacattgggtaactccctgagaagaatcatgctttcttctcttccgggagcagccatcagttctgtaaagattgacggagttctgcacgaattcagttccatcccaggtgtaaaagaagatgtaacagagattatcatgaacttaaagtccctggcaatcaaaaatacatcagaatcagacgaagtaaagactgcatatatcgagtttgaaggagaaggtattgtaacaggtgctgatatccagacagattctgatattgagattatgaatccggagcaggttatcgctacattgagcggcggtaaagacagcaaattgtatatggaacttaccattacaaaaggcagaggatacgtaagcgcagacaagaacaagagtgaggatatgccgattggtgtgattccgatcgattcaatctatacaccggttgaacgtgtcaatatgaccgttcagaatactcgtgtcggacaggttacagattatgacaaactgacattagacgtatggacaaagggaacactgcttccggatgaggcagtcagccttgcagcaaaagttctcagtgaacatctgaaattattcattgacctttctgaagttgctcagtcagctgaagtcatgattgaaaaagaggatgacgagaaagagaaagttctggagatgagcattgatgaattagagctttctgtacgttcatacaactgtctgaagagagccggcatcaacacagtagaagaacttacaaacaagacaccggaagacatgatgaaggtgcgtaaccttggacgtaagtctctggaagaagtgctggcaaaattaaaagaattaaaccttgagttaaatcagggagaggaataaagaaaattatcccgtcagtaagcccgaagagcgtggcgggagcatttgatttataagcccgaagatgcaaaaccaaatgtttatttaatggaggaccataaaaatggcaaaatatagaaaactcggcagaacatccagccagagaaaagctttgatcagaaaccaggtaacagcattactgaacaatggtaaaattgttactacagaagcaaaagcaaaagagatccgtaaagaagttgaaaaactgatcgctttagctgtaaaagaaaaagataacttcgaagaagtaactgtaaaagctaaagttgctaaaaaagacgacaaaggcagaagagtgaaagaagttgttgacggtaaaaaagtaactgtttacgaagaagttgaaaagacaatcaaaaaagatatgccaagcagacttcacgcaagaagacagatgctgaaagttctttacacagcaacagaagctccaaagaacaacatcaagagaaatatgaaaaaagttgatttagtggataaattattcacagaaatcgctccaaaatatgcagaccgcaacggtggttacacaagaatcgttaagattggccagcgtaaaggtgatgcagctatggaagtactgatcgagttagtttaatcagtaatcaaaatagcaaaagagaagcacttgaagatcagagatggttttcgagtgcttttttgattcatctaaaattaaaaaaaatttaatgatttttgcaacacatttgtaatctttttcgtctaatatataggtgatactgtatcacggtattattacataagagaatgtaaaaggggaacatttaggatgggaaaagcgaaaaaaacaaaggcagtaaaaagaagaaaagtgggaaaagacggtaaagtaaaggctttgtggatcacaggaggggttcttgcagtgatctgtttgatctatgttgcaatctctgtgtatttcatgagtcactttttcgtgaatacgaaaattaacggtaaaaacttttcggggaagacagcaagtgatgtagaaaagtatctccagacaaatataaaacattataagcttacaattttggaaaatgaaggaagacaggatgtgatcagcggaagcgagattggactggaatacagagcggggacagaaacagaaaaattgttgaaggatcagaatggattcgcctggccgaaagctttctttacggagaattccagaaaggtttcagtcaatgtgtcatataatgaggaatccttgaatcagcggatctcacagctttcatgtctgcagacagagcagacaccggcagagaatgcaaagccggaatttgatggaaaccagtatgtcatcaaaccggaagtgtatggaaatgccgtggataaagaacgtcttacagagcaggtaaaagttcatatcacagagtttcagccacagttggatatggtggaaaccaagtgctatgcgaaaccaaaatatgtagaggattccaaggaagtacaggaagcctgtgatgcaatgaataaatatgtaaatgcaagtatcacatatccgatgaatgaaccagtcgtagtagataaagcgctgatctcacagtggctacaggtagacggagaaatgaaggtttctctcaatacagaggcgatgaagcagtggtttactgcctttggagataagtatgatacacagggaacgaccagaacctttacaacgccggccggaaagagcgcaactgtgacgggcgggacttatggatggtcgattgatgaggatacagagcttgtgaatctgcagaacagcattttaaacggggaagtagtcacaagggagcctgcatattatgcgggcggtactgccgcagcacattccgggcaggactggggaaatacgtatgcagaagtggatatgagtgcacagcatatgtggtatgttcagaatggacaggtggtgctggagacggatgttgtgacaggagagccgattccgtccaagattacaccggaaggagtgtattccctgatgtggaagcagccaaattctgttctggtcggagatattaatccagataccggagaaccggcatacagaacaaaggtaaaatactggatgcaggtgacgtcaagcggagtcggttttcatgatgcgacctggcagactgcatttggcgggacattgtatcagattccgggaacagggtctcatggctgtatcaatatgccgttagatcaggcgggggcgctcttcaatatgatcgaaccagggacaccggtaatcttccattggtgataaaaaattaattttttgtgcaaatgtaccaattgatgttaaaaagataacgttaaatatttgtcaaaagctatattgacaattatttaacaagaaagtatactaatacctgtaattaagaaaccaagtcaattacaggaggattattgaaatggcgaagaaaaaagaagagatgggagtacctgcaatcgtagacagcgtagaaacactggaagcgaagatgaaagcaatgcgcgaagctcagaaagaatttgcaaaattctctcaggagcaggttgataagattttctatgaagcagcaatggcagctaacaagatgcgtatcccgcttgctaaaatggcagtagaagagacacagagaggtgtccttgaagataaaatcattaaaaatcattatgcagcagagtatatctacaatgcatataaagatacaaaaacttgtggagtgatcgaagaagacactgcatacggaatcaagaaagtagctgagccgatcggacttgttgcagcagttattccgacaacaaacccgacatctacagcaatctttaaaacattgatctgtttaaagacaagaaatgcaattatcatcagtccacacccaagtgcaaaagcatgtacgatcgaagctgcaaaggtagtattggatgcagccgtaaaagccggagcaccggaaggaatcatcggatggatcgatgttccatctctggaactgacaaatcaggttatgagagattctgacatcatcctggctacaggtggtcctggaatggtgaaggctgcatattcttcaggaaaaccagcacttggtgttggacctggaaatacacctgttatcattgatgatacagcagatatcaagatggcagtaaactctatcatccattctaaaacatttgacaatggtatgatctgtgcttctgagcagtcagttactgttctggatagcatttatgaagaagtgaagaaagaattccagtatcgtggatgctacttcctgaaaaaaggcgctgagcttgataaggttcgtaagacaattatcatcaatggtgcattaaacagcaagattcctggaaaatctgcatatgagattgcaaaaatggcaggtgtagatgttcctgagaatacaaaaatcctgatcggtgaagtagagtctgtagatatttcagaagaatttgctcacgaaaaattatctcctgtacttgctatgtataaagcaaaaacatttgacgaagcacttgcaaaagcagaacagcttgtagcagacggtggatatggacatacatctgctctgtacgttcatccggcacagacagaaaagattgaaaaacactatgcagcaatgaagacatgccgtgttctgatcaacactcctgcagctcagggtggtatcggagatctttacaacttcaaactggctccatctcttacactgggatgtggttcatggggcggaaactccgtatcagaaaacgttggagtaaaacacctgattaacgtgaagacagttgcagagaggagagagaacatgctctggttcagaacacctgaaaaagtatacttcaagaaaggcagcatgccggttgcactggatgaacttggaacaatcatgcacaagaaaaaagcattcatcgtaacagactcattcctgtacaaaaacggatatgtaaaaggaatcgaagagaaactggatgctatgggaatccagcacacatgcttctatgaagtagctccggacccgacactgcagtgtgcacagaaaggtgcagacatgatgcgttctttcgagcctgatacaattattgctcttggtggtggatctgcaatggacgctgctaagattatgtgggtaatgtacgaatatccggatgcaaactttgaagatatggctatggacttcatggatatccgtaagagagtatacacattccctgagatgggtaaaaaagcatacttcgtagcaatcccgacatcttcaggaacaggttctgaggtaacaccatttgcgatcattacagacgcagagacaggtgtaaaatggccgctggctgattaccagttacttccgaacatggcaatcgttgatgttgacaacatgatgacacagccaaaaggactgacaagtgcatcaggtatcgacgttatgacacatgcgatcgaagcatttgtatctatcatggctacagactacacagatggtcttgctatgaaagcagtgaagatggtatttgaaaaccttccatctgcatatgagaacggagcaaatgatccgaaagcacgtgaagagatggcaaacgcttcttgtatggctggtatggcattcgcaaatgcattccttggattgaaccactctatggctcataaactgggagcattccaccatctgccacacggtgttgcaaacgcagtacttctgacagaagttatgagatacaatgcatctgaggttccaactaagatgggaacattctctcagtatcagtatccacatgcacttgcaagatacgctgagttaggacgttttgcaggatgcacaggaaaagatgacaaagaagtatttgagaacttccttgcaaaactggaagtattaaaagaacagatcggaatcaagaaatccatcaaagagtatggtatcgatgagaaatacttccttgacacactggatgacatggtagagcaggcattcaatgaccagtgtacaggagcaaacccaagatacccactgatgaaagagatcaaagaactttacctgaaatgctactatggaaaataatttccggtaaggaaaataagagagaaggacattccaaacgccagaaatgacgggaggagtgtcctctttttgtgaaaatataaaagaagaaaatcgttaaaaaaagttaagaaattaacaattatattcagtaaaaaaatatcgtgaaaaattgcacaaagttaactttaggggcttacatttcaaaaaagcaggagctataataaggtcagtaaaagaaaaacagataccacaccggaaggatttaccgggcgggatagaatgtatgacaggaggcaatttttatgaaactggaagaaaaaaacttaatcgtaaaacgttcttacaaagaagtgtacaaatgtgaagaaggaattgtaaaagtatttgcaaaagagcatccgaagtcagacgtactgaatgaggctttaaatactgcccgtgttgaagaagcaggactggatatcccgagtgtaaaagaagtgacacagatcgatggaaaatgggctctggtgatcgagtacaaagatggtaagacaatggaagagatgatgaaggtcgatcctacaaatctggagaaatatatgaatgattttgtggatctgcagctgagtgttacaagtaaaaaggcacctcttttaaacaagatgaaagataaatttgcccggcagatcaatggattaaaagtcctggatgcgacgacaagatatgaactgatgacacgactggaaagtatgccgaagcatgacaagatctgtcacggagattttaatccgagcaacgtgatcgttggaaagaacggtaagatgactgtgattgactgggctcatgtgacacagggaaatgcaagtgcagatgcagctatgacctatcttttgtttgcactggaaagtcaggaaaaagcagatctgtacctgaagattttctgtaagaagagtgatacagcaatgcagtatgtacagcagtggcttccgatcgtcgcagcagcacagctttccaaggaaaatgcgcttgagaaagatttcctgatgagatggattgatgttatggattaccaatagaaaagaggctgaagatcggtattaacaaaccgattttcagccttctttttatgtacgtataaatttctaccagctctggaagaaaagattcccgccgacattgactcccggacgatcggtagcacctgcatacaggaagtagtagcagtcaatgacagaagaaagtcttgctccgttgactgcgtcctgggtaacctgaagtgccaggctggacggaccggaattcagaacagaatcaagtcttccgctccagaccggttcaaactgtccggttgcatagatgacaccgtgaattgaattcgggaaaagcggactttccacacgattcatgatcacggtcgctacagccagcatggaattataatcatgtatggcctcgcagtccaataaagcggcaaaggtagtgagctcatcatgggttgcatcagagcctcctccctgaatgatatctccgccggaatccggtgtagtcggaggtgtcggagtcactgttgagttaccgtcaccggatgaaggcttgtccgatttctgctgctgttgctgctgaagttcctgctgtctttttgcttccagttctgcagcttcctgtgctctaagtgctgcaagctgtgcctgaaatgtagccagatcagtagaagtagcagcggctttcgcttcgagatcagactgcttcttatccagacttgtctggagtgagaccagagaatcctgctgtgcctgaagagtcttttcctcttctgcgatttgatttttcgtctcctgcagttcagtgagcatcttgcggtcatagtcgctgatgttctggataaaatctgctttgttcagaaagtcagtcatatcctctgcagaaaagagcatttccagaagtgatgcgcttccggtctcgtacatatacttaatacgtgtcttcatgtcattatactgttgagcttcttttgcctgtgcgtcggctaaggaatcttttgtcctttgaatctcgccattcgtaatctcaacctgcatctcagtcgtagatatctgatcgctgatggcgacaagttcctgattgataccggccagctggcctgccagatcagaagttttgctttcgaggctttgggtgctttcctctgcggaaacagggagaacagaaaaagccattgcgagggagcaaataagtgcagtacctgtttgcagcctgcgttttaagcctgatttcataactttaattcctttctataaaaaagtctgtttcgctattatactataaattgcgaaataacgcaaattttgataaaataagttacaaaactttaagaaagaggttactgtgagcagtaacagaaagatgaggagtaggcttcatgaaaaagataaaaatgataggactggatttggacgggactttgctcaattcaaaaaaagaggtaactgatcatacaaagagtgtactggaggaggccatcgcgcaggggatcattgtgctggtagcgaccgggcggccgcttaccggtattccaggacaggtaagagcgatacagggaatgcagtatgcgctgacgaccaatggggcgagaatctacgatttgatccatgaaaaaacgattctttcgcatccggttccttatgaaaaaggaaagaaagcgttggaaatcacagaaaagtatgatacattacaagaggcgtactttgaccgggaggtatatgcgcaggaaaatcagctacaggaaatttggcgttatcacaagaatccgcatatgtgggagtatgtaaggtctaccaggactgtagttccgtctattgtaaaatggtatggcgaagcagagcgcgatgcagacaaactgcagcttatgtttgcggatatgcaggatatagagcgtgccagaaaagagctggaagagattccggggctggtattgacgggatcgcttggaaataacattgagattaatgctcagggaatcgataagggaattggaatgattgagcttgggcacagacttggaattgacagagatgagattatggcatgcggagacggggacaatgatcttgaaatgttaaaggccgtgggatttggagttgccatgggcaatgcagaggaaagtgtaaaagcggtagcagattatgtgacggatacgaatgaggaagaaggcgtggcaaaagcagtcgaaaagtttgctttgagataggaggagagatatgttagaagcattaaaagtaatcatactggggattgtggaaggaattacagaatggctcccgatcagcagtacaggacatttgatcctggtagaagaatttgtgaagctgaatttcagccagtcgtatctggatatgtttaacgtggtgatccagcttggtgcgatcatggcagttgttgtgatttattttcaccggctgaatccgttttcaccgaaaaagacagaaaagcagaaaaaaatgacgctgcagctctgggtgaaagtagtgatcgcttccataccggcaggagtggtaggaatcctgtttaatgattttattgaagaaaaatttaataattcttatgtagttgctacgatgctgatcgtagtcggtgttctgtttattgtgatcgagaacagacacaaaggaaggaaacctcagatcaccaagatttcccagatgggagttccggtcctgatctggatcggagtattccagatgcttgctatgattccgggaacttcccgttcaggagcaacgatcatcggagcactggcactgggcgtgtcaagaactgcagcagcggattttacattctttctggcgattccggcaatggcaggtgccagccttgtaaaacttcgtcactttggatttgactttacagggactgagcttgggcttcttctgcttggatgtgttgtttcatttgttgtgtccattctggcgatcaagtttttattaaaatacattcagaatcatgattttaaggcatttggatattatcgtatcgtacttggaattattgtgttcctgtatttcgggattcatgcactgcttgcataaaaatgaattatatacaaaaaatatacgtataaaaatgataatttatgcataattagtcttgcaatttcgtaaaaacatggtatcatatatgtataaaatgaatgattatacagactatgtgtattttgttttgggaggaatgaaagatgaaaatgaaaaagttgacaggaatcgttctggcagcggcatgtatggtttcgcttgcaggatgtggttcttcagagaaaaaagaagtgaatgttgagaaaccggaagatcttaagacactgacgatcggtgttcagcagggaacgacaggagatatcttaagctccgatcaggtagagaaagactctcagatgaagcgttatccgaaaggatcaactgcaatacaggcgctgaaaaacggaaagatcgactgtgttgtaatcgattctgagccggcagcaaaatttggagaaaagaatcaggatctgaagattatcgacggcgtttttgaaacagaagaatatgcaatgtgtgtgaaaaaaggaaacacggaattgctggatgagatgaacaaagcgcttgaagaactgaaagaagacggtacagttgataagatcatcggaaactatattggagatgacaccggaaaatatcagtatgaatctccggcagatgtggatcactccaagggaacacttgttatggctacgaatgcagaatttgaaccatacgagtatcatgaaggtgacggaattgtaggaatcgatgtggatctttccagagcgatctgtgataaaatgggatatgatctggagattctggatatggaatttgattctattcttccatccattgcagcaggaaaggcagatttcggtgcagccggcatgacagtggatgcagagcgtcagaaaaatgcagatttcacagacacatatgcaaatgcaagccaggtagtgatcgtaagaaaataatcacagaatggtaatgagatacaataacaggggtgcgggacaaaaatcaggcagccctgttttgaactgttaaagaaacatacaagagaggtaaaaacatgagcttttcagaaaagttatatcagaactttattgaagatgaccggtggcttttgctggtaaacggtctgaaagttacgatccttgtaacattgtttgcacttttagtaggtgtgatcattggttttactgtggcgatcattcgttctctgcatgataagaccggaaaattcaaaattttaaatgcaatctgtaaagtgtatctgaccattatcaggggaacaccgagcatgatccaggtattgttcatgtatctcgttgtgttcggggcttcttccctgaattccatcgttatcggagggctggcatttggtatcaactccggagcctatgtagctgagatcgtgcggtccggtattatggcgattccggaaggacagacagaggctggaagaagtcttgggctcagctatggacagacgatgcgtctgatcattatgccgcaggcatttaaaaatgtactcccggcgttggtcaatgagatgatcgtgctgatcaaagagactgcgatcatcggatatattggagaacaggatctgacaaaggcggcaatggtaattcagagccgtacatttgaggcatttattccattaatcacagcggcagtgatctatctggcactggtgatgctgcttacattctttatgaacaaactggaaaggagactgcgcacaaatgaacgataagaacgaagtattgatccaggttcaggatctgaaaaaggcatttggaaagttggaagtactgcgtgggatttctacagagatcaaaaaaggagaggtcgttgttgtgatcggaccgtctggatcaggaaaatctacatttttgcggtctctgaatctgttggaggttccaacaggaggaactgttttatttgaagggacggatattacagacccaaagaccgatattgatgttcatcgtcagaagatcggaatggtgttccagcatttccatctgtttccacataagacgatcctggaaaatatcatgcttgcacctgtgacattgaaaaagatgtcgaaagaagaggcagagaaaaaagcaaaagaactgctgcagagggttggacttgcagacaaggcagatgcatatccggatcagctttccggtggacagaaacagcgtattgcgatcgtgcggtctctggcaatgaatccggatgtgatgttgttcgatgagccgacttctgcgctggatccggagatggtaggagaagttctggagctaatgaaacagcttgcaagagacggaatgactatggttgtggtaacacacgaaatgggatttgcaaaagaagttgccacaagagttgtgtttgtggatgaagggcagatcaaagaagaaggaaatccgaaggagttctttgagcatccgaaggatccgagactgaaagaatttttgtcaaaaattttatagaagagtgaaaacgagaacgtatctcgactatcgcctccttttgtgatataatacaacatcaatgtaatcacaagaggaggcgttttcatgagctcaaaagagtctgaaaaagtaaaaaaacatatctgtcttggcatcctcgctcatgtagacgcaggaaagacgacattgtcggaaagtatgctctatataagcggaagtatccggaaaatgggacgggtggatcataaggacgcatttctggatacctatgatctggaacgttccagaggaatcactattttttcaaaacaggcagtgctttcctggaaggatatggggataactctgctggatacaccggggcatgtggatttctctgcggagatggagcggacactgcaggttctggattatgcagtgcttgtgatcagtggtgcagacggagtacagggacatacagagacactgtggagacttcttggacagtacaagatcccggtgtttctttttgtgaataagatggaccaggcgggaacagacagagaacgcgttctggcagaattgaaaaagcgatttggagatcactgtattgattttgaaaaagtgtttggaagtgaaagcagtgaagaggcagcagagcagctagccatgtgtgatgaagggctgctggagcagtatctggagaacggagaacttccgagagagcaggtagcagatttgatcagtcagagacgggtatttccgtgttattttggctcagcactgcacacagaaggtgtggaagaactgttggatgcgcttgagagtttgaccgaggagagacagtatcccgcaaaatttggtgcgaaagtatacaagattggacgggatgagcaggggaacagactgacatatttaaaagtgacaggaggaagtataaaggtcagggagatcatcacggatacggaggagaagatcaatcagatccgccgctattccggtgcaaaatatgagatgctttcagaggtacatgcaggggaagtctgtgcagttaccgggctttctgatacgtatccgggacaggggctgggagcagagtcggagtctgatatgccgattttagaaccggtcctgaattatcggattgaattgccgccggattgtgatatacacaagatgcttctcaatctaaaagagctggaagaggaagagcccgagcttcatattgtatgggaagagcggctttgtgagatccatgcgcagctgatgggagaagtgcagatcgaaattctgaaaagcattatctgggatcggtttaaagtacgtgtggaatttggaacagggaaagtggtctataaagagacgattgaggatcctgtcgaaggggtcggacactttgaacctctgcgtcattatgcggaggtacatcttttactggagccgggagagcgtgggagcggtttgcagttttttacagactgcagtgaagatattctcacccgcaactggcagcgtctgattcttactcatctggaagaaaaagagcataaaggggtactgaccggatcggcggtcacagatatgaagattacactggtatccggtcgtgctcatcagaaacatacagaaggcggagatttcagacaggcgacctatcgtgcagtgcgtcaggggcttagaaaagcaaagagtgtccttctggagccgtattatgagttcgagatggagctccttccagagcacgtgggacgggctatgatggatatccagaaaagaagcgggacatttgagccgcctgtcgcagacggggaaatctctattttaaaagggtgtgccccggtgtctcagatgcgcggatatcagacagagctcacttcgtataccggagggagaggacggatgtcctgtcggttaaaaggctatgaaaaatgtccggatcaggagcctatcgtggaagaaatcggatatgaccctgaggcagatctggaaaatccgacaggctcggtgttctgcgcgcatggagccggatttgtagtgaactgggatgaagtggaagcgtatatgcatctggaaaacacgctggagagcaatgaggtttccgaagagaagaagcgcccggtggtgcgtcagacacgcagtacttcttcccagatcgaactgacccgggaagaactggatgcgatttacgcaagaacaccggatccggtgaaaaagaaccggacacccgtaatggtaagggcaaaagcacagccggcagcggatgataagtggacatcacgcaaagaagaaaaaaaggaagaatatctccttgtagatggatacaatattatttttgcatgggaagagttaaaagagctggcaaagtcagatttgaaaagtgcccgagacaagctgatggacgtgctgtgtaattatcagggatataaaaaatgtacattgatcctggtttttgatgcctacaaggtagaaggcggtccgggatctgtgatgaaatatcacaacattcatgtggtatatacaaaagaggccgagactgcggatcagtatattgaaaagacagtccgcaggatcggaaaaaatcatcatgtgacagttgctacatcagatgcgctggaacaggtgatcattctggggcacggcgcagcgcgtatgtctgctttgggattgaaagaggaagtggagcttgcgcttttggaaattcgaagagaacatcttggaaaagcagaaaatgacagaaactatctgtttgattatctgacaaaggaagacgcaaggcagcttgaaaaagtcaggctgggagagatgcccggcaaaacaggagaaagatgattatgaaatatgagagaatagagcgggcgacatttctggaacggccgaaccgttttattgcgtatgccaggattgcaggaaaacaagagacgatccacgtgaagaatacaggcaggtgcgcggaacttcttgtgcccgaagcagagatttttgtgcaggagagtgacaacccggagcgaaagacaaaatgggatctgatcggggtgagaaaaggaaatcgtctgatcaatatggattcccagattccaaacaaagtcgtggaagaatggctgcgtgcaggcaatttgtttcttgaaccggtgacggttcgcccggagacaacatacggcaactcccgatttgatttttatgtggagtcgggagaaaagaaagcgtttatcgaggtcaagggagtgaccctggaagaggatggtgttgtgcgttttccggatgcgccgagtgagcgggcagtaaagcatatggaagaactgatccgtgcaaaaaaggaaggatacgatgcttatgtatttctggtgatccagatgaaaggcgtccgctattttacaccgaatatggatacacagccggaatttggtgaagtactgaaaaaagcaaaagcagcaggggtaaagattctggcgtatgactgtcaggtgacagaagattcgatcaaaatcgatgaagaagttccggttgtattagagaaaccgattttgtgggaaaccgtagatccgattgtagcctggtatcgtgaaaataagcgggatctgccgtggaggcatgatgtgacgccgtaccgtgtgtgggtgtctgagattatgctgcagcagactagggtggaagcagtgaagccgtactatgaccggtttttaaaggaacttccgacgatcacggatctggccaatgcaaaagaggaccggctgatgaagctgtgggaagggcttggatattacaaccgggtccgcaatatgcagaaagctgcgatccagatggttgagcagtatggcggtcagtttccggaatcatatgaagaaatccatgcactgacaggaattggaaattatacggcgggagctatcggatcttttgcgtttggaataccaaaaccggcggtggatggaaatgtgctgcgtgtggtgtcccggattctggcaagcagagaagatattatgaaagccaaagtccgtacggcgatagagacggcactggaggaagtgattccaaaagattgtccgggagactttaatcagggattgatcgagcttggtgcgatcgtatgtgtgccaaacggagagccaaagtgcgagatctgtccggcagcagagatctgccgtgccagaaaagaaggaatcgcaatggagcttccggtcaaaacaaaagcaaagggaagaaaaatcgaaaagaggacggtacttgtatttcatgacagtgatactctggcaattcagaaacgtccggacaaaggacttctcgcgggattatacgaactgccgaatctggaaggctggctgagtcaacaagaagtgatcgagtacagcaagtccatcgggctttctccgatccgtatcaaaaaacttccggctgcgaagcatattttcagtcatgtagaatggcaaatgaaagggtatgagatccaggtggatgagctggagaaaaactgcagcaaggaaatgatttttgcaaaagaagaagtattaaaggaaaagtattcgattccatctgcgtttgaggcatattgtgtgtggaaacaaaaatagattagagtgtgctctgttttcttgaatgacttttcgatttgtgatatacttgggtgcgaataaggagtgattatcatggaagaaacaacaggattatccaagcagcagaaaaagtccatggaaacaaaggcaaagattttcaaggcggcaaagcggattctgcagcgcagtggatatgagacattatcaattaaaaatatatgtgaagaggccggtgtgtccaacggcagcttttatcaccatttcaaaacaaaggatgatcttttgtcttattatatcgaagatcagccgagcatcaatccggatcttctggatctgccggaaaatgcagaggatgcaaaaagaacgatcatccaggtatatttaaattatgtttcttattgcaaggaactgggtgttgagtttatggcaggatactatgatacgaagaatcaggcgctcaatccggtcagccggacggagcgtccgtatccgatcgtgacggtacagaactatgtggaaaaagccataaaagaaggaaggattcagatgaacgtggaaatcgaggcatttaccacggacattcgtatgatcgtgatcggaaatgtgtttgaatggtgtctgcgaaatggagaagcagattttgagggaaatatggcacgttcgctcggaaaatatctggacagtacattagattagatccggaggtttctggaatgagatgttgttttattataaatccaaattcccgctcccaaagaggaagggcaatctgggaagaggtacaaaaagaattagaaaagagtcagataaaatatgagatttatctgacggaacggagaaaaaatgcgacagcgatcgcagcgatgcttacggctgaccaggaggaaaagactctggtcgttctgggtggagacggaacggtaaatgaagtgttaaacggaatacaaaattttgaaaatgtgatcctgggatatattccgactggatccagtaatgattttgcaagaggaatgaagattccaaaagatcccgtcaaagcacttcatcttgttctgcatccgcaggcaatacagaagatggatatcggtgtcgtagattatggagagaaaagcagacggtttgcagtcagtgcgggaatcggatttgatgcgatcatttgtcatcaggcaagtgtttcgaagttgaaggcggcgctgaataagatcagacttggaaagctgacttatgcaggaatcgcaatcgacagattgatcaaagatgattccgtgcgggcggaggtcgaactggacaaaggagagacacaggtatttcgagatacctattttgtggcagtccagaatcagccgtatgaaggcggtggatttaaattctgtccggaggcggatccgggagacagaaaactggatgtgatcgtagtatccggtctgaaaagatggcaggtgatcagaacactgcttctggcatttcagggaaaacatgtaggacataaaggcatttccattttccggtgcgaagaagtaaaaatccggttttctcaggcaagagcggtgcacacggacggagaggcagtatttttgaaaaaagaaatccggatgcatgtactgccgcagcaggtgcgggtgattacatcataaaggggtgcgaggaatatgtggagatatctgacaggatgtatcctgatcgtaattggcgcgtatttttatatgattttcccgggaatgggaagaaaacgggagatctggaaattcagaggaacacagtgggcgcatagagggctgcatgataaaaagatcggaattccggaaaattcgatggcggcttttcgggaagcaatacgggcaaacaaaggaattgagttggatgtacatctgacaaaagataagaagatagcagtattccatgatgattctctgaagcggatgtgcaaagtctccggaacaatagaggagaagacatgggaggagctgaaaaacctccggcttcttgagactgcagagccaattccgctgcttgaggatgttctgcatcttgtgcaggggaaagttccgatcctgatcgaggtaaagctgctgacagaagatatggaaatctgccgttgtctggcaaagacgatggaagattataagggaacgttcctggtacagtcatttaacagcctggtactgcagtggatgagaaagaatcaaaagcagattttgcggggacagttgtcttccgatcttgtaaaaagtgaaaagacaccgcattattttttcagattctgcgtaaaatatttattgagcaactgtatctgcagaccggatttcatctcttataaaatggaggacagcaagaacctgagtctgtggatgcaaaaacatatttttcatgtaccaatcgcggcatggacactgcatggagaagagatgcttcagcgtgcaaagagcagatttgatatgtacattttcgaaaaaaattagaagaaatagaaagaaaatcaaaagatttgttaaggttttatgaatcgccttgttgattaaaaaaaatcgtgctataatcggggcagttaaaaagtattatgttttacaaattaagggagcggtcagaatgaacaggagcagtgcattgaaaaattttataaaaaaatataaacatgcatgggtattcctgtatgcgtttatctatatgccgtggtttatgtatctggaaaagcatattacagcagattctgagtatcatgtgatccactccgtactggatgataagattccgtttgttgagtattttattgtaccgtatctgctctggtttgtgtttattactgcggtattcctctattttttctttacagatgtagaggggttctataagctggcgaagctcagttttatcggaatgacgatttttcttttgatttctacggtgtttccgaacggactgacattaagaccggtcgtatttccccgggataatatatttacagatatggtcaggatgctgtatctggcagataccccgacgaatgtatttccgagtcttcatgtgttcaattctctggctgcatgtattgcaatcgcacagagtgagcagctgaagaagcatccggtgatcagcaacggagcctatattttagcaggactgatcatccttgcgacgatgtttttaaaacagcactccgtcattgatgtgatgggagctgtgctgatggcatatacactatatcagtttgtgtatgcgacagagaaaaagaaagtgccaagcgtgtcaagaagcagagagtttggataggaagttcagagtatcataacaagggtcattgtgaaatggagcaatggctctttttgttgtgcggaaacagaaattgaaagaacactgcgaaaatgatacaatgtggaaaaagtgtacaatatggaggagtttatgggacgacagaagatattgatcgtagaggatgatgcggatatcagtgctctgctggtcaaaattatggaaggggcaggatatcaggtgcggcaggcattttccggaacagaggcattattttgtatggaacgggaattaccggactgtgtgctgttggatctgatgcttccggggatgacaggagaagaggtgttggagcagatccgacaggaacagaaaaaagagatgcctgtgctgatcttatcagcgaaagtgtcagtgcaggacaaggtaaagctgcttcggcttggcgctgacgattatattacaaaaccatttgatccagaggaagtaattgcaagagtagaagctgccatgcggcgttatacaaaagaagcacagaatatggaagcagaacaggaggtttttcgatacaaaaatctgagcttatatccacaatcccgaaaagttgaagtatcaggcattgagcttccactgaccatgcatgaatatgatattttgtatttgctgatccagaatccacagaaggtatactccagagaacatctctatgagcaggtctggaaaggcgggtactatggggaagacaatacggtcaatgtgcatgtcagcaatctgcgcaaaaagatccagaaggcagacaaagaagaatcttatattaaaacagtctggggaatcgggtttaagctggggtaatctttatagtttctttaaactttcttgaggactccttaaaacagaaaacggtatactacgaatggaaacagggaaacacaaaaaggagaaggaaagttgagagaacgagtcatagaaacaacacagattacaaagacatatggaaaagtcctggcactcgatcatgtggatatctgcgtaaagcgaggagatatttacgggctgatcggggataacggagccggaaagtcaacacttttgaagcttctggcagggcatagtgcggcatccacaggagagatcaggctgtttggagaacagggagagaaggaactgcaaagggcgagacggcgcagtggagtgatgatcgaacagccgggctttttcggaaacctgacagtggaaaataatatggaatattatcggatccagaagggagttccgggaaaagaaaaagtagaagagatgcttcgcatgacgggcatctgggaaaaaagaaagtgccggtgcaagactctttccatgggaatgaaacaaagactgggactggcgatggcgatgctcggagagccggagctgttgatcttagatgaaccgatcaacggactggaccccagtgggattgtagaattcagacagcttttaaagcgtctgaacgaagaaaagaagatcacgattctgctttccagtcatattctgacagaactgcagcagctggcaacggtatatggctttttaagtaagggaagattactggaacagatcactgcggaaaccctgcatgaacgatgtacggattctgtggagattacagtgtcagacgtgcagcagtatgccgtatttctggaagaacagttatcaggagaaggatacaaagtactttcggatgggaaaatctgtattgtaaatccaaaacaggatattgaagtctacagcaggcttgcagcagaacatggaatttttatccgggagctgaccagaaaacaggcatctttggaagcgtattacatgaatctgaagaagggggggaatcagggatgttaaattatataaaaagtgaatgctacagagtgatgcacagccgctcgacttatgtgatgacaggaattatggcagtattgccggtgttgtttcatattattttgtatgtgacaggtgtggccagtagtacaacgcaggattttccctatgatattacttctttttcattcagttttctggcaggaagtccgatgctttttacttatgcagggctgattgttgcagcagttttgtatgaggaggaacataaaaacggaaatatgaaaaatgcagtggcgtttgggatttccagagaaaagctgtttttggggaaatgcatgactgcagttttgacggcaacggttataatggcgctggtattgactgcctatataggaagtgcatggttcttgttagagcatacgggaccgacaagcctgaaaattattttaaccgagattccggcagtgtatggaacagcagttgcatctatgatcctggggatcgcacttctggcatatttcaaaaatgaggtgatggcagcaatgctgtgggcagtaattgtatatgcgataccgagagtgttactgttggctggaatggttttactgggacaatggggcatagaatttttgtgggattttgcacagcttctgcctgcgaatctgtttcagtttggagccaaggtcaatatgtctcattgtgaagtgctgtggaagacttcccagggaatgacaaaatgtgtgattgtgggaatcgtgggaacagtgcttgcgatagtggcaggaattgtaatgctgcggaaaaaagaggtataaaaggagaatgaaaacatggaatgagatattttattgcttggcaatcccagattgtatgagatttcagaggaggtgaaacgtgaggaattagaagaactgcgctctgtttttacggatatgtttgattgtatcagaggtatccgacgagattatgggtttggacgggcaattgcggcaccacagattggggtacagaagcggctgatttgtattttgacagatcagccttatgtcattatcaatccccggttagaatttgtgggtaatgaaatgatggagctgatggatgattgtatgtcatttccaaatcttctggttcgggtcagacgctatcgccgctgtattttacactatctggacgagaactggaaagaacaggaaatgtatctggaagacgatatgtctgaactgattcagcatgagtacgatcatttggatggtatcctggccacaatgcgggcaattgataacaagtcttttgtgataaaacaatagacaattctaatttgagcgagaaagggatgagagagatcaaattacatcagatatttacgaaggagggaaagagaaaatcatgaaatctattttaatgatcggtcagtcaaatatggcaggaagaggatttataaatgaagtaccgatgatctgtaatgaaagaatcctaatgcttcgcaatgcaggatggcagatgatggcggaacccatcaactatgaccgtccgaatgcaggaatcgggcttgcgggttcctttgctgcgatgtggtgtatggagcatgagggagaacagatcgggctgattccatgtgcggaagggggaagttcactggatgattgggcagtggacaaaaatctgttcaagaatgcagtgatacaggctggatttgcgatgcaggacagtgaactgatcggtatcttgtggcatcagggcgaaagtgacagttacggaggtggttatcagacgtattataaaaaattacaggtgattattgagtcactccgaaaagaattaaacgcattcgaagttcctttgattattggtggattaggggattttttaggaaagaacggatttggtctgaattgtacagaatatgaacttgtgaatgaacagttgttaaagtttgcgagagaacaggagaatagctgctttgtgactgcagaaggtctgactcccaatccggatggaattcatatggatgcggtttcgcagagaagatttggtgtgcgctattatgaagcatttgttaaaagagagcatgtgctaaagccgatagaaaatgagatggaattgttggagcgatgcatcagcggaccacatacaaaaagggaaaaaatgtatctggcaatggcagaatttgcagcggggaaaatgacagatgaggaatttggcgaacgaatgagagtgatcacagtaagttcagaagcgatggaggaatagatgtgctatgggtattatttagcgttgcaatcgtgatcgcagtttactttgccactcgttttttcttattaaaaaaagcaatgaaagaggcaaatcgggagtttcaggatattctgaaagatatacagcagaatcagatccttcacatggcgatgccggataaagagctggaaaatatggcgcaatctgtcaatcaggcattggaacagattcgaacagagcgtcaggagtatgaaaagcgagagcgggcatttcagtcagagattgagaatatcagtcatgatctgcgtaccccgttgactgtgatattgggatatttaaagctgatgaagggacaaaaggagacggacatggagatggtggagacgatcgagcggaaagcaaagaccatgcaaagactggtgacagatttctatgatttgtcgcgacttagtgccagagattatgaagtggagatcaaggaaacagatgtaggaaggattcttagggaatcattgatggatagttatcatattttagaaaaacgcgcgttggagctggaggcggagattccggagcatatcatagaagtgttaggggatgcatcggcgttggagcgtatttttttaaatttgattcagaatgcaggacgatatgcacaaagttttttgcatgtgtttgtaagagagcaaaagcagcaggtgtggatctgttttgaaaatgatgccttcaatgtgacagaggcagatgtggagcatttgtttgaacgattttacaggaaagaccgggcaagaacacaggaaggaaccggtctgggacttacggtagcaaagcagctggcagaagcaatggaagcaaaattgactgcagaactgatcagagagcctggaggtgggaaaggagagatcataccaaaactgcgttttacattagaaatgaaaaaagtagaaaaatttatgcaaaaggaataaaaataaatagagtattgcaatattttcgattataatgaaagaaaaacatgtcggaggtatatgcaatgcgagaggaaaaaaagaaaaaaagaaaacggattctttcagtagtgcttgcagtgacaatggggatgtccatgctgacaggatgtggagcatctgaaaacagccaatcggcagaaactgtcgaactcaaaggagagtatcaggcatcgccttttgtgcaggctgagatcaacagcgatacggtagagtggatttgtgcagcgtatgccgtatatacgcaatataatcataagactctgggtgtgataggcggattatcagaccaggaaaaggaatcttcgcaggacagaatcaaactgacactttcagagggctggggaatcaatggcagagacgatgtgacagaagtcatcaataagctgcttataaaaggtcacagggaaacctatttaaaaacggtgaaaaaattggagaagaaaggcttgctggagctttccacagaagaggctatgacaaatttttccgaggatgacgaggaatttgcgcgatatcaggatgctcatgagatgtacacgcaatatggagagcatggaatggatggctgggattacagcagagcgcttcaagtgctgggggactgttatcttgcagattatatcaatctggaagaatgtctggatctgtctcttccgatcgcaaaaaagcttcagagtgcatttacgagctgggaagaactggcagacagctatatatatggatatgcgttctggcagaatgaaacagcggacgatgtagaaacgaagtttcgaattcaggcctatgcggaattagtagaaatggaaaacagtccatattcggttgcgtatgataccaaattggagaatacctggaaagatggggagaaacggaaagaagaacgcaaagcgtatgaaatgtcagatggatatgttcccatccgatgtacagatacagaaagtgttcaggtacgtcttccggaagaatatgtgtttgacaaagaagattatgaagagtatgaaaataccaaatttaccaaaccatgtggggatggagacagcatctatatcagttatcaggcagaatttctggatgacaggaacaatgcagaattgcaaaaaaaatattggacagaaggaaatgcacaagagaaggaaaatgcagaaaagaagggcggtacttatgaagcaggggaaatcaagtcactttccgtcaaggaagacctcaccgttttttatcttgctgaaaaagaggtgacggaaggcggaacacagcagatttcctatcaggcagtggcagaagtagggggaaaatatctggtaaaatgctatatcagcgatgtggcatctccgggatatgagctgatgcttggcatgaatgaggaagccctgataaaagaactgttttctgattttaggtggtgagcctatgaatacacagtgggaattgtattttctgaggcgggagattgagcggcagaaaatacagaaacagagaaagaaaaagcggcgcatatggattgccggtataagtggactgcttgcattggtatttcttgcaggcgggatttctatggtacgattttatagaagtgattatggaaaattgaagcgcgcagcggatcagtacgatttcagactggcggcagtcaggatgtcacagtatgtgaatgaaaaatatggagaagaggtgtgcagttccggagagttatccgtctctccctgggatccatccaatctccgatcttatctggggtttcgggccgaatcagaggaggatccgggcaaggtgatctatatgctgtatttgtcgaaagagaaagttgtgtatctggatacttttcagtgggaggagatttcagaagatctgatgcaggaagctgctgagaagactggaattgatcaggtgtgctgtgacacgatgcagtattcgagtgtggagctgagtgagccttattactattgtccatgggtggctgcaggggcatacatgacagaatatgaaggaaatctgaagcagttttttacagaagaggtgaaggtgcgtcaagctttgcctgatatagaaaaattgggagaacttcggattaatggggcttttgcactgtattttggagattctgccgtaccgaccatgcgtgaacggattcaaaatccaaatgtagattaccgagaacagtttgaaacagggctaaaagcgatagaagagaaatatcagatcgatattgcatctgctgttttgtttcaaagggtatttctggagatgaaacaggcagtgacggaaaaggagtcttattcgatttttccgacgacatggatggagtatggaaaaggggagacatttttcagtccggcatatacacttctgagcttatcttatgatcaggtgtttgaaccgaaagcggaaaaggcagcagaaggtgtgtatgtattctcaaccaatgggagaagacgcatgacagggtatacctgtaaaacaacaaaacctccagaggaagtccgtgatttggcagaaaaagagctctcgggatgggagtttgatcagaccttgctgttccatagaaacgagaattacagtacacaggaatatccgatttcttatgccttggcaattgatgcagagaagctgtatccggatcaggagatctctgtcatcggatgggataatctggactgggcagtgtgtcaggcgaaagaacagaatctatatccgccgaaccgtactgcaagagccacctatcaaatggaagatgggtttatggtatttggcgatacagatggatacggaacgaaaaattatggggataagctgtattccattttgaccaggtaatggagagtgcaggcggaggagcgaaaatggaaaaatataataaaagagtgcctggaaggatatccggagttttactgatcttgctgggaggtttggggatggcatataaaatccttctggtatggatggatattctgctgatgcaggagtttcagaacgaagaacttccggaacttgcacggacgcagatggtttttacggcaaaagatgtatgtctggcgattttgtgtctgattttgctgatatggggagttcgtaagattgtgcgtgtgatccggttttaccggtttaaaaagtttatcggagatcgtgagatcgtggctcttgaggaacttgcagaaaagtttcatacatcaaagacgaaaatccgcagtgaactggagatgatgattcaacacaattatttgttgcaggggcatgtgaatcaggagttcccgtgtttgatcacaacggatcaaaaatacaaggaatatctgcaggtgcttgagacgttggagcaggagaagaaagaatgggaagaactgggatttgacgaagaaaaacgaaagatcgtggagcgtgcacagagctgtctttccaggattcaggagtctgtggcagtcatttctgcgaaaagagaaggaaaggaagtatttctggaagatttgcacaagctggagtgcggcgtgaaaaagctgatttccgtatgtagtcataatccggcaaatttgcaggagatgagcatgtttttgaattattatcttcctacggctgaaaagtttgcaagagagtatgagcagcttcttgggtatgaaaatttcggggaaaatatggagagtctgaaacaagatatcccacagggagtgagggagcttgcggaagcatttgaacagattgcaattcggatgtgtgataagatggaaatcaatattttccaggatattacggttttggaagtattgatggctcaaaacagcaggaaaggagcaggaacggatgagcagaaaaagaaaaattcttgatattctcggtatgattctgggagttcttctggtgatcgtaaatggaatgatggtcggtctggaatatatgtatcaggtaggggataagatttatatgctcggtacgatgcgcgacaagatgattccacttgtatttggtgtgttctgctttctgcttggtgtgttcctgatctacagagggccccgggatttcagacgatatcgcagatatcagctttttaaaagtatctgtgccggaagggaatatgtagagattgaagaaattgcccgggaaggacgatgttctccaagttctgcgcttcgaagcacgaaacagatgttgaaaaagcacttgcttacgggagcggttctggatgtgcaggaaggcatgattctgtttggcgaagaggtgaaagcatcgtatcagaaagcatggagtcagtggaatcaaaaacagaatgtgtacagagcagtcggggtatctctggaagagcaggaggcatttcttttgggaaaacagcaggcagaagaactgcaggagctggcaggagaaattgaggagtctaatattcgagccctgctgcaaagggttgcagaagtctatgtaagccgctttgatcatgcagagaaagagcggggcaattttgagtttcttcagaccgtacgggcagactatttgccggaggtggaaaagatggcacgaaaatatattcaaatggaaaaattggatgagacagcgaaagatacgtttgcggcggaaaagtttggaaaatttctggagaatttcccgggaatggatggcctttgaatcttcgctggcaaagtctctgcaatggtgttataatggatgcagactatgagaaaaatgtaataaaggagcgtatctaattatgggaaagattatgctgacaggtgacagacctacgggaagactccatgtgggacactatgtaggttctttaaagcgcagagtagagctgcagaatacaggagattttgatgagatgttcgtgatgatcgcagatgcacaggcactgacagacaatgcggacaatccggaaaaggtacgtcagaatattattgaggtggcgctggactatctggcatgcggactggatccccaaaagtgtacactgtttatccagtcacagattccacagctgtgtgagctttcattttattatatgaatctggtgacagtttccaggcttcagagaaaccctacggtaaaatctgagattcagatgcggaattttgaggcaagtattccggtcggattctttacttatccgatcagccaggcagcagatatcactgcatttaaggcgaacgtagttccggtaggagaggatcagcttccgatgctggagcagacaaaagagattgtaagaaagttcaactctgtttatggagatacactggtagagccggagatccttcttcctgaaaatcaggcatgtctgcgtcttccgggaacagacggaaaagcgaagatgagtaaatcactcggaaactgtatctatctttcagaggagccggatgagatccagaaaaaagtattcggcatgtttacagacccgacacacatcaaagtgtcagatcctggaaagctggaaggcaatacagtatttacttatctggatgcattctgcagaccagagtattttgcagaattcctgccggactatgcaaatctgcaggaattaaaagatcattatacaagaggcggtcttggagacatgaaagtaaaacgtttcctgaataacgtactgcaggcagaactggagccgatcagaaaccgcagaaaagaatatcagaaggatattccatatgtatatgagattctgaaaaaaggaagcgaaaaggctgaagctgttgcagagaagacacttcaggaagtgaaagcatccatgaagattaactattttaacgatcaggaactgattgcagcacaggctgaaaagttcagagaagaatagaaaagataccgggaatcctgtgaaaacaggaggttcccggtatcttttttacagatcgtcgatcagtgcggtactttttgcataggcggtacttttggcttcaaagaagtcagtttttaccatgttggcattggaatactggctcacccagcgcatactgtccggttcctgtgtttgatccggatagatcggatcaaaccccagatttgtgaaccgcagatttccgagatactggatatattccgtgatcatttcttttgtcagtccggcaatctgattcccgatcacataatgcccccaggcgatttcctgacgaaccccttcttttaacatttcctttaatatttcgatatgctccggtgtaaataactccggcagttctttcttcatttccaggatcatattgcggaacagccagagatgcgtgttctcatcccggttgatatagcgaatttcctgagcggagcctggcattttcccgtttcggcttaggttgtagaaaaacataaatccgctgtagaagtaaatcccttccagaatatagtttgccatcataactttcagcaaggtgaaatcgtcttttttctcctgaaattcattgtacaaatctccgataaaggtgtttcttcttagtaaatgcgcatcgttcttccactggtagagaatatcgtttcgttctactggactgcagatggagtccagcatataactgtaactctggctgtgtacacattcctgaaatgtctggatcgagagacagagattaatctcgtttgcggtaatgtattcaccgatgcacgggaggtttgcagtctggatggaatccagaaacacaagaaagcttaagatcttgttgtatgcagtgcgttcgttctcagtcagattcggataatccttgatatcctgggacaggttgatctcctccggaatccagaaattattcatggcctgccggtaccagttgttcacccaggtgtagcgcagattgttgaaatcatttaagttggttgtattgccgccgatcatgcggcggagacggatatccgtgtcgccgccgggattgaacagaggctttttctttaattcagacataaaaattctccttgtttttcttattcagatcaggaagagcagctttcgcattcttctacttccagagatttgcttcgtacatagtaaatggtttttacaccttcttcccatgctttcaaatacaggttgaaaatctgacgcatggtgaaatcattggtgatgtagatgttcatgctttgcgcctggtcaatgtgcctttggcgcactccgcaggcacgaatgctgtaagtctgatcgatcagatgggcgtttttgtaataccagtaagtagccggtgacaattccggtgcgactcgtgggagcatactgccttttttctcttccagaaaataacgtttcaggataggatctagtccggcagtcgtcccggagatgatactggtgctgctggtaggtgcaacggcgagcagatacgcatttctcatgccctgtgtggcaacctttttttgcagggcaagccatttttctgaatgatagtctcttttttcaaagtaggcgccgctttgccagtcacttccattaaaaagagaataactttccttttcctcggcgagattggtacttgcaagaattgccgcataattgatcgtctcaaatacagtgtcagcaaatttcagatgttcttcactttcccagataattccgtgctttgccagcatgtggtggtagccgctgacgccaagtccgatgcttcggtatttttgattggtcagctttgcatacggagtgggatagaagttcagatcaatcacattgtccagtgcgcggacagcggtagaaacaatctcttccatataagaggtatccgtaaccggaagatgaccgagggagagactggcgagattgcacaccacgaattctccgggtctggtcacagtgacaacgacggtgtctccgtctgtggtctgtacttctttgcttacttcttcaattgcctgcatattctgggcaatctcggtacagaggttggagcagtagatcattccggcatgtccgttcggattcatgcggttgaccgtatctctgttaaatgtaaacggagttccggtttcggcagcagaccgaagaaccaggcggatgatatctttgagtgtgactgtccgtttggaaatacgggcatcctgtacacaatccagatagcggcgttcccattcttctccaaagtagtcttccagatggtatccctttgcctgaaaaatctcatgcggacacattaagtaccagttttgatccatatcttcttttgccattttccagaataaatccggatagcagactgccggaaatacgtcatgcgctttcatgcggtcatctccgttgttcgtacggagctgtagaaattccgggagatcccggtgccatacatccagatagacggcaaccgcaccctgacgcataccgagctggtctacggcaacagccgtgtcattgaccagacggatccagcggatcacaccgcctgcggcaccttcgaatccgcggatattacttccgcttgcccgtacttttccgaaatacattcccataccgccgccgaatttgctgacctgggcaaaattatcgatacttcggtaaatcccttccagactgtctggcacggtatcgatgaagcagctggagagctgatgatatggcttacgtgcattggaaagtgtcggtgtagccatagtcacttccagacgactcagcatatcatagaatttttttacccagagcatccgatcgtttctttcattcatggccagatgcagtgcgattccgagaaacatctcctgtggagattccagtggaatatggtcatgtgtgcggatgacgtagcgtttcaggagcagatcgagtccggaaaaagtaaataaattgttgcgttccgcttttaaataagtttcggcaagtaacagctcttcccgggagtaatgctccagaatgtaggaaccgtacagattctgccgggtcagatatacgagttttttgtaaaaatcagaaagttctctgcgtgtttcttcctgttttaagtgaaaactgaattgaaaatataatagtcttgcagcaataaactcccatttcggagcttctgcggtggtaagttctgctgcggcctgaaacagactttcaagcttctgcccgcaggtactctgcggtgtgagaaaactgcgaaattttgtattcagatactccaaagagtagcagatttcagggaaatcagtctggatctcaagcaaaatcgcatccagttttaaacgggcttcatcaggaagaacgtttgaaaactcctctgagagtttatttctattaaaaattcctgtaggatcggtcgtttgcatgtagtgtctccttttcgttttaagttgtaaaaatacaaaatatagtggatttggaaattataacacaagatattggataattctagtccggatttgaaaaaagtgatcagtgagaaaaataattgagaacacaaaaaacctctgcagatatcctgcagaggttagcgtgcgatagaagattcgaactcccgaccttctggtccgtagccagacgctctatccagctgagctaatcgcacccgttaagaacaaatgtcgttcacaacgaaattaagtataacctgaagcaatcgatttgtcaacaacttttttgaaaaaatttaaaaaattttgagatatgtacagagacgtaagaaggtgctataataatccagattgtatgaggcagaattctgccttagaaactatggaggacaaaagatgtatcagtatgattatttaatcgtaggagccggattatatggagcagtgatggcacatgagctgcataaaaaagggaaacactgtcttgtgatcgacagaagagaccacatcgctggaaatatttactgtgaggagatcgaaggaatccatgtacacaaatatggtgcccatatcttccatacttccaatcaaaaagtgtgggagtatatcaatcagtttgccgagtttaacaactatatcaattctccgattgctgtatacaaggatgaattatacaatctcccgtttaatatgaatacattcagcaaaatgtggggaatccgtacacccggggaagcgaaagaaatgattgcaaaacaggtggcagaatgtcagattacagagccaaagaatctggaagaacaggcattgtctctgggcggtcgtgatgtttatgaaaaattgatcaaagggtatacagaaaagcagtggggacgtgactgcaaagaactcccggcatttattatcaaacggcttccgttccgttttacttatgacaacaattatttcaatgaccgctatcagggaattccgatcggcggttataatggaatcatcgagaagatgttagagggggtggaagtcagaacaggtgttgatttctttgaattccgaaaagaacaggcggatattgcagaaaagattatttttacaggaatgatcgacgagtattttgagtatcggctgggagcacttgagtatcgttcggtgagatttgaaacagaagtattagactgtgataactatcagggaaatgcagtggtcaattatacagagcgggaagttccgtacacaagaattatcgagcacaagcattttgaattcggacagcaggagaaaaccgtaatttccagagaatactcttctgagtggaaagtggggatggaaccgtactatccggtaaatgatgaaaagaataccagattgttcgaaaaatatcaggagctggcaaaagcggaaggaaatgtcatttttggaggtcgtctcggcgattataagtattacgatatggataaagtgatcgaagcagcactgaatcgactggaaacaatggaatagaaaagggtgagaagatggaagaaaacaagaaaaaaaatctgatgcgtcagatcatccgttttgcatttgtaggcggaagtgcattcgtcattgactatggagtgatgatctttctgacagagctgatcggaatcaattatctgatttccagcggaatttcattttcggtttcggttatttacaattatattttgagtgtacactgggtatttgatgtggcggaggacagaagcaagagagcagagtttgtcattttcatcatacttagtgtgatcggactaggaatcaaccagctcgtgatgtggatcgcagtcgatatttttagaatgttctacatgatcgcaaagatcggggcaacagcaattgtaatggtatataattttattacgagaaaactgtttctggaaaaatagagacagaaacacatgatgcaggcacagaaaagtgcttgcattttttatggaaatcgagtaagatacaattactttttatattctttaattcatatgacggcaggaagttttctgtcatcagatacagattcggtcgaatctatttttcacagaacagtagttaaaaagagagcaaggatgcagagaggagaaggagtgaaagacgagaaaggatatgatgtagttcgttttattgaacatggaggaaaatgcaggcctgccatggactatgtgagagggcaaactttaattggacgtcttcagacggagaaaaagataccaaaaaagcttttatttcaatggtttcggatgctgtgtacccagctggattgttatcatcgaagtaaagggatgcagtgttaccggtatttgagcccgtacagtgtgatcgtaacgcgggaggagaagctgcttttactggatctgagtgtacccggcaacggatttgtgatgaagaaaatgcagataccggctgtccgcgcgcatttcgtgatgccagcaggaaagaaacgaagcggcatggcagtcggaatagacttgtatggtctcggcaaattgtttcagtttatgctggcatatacgagtgtggttccgccgcttacctggaaggaggagtttatgatgtcattggtgatccaaaaatgtacaggggaaaatggaaagaaaacataccgggaatttgatcagatcctgcgggaactgccaagaggcgacaggcggaaatcctgtttccgtaaaataaaaaaagccctataacagggaggatgccaggtgaccgttgtcacggtccctggcgagtattatgaaaaagtttattcgaatagtatcactactatgcggcatcttttgctatcaaatgttttatcttcatttgatatttatagtatagtcaggagaaatgaagaaacaatgttaataaaatgaaagaattttgaatgataaatgaacaaattatgaacagcaaagtcgcggttgtaaggggaaagagaacttgatataatggacaaaatgacagatgtgaaaggaaagggaggataagagatgtcacagaaagaatttctggaagagctgcgcacagcgttgagcggaaaactgagtgctcaggctgttttagagaatatagagtattatcgtaattatatagaaggagaagtgcgaagtggcaaatccgaagctcaggtgttggagatgctcggagatccgtggattctggcaaggacgatctcagatgcgcaggatggtacggatgattcgattgtaaatgaagcgggcggcagcgattatggtgcttacggagaagagaccggcagacaggacatgcattttcaggaattgagatttccgtggtggaagatcgcgctgatcattctggctgtgatccttggaattgttctggttatttctgtgatcacggggctcatcagacttctgctcccggttcttgttccaattctgatcgtgtgtctgatcgtgcagtttttcaagggaaaacgttgatagagataaagtaaaagaccgatgggggagccatcggtcttttgaggggagtataaataattaataaggggttgtagaaagactactttctacaagcacaagtataatataagaaattggaaaatgcaagcaaaaatacaaaaattccgaataaaattgaaagatgcagagatactatgagtgtaccaaataaatttttcaggaggaatactcatggctaagaactacagcaataaagaaaacaacagaaacatggcaaacaacaatgcatcagaaaacggatattcatcatatgcagatgaacagaacagaaacagtaaaaacagcagaaatacaaataagacaacatcgaaaaactgccatagaaacggcacgaattccagcgaaaacatgaataacgccagataatatcagagcgggactcatgtaagtgaaaaaaagaggatacgattttagtgtgcagacagcagcagaatcgtatcctcttctttactatacgtgtgaattatagtaatatgagtacagatatttgacacacgcaatgcgtgtattcggatacatatggaggaatatatggaaagatttgaattgatagcaccgtgtcattttggactcgaagcggtgctcaaaagagaaattctggatctgggatatgaaatctcccaggtggaagacggacgtgttactttttatggagatgcagaagccgtatgcagagcgaatgtatttttgcggacagcagagcgtattttgatcaaggcaggatcatttaaggcggttacatttgatgaattgtttgaaaagaccaagcagatcccctgggagcattatatcccgcgagatggaaagttctgggttacgaaggctgcatcggtaaaaagcaagctgttcagtccatcggatattcagtcaatcatgaagaaagcgatggtggagcggttgaagagctgctaccatatttcctggtttgaggaaagtggagcatcctacccggtgagagtgtttcttatgaaagatattgtcacggtagggattgatacatccggggtttcacttcataagagaggataccggcagctgtcaagcaaagcgccgatcacagagacactggcggcggcactgatcatgctgacgccatggaagaaagatcgtatcctggtggatccgttctgtggaagcggaacatttccgattgaagcggcgatgatggcagcaaacattgcgccgggtatgaatcgttcttttactgccgaggaatggaccaatctgattccaaagaaagaatggtatgacgctgtcaatgaggcgaatgacctgatacaggacgacgtggaagtagacatccagggatatgatattgatccggacgtggtaagagcggcgagaaagaatgcagaagatgcaggcgtggatcatatgatccattttcagcagagagccgtgcaggatctgcgccatccgaagaaatacggttttatcatcacaaatccgccgtatggagagcgtcttgaggagaaaaaggaacttccgaagttatactctgattttggagaaagtttccgtactctggattcatggtcagcgtatatgatcacaagctatgaagatgcagagcgctattttggaagaaaagcagacaaaaacagaaaaatctacaatggaatgctgaagacatatttttaccagtttatgggaccgagaccgccaaaagcaaagaaatagaggaataacagatggaaaagagaattatttttgcaaccggaaatcagaataagatgaaagagatccatatgatcctggctgatctgggaatgccgatctattctatgaaagaagctggaattgatattgatatcgtagaggatggaaccacatttgaggaaaacgcacagattaaggcaaaggcaatcgcaaagtacttgccggatgatattattctggcagatgattccgggcttgagattgattatctgaataaggagccgggaatttattcggccagatatgcgggagttgatacttcctatgatatcaagaatcagatgcttctggacaggcttaaaggagtgccggatgaaaagcgtaccgcaaggtttgtctgtgccattgcggcggcatttccggatggtacagtagaaactgttcgtggtacgatcgaaggaatgatcggatatgagattgcaggagaacatggattcggatacgatccgattttctatgttccagagtatggctgcacaacagcagagatggacccggtacagaaaaatgaactcagtcacaggggacgtgcacttcgtgccatgcgtgcgattatggaagtaaaagagagagaagaatagagggcgtattttatgagagtattgatcgtcagtgatactcatggaagacatacaagtcttgacagggcgctgaaagaggccggagagatcgacatgtttatccatctgggagatgtagaaggcggagaagattatattgaggctgttgtagaatgtgaaaaacatatgataagaggaaataatgactttttctcctatcttccggcggaagaagagttctggatcggaaagaagaaagtgtttattactcatggacacagttattatgtttcaatggagacagagcagattcgggaggaaggggctgcaagaaatgcggacattattatgttcggtcacacccatcgcccgtattttgaagaaagagacgggattactgtgttaaatccgggaagtctgtcttttccgaggcaggaaggaagaaagagcagttacatgattctggagacagatggagaagaaaaatatgaatttgtgcaacatttcttgtaaaaaatagaaaaacaaagaagtgttggcgaaaatgcggatatatattttgtttacatgttgatattttgtgaaaatatggtataatgatttaaaacttagggtggtaattgttttacaagctagacctatttacattgttgctatgagagcagatttcttgtacaacggggtaaataggtctttttttgtctgtatgtaagtaatggtgttttaggagtgggcgagagtcgtgataattcaaaggattttaaacaacaatgttgtaattgtgaaaaataaaaagggacaagaagaaatcgtgtgtggaaaaggaattgcgtttaagaaaaaagttggtgagtttgtagatgtttccgcaatcaataaggtgtttactcttcgcgggagaaaagaattagaatattttcaggaattatgggaagagattccggtggaatattttaaggttgcagatgatgttgtagggatgataaaactggagcttggaaagaaaatcagcgacacactttatatttctcttatagaccacatttatatggcagtccagaggagcgaaaaagggatacaggtgagaaatgccatgatgtgggatattcagcggttttacccggaagaatttcatctgggtgaaaaagcattgggaatgattcagaaaaaattgaatgtatctttgttgcaggatgaggcagcttttatagcgcttcatatcgtcaatgcatctgcagatggaagtgatatgacaaaagtgttggaaattacaaagcttatcggagaaattgagacgattgtcaaaagatattatcggatggaatttgaaaatgagtcagtatattattaccgctttgtaacacatttaaaatttctggcacagaggctggtgacaaaaacgacatatgatgaggaagaaagtgaactgtttaccatggtcagagataaatatgatcaatcgtaccagtgtgtagagcgaattgcaaagtttatacaggaagaatatcactgtggtctttccggggaagaaaagttatatttgacaattcacattgaacgggtaacagaaaaaggaatgaaaggaaaaaagaacgaaaatgaggcggaaatatgaaaaactggcacaggaaattgtgaaaaaagtaggaggaaaggaaaatattatcagtttgagacattgtgtgacacgtctcagatttcaattgaaagatgttgaaaaggcagatacaaaggggctggaagcaacagatggtgtgattacagtagtccaggcgttgagtgaatatatggtagttatcgggcagcatgtaggggaagtatacaaagaagtatgcatccaggcggggctggatactgcaaaagagaatacttgtgaaaagccggagaaaaaaagcgggttggaaacagcacttctgaccgtgatggcgggaattggccctacgctgtatctgctcggagcaagtggaatgatcaaaggaatccttgctgtatgtgttatgctgggattatcagcagatacaactgtttatacggtaatgtatgcattgggagatggccttttatattttctgcctttggtgttggggtataatctggcaaaatattgtaaaatcgaaccttttgttggtgtgtggctggcagcggccatgtgttatcccaaaatacagggacttgagatcagtatattgggaatgaacaatacagtccactatacatcgacttttttaccaattatattttcggtattaattgcgtcactgatttatcgtttcctggaaaaacggatgtcggaaacaaggaaaaatcttgtgattccgcttttgacgcttttggtggcatttccattcggcattctggtggcaggtccgtttggaaactggatggcagaatggcttcacagaggaattatggcattgtgtggattctcgcctgttttgatgggagttttgataggtggattgtggcaggttctggtatctgtcgggatacatggaattattaccgtattggcatttgccgatgttcttgcaggaaacagcagtccattgttagcactttcttatagtgcatcctttgctgtcagcggagttgcatttgcggtatttatgagatccagaaatagtggagaaaaacagacagccaaagcgggtgcagtttctgcgatcatgggagcaacagaaccggcgatgtatgcactgatcaaacctgataaaaagcggtttgcactgtgttgtgccggaggcgcgcttgggggtgcgacagcaggattttttggaatttcaatgcatgcatatgcaggaatgggaataacgggtctttttggattttttcaaacaggagatgtaaagctggtgggagtattgctgatggcagtattgccgtttggatttacatggttgatagagatgctgttatacagacaagaaaaagccgtggaaagtgaagaaataattgtgatgccggtcaatgggtctgtggaacaattggagaatgctgaggatacagtgtttgcaagcaaggcattaggagatggtgtactgttacattctgatgatggaaaagtctatgcaccgtgtgatgggattatacaaaccgtgtttccgacgaaacatgcaattgggatagaaagcacagacggaagcgagattttgatccatatgggaaataatacggtggctctgaatggaaaatattttactgtgcatgtgaaagagaaggatgaagtgaaagcaggccagattttagctgagttcgataaaaaagagatagaagcgcaaggctataactgtgagataccgatggttgtgactaatatggagatgtatgaaatgtcaggagagccgacatacagaaattataagaaaggagaagaaattttcaggctgaaaaagaaaaccaatgtttaaatacgattaggaggaagatgaaaatgaacaaagtcaacagacaaagaccgtttggagcgaaggataaatggtcatatgcaatgggagatttagggtgcaatatgagttttgcgctgaacagctatttgatgctgttttatacacagtatattgggctggatttaggaacatggggaatcattattttgcttttgaaaatctgggatgcgattaatgatccgatcatgggagcattaatggatgcgttgaaaccgggaaaaagaggaaaatttaaaacttatatttattatggatcgtttgtactgttattttcaggagcgttatgttttctgccgatcccaagtgcaccttatccgattaaggtactggtatgtgttgtgggatacctgatctgggatatggcatatactgttgtcaatgtaccttatggagcaatgaatgcagctattactacagatccgacagagagagcacagttgtcaacttaccgcggaatcggatcaatgatcgcgaatattgttgttttgattactttaccgttattatgttacgataaggataacaatctgatcggaagcagaatgtttattgtggcgttagtgcttggaatcattggttttgcggcatttcagattctgatcaaagggactgtggagagagtggctgtctcccatgaacctcaggaaaaagtgaaatttaattatttcgagtcattaagcgcttttttgaaaaataaagcagttgtagcgattacgattgcatccattgcgctgatcatcatgcagatagggctttccagcgcgaaccagattgtatttcagagttattttaaaaatgcaaaattatccggtattctggggcttgcaacaatgattccatctttaattgtaataccactggtaaaaccgacagtacagcgcttcggaaaacgtgaagctgcagcagccccaatgctgattggaattttggcggcagcaggaattgtatttcttccgataacacctgacaatacgggaatgatgatttatattatcttagcagtactcataaacagttcctgtatttttttctcgactgttgtgtgggcacttgtggcggacagtgtggattatcaagaattacagacaggaaaatgagaagagggaactatatatgcaacgtattctctgggaagaaaactggctcagggagtgggagtatcgattgtttcgttcttgttgatcttaacaggatatgatgagaacctgggggcacagcagagtgtagatgtggcaagaaatgtattgattctgatcggtctggtatatgcagtttgtgttgctgcccaatacatttgtttgcggtttgtgtatccgctggataaaaacaagacattagagctggaaaagaaactgggacgttccaatgtggaattgattggtgaaacaggagacgaagaatgagacgaaaaatagaaattaatgaaaattggttttttacaaaagaaagaccaaatctgacagcacccgatttttcggcaatgcaggagataacactgcctcatacgtggaatgcagaagacggggcagatggggacgattattatgacagaagagaatgctggtatgttcgaaaactggagcgtcctcagggcgatgaaatttatttggaggttccggctgcaagtcagactgcacatgtgtatctcaatggagcagagatcgggcatcatatcggaggattttcgctgtttcggattcgtttgacggaaagattggaagaaaaggagaatattcttgcaattgcagtagataattcggaaagtcaggatacatatccgcaatttgcggactttacctttttcggtggtttgtatcgaggtgtaaatttactggttgtacctgaacggcattttgaattggaagaatatggaggtcccgggatttatgtgacttcacacctaaacgaagatggaaaagcagaagttcttgtgcagggaaaggtatcaggcgggcaaagtgaagcatataaggtgcagatacggaatggagaaggggagattatcctggaagcaaatacagagaaacctgaaaaagtgtttttcatagataatccaagagtatggaatgggaaaaaagatccctatttatatacagcgaaaatgatcatggaaggttccggtgatgaggtaagtacccgatttggtattcgggaattttatgtggatgctgaaacaggattcttcctgaatcaggagagttatcctttgcgcggagtttccagacatcaggaccgacaaggaaaaggatgggcaatcagcgaggaagatcaaagagaagatgcgatgttgattcatgaaataggagctacagcagtaagactggcacattatcagcatgcacagagtttttatgatttttgtgatgagttaggtatggtagtttgggcggaaattccatttatttctcgttttataaatacgaaagaagcaaaagaggatactgtacgacagatgcgggaattgattatgcagaattataatcatccaagtatttgcttttgggggatcagtaatgaaatcacgatggggggagagtctgatgaacttgtggaaaatcagaggattctgcagaaattatgccacaagctggacccgtcccgaaaaacagtgcttgcaaatctgacaactgtggagagccaaagtgaacagaacaagattacagatttatcggcctataatgtttatatgggatggtatgcaggaaaagtagaggactgcggagcgtggatggactctctccataaagaaaattctgatatgtgcatgggaatttcggaatatggcgcagataccaatgttcaatatcattcggatgctccgaaacgtcaggattatacggaagagtaccagtcttattatcacgaaaaaatgcttcaggcaatacaggaacgaccgtatctctggtgcagctttgtgtggaatatgttcgattttgcggcagataagagaaaagaaggtggcacacaagggcgtaatacaaaaggtctggttacatatgatcggaaaattaaaaaggatgcattttatctttataaagcatattggacagaaaaaccgtttgtgcacatctgttcaaagcgttttcaaaaaagaccgggagacactacaacaataaaagtatacgccacaggaatcgaaaaggcggaactttggatggatggaaaacggatccaagaacaaaaagggacatattgtttcctgtttgaaggtattaaattaactcaaaatcaccaaattacaatttatggttattgcggagatgagaaggtttgcgaagacgaggccgcttttactcatacagatggattggaggcagagtatattctggagtccggcgaaaatgacggagtcaactggttcctggatgagtatggagaaaaaaagaagcttgaagcaacacagggctttctgtctgtatatgatgagatagggacaatactggatacagagaaaggcaatgaaattctgaatgggttgtttatctcgtttggagaaggtggtaaagcgttactgactgagagtgtgcagaattcaattcgttcgttgacattcgtagagcttgcgaaaatgatcggaccagcaattacacctgaaatgttaaatatgctcaatgagcaattaaggcatgtaaaaaattcttaaagaatgggccggcgtgatggtcggccctattcgttactgttcacactcaatcacctttattaaataaaaacaaaaaatataaaaaaggtattgactttttttatacatgtggatataataactatgttgcgtctgacagagacgaaacatgaggtgatgcggattggtgtaatggcagcacagcagactctgactctgttagtagaggttcgagtcctctatccgtaggttataagataagaatttcttatcttatatcggagtgtggctcagcttggtagagcgctacgttcgggacgtagaggtcgcgtgttcgaatcacgtcactccgacttttggaaaagaaccgtaaagttacataaaatgtggctttacggttttttagtataaagatgcgtgataaagccataaaagtactgaaaaacaatacttttatggctttctgatttttcatttaattacttcaataattattcttgatagaaagatcccatatagcggatatagtcatcttctgtatgattcgctttccagtcatggacgctggctttattacgctctccggaaatgacagacagttcttttcctaatttttcaaaagcttcgtccacaacttcttccggtgtttgagcagtcttcataacagcttccccctgtggtccgccaggcaggttgcttaaaagacttggtgtcagagtagttcccaaagtgatgacttccacatcaacattggtcttttccgtttcacaggcaacagcctctgtcatttttaaaatgaatgcctttcctgcaccatattggccattccatggtgaactggaaattccagtcatagaagatacgttgatgacagcaccgcgatcctgtgcagcaaagattttcatatagtgatagaagcatttcataaatgtaacaacgtttacgttgatcattgcctcatgcttttcccaaggtgtatcctggattttgccaaaagagtgtaagcaggctacataggccataaatcccatatccagattttctgttgcagcaaaaattttgtcagtagcatctggcagcgaaaagtctgcttttacgactttataatcaatctcataagtgttttttagttcctcaccgagctcttttaatttttcttcacggcgtccgaccattacgacattcataccttctttggcaagcctttcacaaaatgcttttccgacaccttcagtagcgcctaaaataattccccattctccatatttttctctcaatgtcatgttgattctcctctcatatatgatattttaaatgtacggtggaaaaataaaaatccacaactatactgatattatagcacagatataagtgaaacagtattaagcttctgataatacagaaaaggattatacaaaactgctacttgtcaactgtttagaatacccgtataataaaaaaggttattaaacttatttctatggtaggaatatagaaaggatacatttgaaaaagatggaagagtgggatatacaatataaagagctcttatccatgccggagcagtcttatcgcctgatcgatattcgggatgaagcttccatgtcatacggaatgattccgggggcagagtggcttccgacagaaacaatcgagcagaatctggatgcggcggataaggaaaagaagctggtgctttactgtacgcgaggggcattaagtgaagaatgtgcagaagtgctccgggagaaaggatatgatgcagtcagtctggaaggcggatatacgaggtggttgttagagcggatggaagctgagcagaagaaggaagaggaagaatcaggtgaagaacttttgcgggcagaagagattgagaaaagtatccgcaaaaaatttcacaaaagactgttctcgcgatttgccaaggcagttcgggaatatgagctggtgcaggagggggacaggattgcagtctgtatttccggtggaaaagattcgatgctgatggcaaagctgtttcaggaattaaaaaagcacaacaagtttccgtttgaggtggaatatctggtgatggatccgggatacagtgaactgaaccggaaactgattgaacagaatgcaaaaatgatggggattccgatcaaaatttttgagtctgatatttttgatgcggtgtttgatgtggaaaaatctccgtgttatttatgtgccagaatgcgaagagggcatctctacagtaaggcaaaagaacttggatgcaacaagatcgcacttggacaccactatgatgatgtgattgagacaatcctgatgggaatgttgtatggtgcgcaggtacagaccatgatgccgaagctgcacagcacgaattttgaggggatggagctgattcgtccgctgtatctggtaagggaagatgatatcaagcattggagagattacaatcatctgcattttctgcagtgcgcctgccggtttaccgagacatgcagtacctgcagtgtggatggaagcagtgcatccaaacggatggaaatcaagcacctgatcgcaaaactgaaagaaacgaacccgtatgtagagggaaatatttttaagagtgtggaaaatgtcaatttgagtacggtaattgcatacaaggaaaacggagtcaaacatcattttctggaatcctatgatgagaaagcataaaaatgggatttgaaaaaaatacaaaaaatcaaaaataaaaacttgaaaaatagaacatggagattataataagtaacaaaatacaaagtgcaaaggagaaaaaaagatgagtattagaattggtattttaggatatggaaatctgggacgcggagtggaatgcgcgatcagacagaatccggatatggaactggtggctgtatttacccgcagaaatccggaagacgtgacaatattgacagagacagcagcagtgtgcaacattgcagatgctgctgactggaaagataagatcgatgtgatgatcctgtgtggaggaagtgcgacagatcttcctgtacagacaccggaatatgcgaagatgttcaatgtagtagacagttttgatactcatgcaaagattccggagcactttgcaaacgtagacgcagctgcaaaaaaaggcggacacatcggaattatctctgtgggctgggatccgggaatgttctcattgaacagactgtatgcaaatgtagtacttccggaagggaaagactatacgttctggggaaaaggtgtcagccagggacattctgacgcagtgcgtcggatcgcaggtgtaaaagacgcaaaacagtatacaattccggtagagtctgcactggaagcagtaagaaacggtgaaaatccggagctgactacacgccagaaacatacaagagagtgctttgttgtgctggaggaaggcgcagatgctgcaagagtggaagaggaaatcaagacaatgccgaactactttgcagattatgacacaacggtacattttatcagcgaggaagaattaaaagcaaatcacagtggaatcccgcacggaggatttgtactcagaagtggtgtgacaggctgggaaaaagaaaacaaacatctgatcgaatacagtctgaaactggattccaatccggaatttacttcttctgtaattctggcatatgcaagagcagcatatcgcctgcataaagaaggacagacaggatgcaagacggtatttgacattgctccggcatatttaagtccgaagagtgcagaagaactgcgtgcagaaatgttataaaacgactgtaagaaggacaggcagatgcttttttgaagtgtctgtctgtttttctgtacatttttgcaggaaatgagtataatagatagcatcatgtatttggaaatgttatgaaagaagaggtgaatcatgtttggctatgtgacgatctgcgaaccggagctgaagatgaaagatctgcgaaaatataaggcatattattgcggactctgccggaaattaaaagaggattacgggacgatgggacagatgacgctgacttatgatatgacatttgcgattattctgctggcatccttgtatgaggcaaaaaaccggatgaatcagcacagatgtaaagtgcatccggtgaagaagcaggcgatgatcgagaatgagattacacagtatgcagcagatatgaacgttctgcttgcatattaccatatgaaagatgactgggcagatgagaagaaagtaagcggtctgttagggggcggactgctcaagaaaaaggcagaaaagattgcggagcaatatccaaggcagagtaaagcaatcagggagtctttgcaggaactctcagactgtgaaaaagagaacagtcaggagatcgaccgatcagcaggctgctttggaagactgatggcagatctgtttgtatataaggaagatatgtgggaagagacactgcggcgcatgggatttttcctgggaaaatatatttacattatggatgcttatgaagatctggaagaggatcttcgtaagcagtgttacaatccactgaaaagtctgcatgaaagagcagattatgaagaacagatccggcagatcctctgtatgatgatcgcagagtgcagcgccgagtttgagaagctgccatgccttttggatgtggacattttaagaaatatcctgtatgatggagtctggaatcgttataataaaattcagaagaaaaagttagaggaaggaaataaaaagaatgagcaagaatccttatgacgtgctgggagttcctcagaatgcatcagatgatgagataaaaaaagcataccgggagctgacaagaaagtatcatccggatgcaaatgtgaacaatccgcttgcagatctggcggaagaaaaattcaaagaagtgcaggaagcatatgatgagatcatgcgccagagagagcagggaggaggatattcctacggaaattcctcctatggcgggaattcttacaataacacatacaacggaccacaggacgcagagatgcaggcagtgttcaattatatcaacagcagaaactacagggaagcgctaaatcttcttgaccggatgccgaaccgcaatgcgatgtggtattatgccagcgggtttgccaatgcaggaatcggaaataacgtacttgcaagagagcatgcggcacaggcagtcaatatggaaccgaataatgtacagtatcgtcagttgttgaaccagctggactggaacagcagaagatatcagagcaatccatacggaggcggatatggagccggcggacagagctgtggaacggggaacatgtgctgtgatctctggtgtgcagatacgctgtgtgaatgtatgggaggagatctttgttcatgcatgtaaaagcgagaatgaccgcatttagcggactgcttctggcactttctgttgtctgtatggcactgggaagtgtgatcgagaccaatacgctgtttttactggcggcagcttcctattttgtggggatcatcatccgtgaattcgggatgaaagcgggagtggctttttatctggcagatatcctgctcggatttttggtcacaccgaacaagttttatgtaatttcatttgccgctatgggattttacatcctggcagcggaaggcagctggcgatttttgggtaaaagcagtgaaaagatgcagaaatcctggattttctgggtgatgaaatatgtggtgtttaatttgatgtatattccaatggttctgatatttcaggaacttcttttcatgaaagaactctccggtgggctgcttctggctgttctggcagcaggacaggtgggagtctggatttatgaccgggcttatgaatatgttcaggttcatatatggaataagttccggggaaagctgttgaattagtgtagttatttgataggatattgcccaagtgtggattttctggtatactatcgacattacgcatgttcaaatgtgacagcgaaatagaagaaaaggaggaaatatatgttaaatgacatcttagggcagatcaatgatctgatgtatacgtacctgctgttgtttctgttgttgggaaccggactttacttttcaatccgttcacggtttgcacaggtgcgtctgatgaaagaaggatttcggattcttacggaaaaagcggaggtggaagatgggaagaaacaggtctcatcttttcaggcgcttatgatttccacagcatcccgtgtcggaacaggaaatatcgcaggaatcgcgactgctatcgcggcaggcggaccgggagcggtcttctggatgtgggtgatggctgtaatcggaggtgcttctgcatttatcgaaagtacactggcacaggtatataagacaaaggatggaaaagacttccgtggcggtccttcctactatatggagaaggcgcttggaaaacgttggatgggagtgcttttttccgtgcttctgattatttgttttgcttatggattcaatggtctgcagtcttataatatgtcttctgctctggaatattatattccgggatacagtgagagcagttatccgatgattgtaggtttgattctggcagtcggaaccggtctgatcattttcggaggcgtgcatcgtatcggatttattacgtctgtaatggtgccgatcatggcaggtgcatatcttctgatcggactttttacgatcgtgacacatcttccgcagcttccgggcgtactggcaatgatcttatcagaagcatttgatgttcaggcgattatgggcggcctggctggaagcgcagttgtgatcggaatcaagagaggtctgttctccaacgaggcaggtatgggaagcgcgccgaatgctgcagcaagtgcatctgtaagccatccggcaaaacaggggatggtacaggtaatttctgtatttatcgacacgcttttgatctgctcggcaactgcaatgatgctgcttctttccggtgttcagggagaggcgggcgttctggatggaattccgtttgtgcagaaagcgatttctgcaaatgtgggaacatggggaatccactttatcacggcatccatttttgcgtttgcattcagcagtctgatcggtaactattattatgcagaatccaatattttgtttatcaagaataataaggttttactgttcgtgttccgctgtacatgccttttggcagtattcttaggcgcacaggcagatttctcactggtatggaatctggcagatattacgatgggatgtatggcgatcgtcaacattatcgcaattctgcttttgggcaacattgctctgaaagtattgaaagattacgaaacacagaaaaaggccggaaaaaatccggtatttaaagcagagaatgtaggaattaaaaatacagactgctggaaatagtcgaacaagcagctgcatcagaagagtgatgcagctgcttgttttatatgtggataaaataaggaaaaacgcgcgttaagagagggaatactacgtaaaaataaaagaaacataaaataaaaatgaaatttcagaaaggtacgggtttcttgcttgacttctgaaaacagctcgactatactacattctaacttaagttacatatgtggcggggaaggagaatgatatgcaggaagtaaaatcaccaaagaagccatttttatattactgtctgatcgtagcaacaattatggttttgctgaacagtctggtattcccgaatgtactgaagcattctgtaaaagaagtggactataatacattcatgaaaatgacagagaacaaggaaattggaaaggtcaacattgacagcggggagatcatctttacggataagagtgaagagaagatgtataagaccggtgttatggatgatccgggtctggtagacagactatatgattccggggcagacttttcttctaagattacagaagagatgtctccaatcctgtactttttactgagttacattctgccgatcgcgatttttatcatgcttggcagatggttatccaagaagatgatgtcgaagatgaacggcggagcaaatccgatgaattctatgatgttcggaggtggaaagagcaacgcaaaaatttacgtcaaatccagcaacgggattaagttttccgatgtggcaggagaggatgaggcaaaggagctgctaagtgagatcgtggattatcttcatgatccggataaatatcgggagatgggagcagctatgccaaaaggcgctctgcttgtgggacctccgggaaccggtaagactctgcttgcaaaagcggtagcgggagaagccaatgttccgttcttttcgatttccggttcggaatttgtggagatgtttgttggtatgggggctgcgaaagtgcgggacttattccaacaggcgaatgagaaggcaccatgtatcgtgtttattgatgagattgatgccatcgggaagaagcgaaatggaaatatcggcggaaatgatgaaagagagcagacactgaatcagcttttgacagagatggatggatttgacggcacgaaaggcgttgtgatcctggcggcgaccaaccagcctgattcactggatccggcgctgctgcgtccgggacggtttgaccgcaggattccggtagaactcccggatttaaaaggaagggaagaaatcttaagagtccatggaaagaaaatccggctttctgataatgtggattttgcagcagttgcaagaacggctgcaggggcttccggagcggagcttgccaatattgtcaatgaagcggctcttcgggcggtacgccgcggaagtaaagtgaccatgcaggaagatctggaagaaagtgtagagacagtgattgccggatatcagaagaaaaacaggattttgtctacgaaagaaaaactgacagttgcctaccatgagatcgggcatgcactggttgcggcaaaacagacggattccgcaccggttcagaaaattaccattattccacgtacctccggtgcgttgggatacaccatgcaggtggatgagggagagcatttccttatgacaaaatcggaattgctcaacaagatcactacatttaccggcgggcgagcagcggaagagctggttttcaaagaagtgacaacaggcgcatccaatgatattgagcaggccaccaagctggcaagagccatgctgactcagttcggtatgagtgatgaatttgatatggtggcgatggagacgatccagaatcagtatctgggaggggatgcatccctgacctgttctccggagacgcagacgaagatcgatgccaaggtagtagagatcgtgagagaggcacatacaaaagcacttcagattttaaaagaaaatgagacgaagctgcatgaacttgccaagtatctgtatgaaaacgagaccatcacaggagaagagtttatgcagatcttgcaggcaaaaaaattggtttgtgaagagaatgcttcagaagatacaacggtataacagagaaaaatcagaaaatgtgtcagacagactgttttctgatttttttgtgcatgaattattaaaaatctttgtgtatatagattgacggtgtttttgtaattgcgttaagataagaacaagattaaggaacgggaggaaagaacatgtcattgatccagcagttaaagcaggcgcaggattttacagaacgagagaaggatattgcacgatttgttttggaacatccggagaccattgaaaatatgtcatccagagaactggggcatcagacctttaccagtgcggcttctgtgacacggttttgtcagaagctgggcgtgaaagggtttccggaatttaagattaagtttgtcagtgaactgagggatggatatctggacgaaaaacaggagaaaattatgatgtccgagcgggaaaatgttgtgactatggttcggaaaatcacagaaattcagaaacaggcggtaatggagacacaaaaggaagtttcgtatagccagcttatgcgtgttggaaaactgatcgcagaggcacggtctgtggatttctatgcttatgatatgaatgtaaatctagcacaatatggatgttccctgctttttcatgcgggaaaaagatctgctgtttattctgcaacgaatattcagggattacatgcaaatatgccgtcagatggtcatgtggcaattattttgagtcatacaggacggaatgaacggttggcggagattgaaaagttgttgagaaaaaatgggacaagagtggttgcagtagtgtccgatggtgatagtatcattgccagatatgcggatgaagtactggtggcggccggttctgaaaaagtagaagagttctggatgtccatgttttttgcttcgggtaaatacttgttggatattttgtatgggttggaatttagcagaaaatatcaggataatctggtcttgaatcaaaaatatgagaaagcgggagagaagagtctttggggcttaaatgaagaatcttaaacgcggaattaacaattcccttttagttatgcaaaatagctaaaagggaattgttgattttgcacaaaaacagaatgtatttttttatatgtgaaacattgttgcactggatttgttgttggtttcagaaaaagtgaaatgaaaaaacaaaatccgtaaaaatattgaaagaaaaacgagaattctatatagtaatttcatcaaaagaagagagtggatgcgcgcaaaggactctgtacaacaaggaggagaacgagatggcacagatcagagattatcgaaaactggcccatgacattatctgtgaagtgggcggaaaagaaaatattgtcaatgccacaagatgtgcaacgagattgagactggtattaaaggaagagccggaacaggcaaaagagaaagttgcagcaatggcgggagtaattacagttgtggaaaacagcggacagttccaggttgtaatcgggactcatgtgggagaggtatatgatgcggtggcagaagaactgcatctggatacagagaatcttcaggtggagcagccgaaacagagtgtcatgaataaagtgattgcaacaatgtcagctgtgtttgcaccgtttgtatatattctggcagcagcgggacttctgcagggggcgttgatcctggtcaatatggcagttccatcttttgcaggaactgggacgtatgcggtattgagttttatgtcatggacgccatttacatttcttccgatttttattgcaattaccgcatccaagcactttaaatgtaatacgtttatcgccgttttatgttgttgtgcattggttaatccggactgggcgggtatggcggcccggattgcagatggagaagtaatccgttttttgggaatcaaactgtctgagacaacctatacttcaacagtattgcctccattacttctggtctgggtattgtcctatctggaacgatttttagaaaagaaactgccagaagcagcaaaagcattgctaacaccgttaatctgctttttgattatggttcccgcaaccattcttgtgattggtcctgtatcttccattacggcaaacggaattgcaaatggatataattttcttgcaaataccgcgccagccctggcaggagccatcatcggaggcttgtgggaagtggtagtaatttttggagtacattggggaattacaccagttgttcttgctaattttgatatgcagggatttgatacgtttcaggcatttcagaccattgcagtcgttgctcaggttgcggcagcctttggcgtatttatcagatctaaaaacagagaaatgaaaagtgtttcgttatcagcaggaatcacaggtattttcggaattacagagccaacaatctatggggtgacactgcgattgaaaaaaccgtttatctgtggatgtatcggaggagccgtcggagcagttgtgatgagctttttccactctgcttattatgcatatgcaggactcccaagccttttgacagtggtaaattccatcagcaaggatgcaccgatgtcatttgtaggagaagcagttggatgtgctgtggcaattgttctgacaatcgtattgattcaggttgtaggatttgcagacccgaaagaaaaagaggagtctgacacagaaaaaggcagcacaaatgaggaaatttgtggagaagaaattgtggacagcccgatgaggggagaggtaatcccattgagtgaagtacatgatgaagttttttccggagaaatgatgggaaaaggatgtgccatcgtgccggaagaagggaaaatatatgcaccattcgacggaaaaatagtcggactgttggagagtcatcatgcagtaggaatcgagagtacgtcaggaattgagattctgattcacgtggggatggataccgttaaacttcagggaagaggatttacagcatatgtgcaggacggagaacaggtgaagaaggggcagcttcttctggaatttgaaaaagaagagattgaaaaagccggttatgaagtgacaacccctgtaatcgttacgaatagttacgaattctcagagattgagacagtggcctttaagcaggtagagcgtcagaatgcattgttgaaagtacagagaatatagagagaaaataggaggagatataagatggcattagcaaatacgtttttatggggcggtgcagttgctgcaaatcaactggaaggcggatggaatgaaggtggaaaagggattagtgtgatggatgtgatgactgggggcagcaatcaaatgatgcgccgaatcacagaaggagtcattgaaggcgagtattatccaaatcacgaagcgattgatttttaccatgaatacaaaggagatattgctatgatggcggaaatgggatttaagtgcttccgtaccagtatagcgtggacacgtatttttccaaatggtgatgaactgatcccgaatgaggaaggactgaaattttatgacgatctgtttgatgaacttttaaagtatggcatagaaccggtcattacactgagccactttgaaatgccatatcacttggcaaaagaatacggaggctgggtgaatcgaaaagtgattgattgtttcgtgcgttatgcagttacagtcatggaacgctacaaagagaaagttaaatattggatgacatttaatgagattaataaccagaccaatacgtctgcggatattttcggatggacagattccggggttctcttttcacagtacaaaaacaagaagaaagccatgtatcaggcggcacatcatgaaatggtggcaggtgctatggttgtaaaaaaaggacatcagatcaatcccgattttcggattggatgcatgtgttcgtttgtcccgttttatccatattcctgcaatccggatgatattatgacagcagcagaatgtatgcatgaaagatattattttgcggatgtgcagatgagagggcattatcctgcgtttgcaaagaaagaatgggagcgggaaaatacagcaccggtgatggaaccgagagatgaacagatccttgcggaaggtgtctgtgattatctgggattcagctattatatgaccaatgcagtcaaagcagatgtacagaaagacacgacggaatcactggatggaagctctgcaaattctgttcctaatccatatgtaaaagcaagtgactggggatggcagatcgatccagtgggacttcggtatgcacttgtttccctgtatgagcgctatgaaaaaccactgtttattgtggaaaatggatttggggcaatcgatgttctaaaagaagataaaacctgtgatgatgattaccggatcgaatatctgagggcacatataaaggagatgaaaaaagcagtagaactggatggagtagacttgatggggtacacgccttggggctgcattgatctggtatcctttacaacaggggaattgagaaaacgttatggatttatctatgttgataaaaatgatgatggaactggaagcggaaaacgttataagaaaaaatcttttgcatggttccgtcgcgtgattgagacaaacggggaggaactgtagaagaaaaagtacagtggctgcaaaaatctgcggccactgtacttttttcttctacagtcccattttaggctgtgtcaaaatggattttacatgatcaacttcctgctgggttgcttttgcagcaggcacgtaatagcttttttcccgtgctacctgatacagtttttcctgtgacatttcacactggtttcgaatctgtttgaggcactgtttcagttctttgttttctgtctgcggtatcatatctccgaacattttcaattctccgtttactccgaccaaggcgtcagataccattgtcttttcatccattttcaaatcccccttataaaaatttcatcagatcctgtttgtttttgagtgcggaatcggcagcttcctgaaataactgctttacctgcgggtctgttgcctgtgcggcgtaatctgtcattttacagtgagtcgtagagtatcctccgatcagatgacggagattctgcagatctaagattgaaatttctgtcatggtaatgtctcctttgcataaatttagatttgtgtttcgcgaaatagtatgttccggatcgggaaaaagtatgtattttacaacacgctttttctttttgttgtgcagttcccctgttttatgttattataaatatacatatgtgattttttcagtgaagggaaattcgctctttagaatcaacaaagaaaggaaagtactgtatgaagattttaattcagaatggacatgttgtggatccgttgacaggtgtggatgaagtatgtgatgtgcttgtgcgtgatactgatatcgaaaaagtagaaaaaaatctgcaggctgaagctgacagagtgatcgatgcgtcaggctgttatgtaatgccgggatttatcgatctgcatgtgcacttgagagatccgggactgactcagaaggaaacactttcgaccggaggaatggcagcagccagaggcggtgtgacgacagtatgtgcgatgccgaatacgaaaccggtgatcgatacaaaagaaaaagtagaagaggttcacagacgtgcaaaggaggaatctctggtacacgtgatacagctgggctccatgactatgggtgagtgcggcgaagaactctcggatatcgaagggatggcacaggcaggctgttatgcactcagcgaagatggaaaatctgtcatgaatgcctttttgttccgaaaagccatgcgaaaagcaaaagagaatgatctgctgatcttctcacactgcgaagatatttccatggtagaaggcggcgtgatgaatgccggaaagcgtgcagaggaactgggcgtaaaagggatcacgaattcggtggaggatgtgatcgtggcacgagacatcctgattgcaaaagagctggatgccacattgcatctgtgccattgctcgacagcagacagcgtccggatgatcaaagatgcgaaagaagcagggctgaaggtgacaggagaagtgtgtccgcatcattttattctgacagatgaggatattccagagaacaatggaatctggaagatgaacccgccgctgcgctccaaagcagatgtggaagcgctcagacagggattaaaagacggagtgatggatgtgatctccacagatcatgcaccgcatatgatgtctgagaaggataagccaatggaacaggcagcatttggaatcgtgggcctggagaccagtgcatgcctgacttatacagagctggtggaaaaaggagtgctcacagtgatgcagatggcagaaaagatgagctataatccggcaaagatcctgggactgaaagacagaggaagtgtttcagccggtaaaaaagcagatattgtagtatttgatccgagaagagaatatcagatcgatgtggatacgtttgcatccaaagggaaaaatacaccgtttgacggatgggaagttaagggagaagtctgctgtacattagcagacggaaagatcgtatacgaaaaataaggagacagacagcatgttctgtccctttttagagaacagggaggaagaaaaaatgatcaacaaactggtagcaaaaatcaaagaaacaaaggcaccgatcgtggtgggactggacccgatgttaaactacattccggagcacgtgcagaaaaaagcatttgctgaattcggagagacactggaaggggcggcagaagcaatctggcagtttaacaaagagattgtggacaagacatatgatctgattccggcagtgaagccgcagatcgcgatgtatgagcagttcggagttccgggaatcgaggcgttcaaaaagacagtggattactgtaaatccaaagatctggtggtgatcggagatatcaaacgtggagatatcggttctacttccgcagcgtatgcagtgggacatctgggaagcgttaaagtgggaagcaaagagtatgttccatttgatgaggactttgcaacagtgaacccataccttggttctgacggggtgaatccgttcatcgatgtctgcaaagaacacaaaaaaggtctttttattcttgtgaagacatccaatccgtccagcggagaatttcaggatcagctgatcgacggaaaaccactgtacgagctggttggagaaaaagtagcacagtggggcgctgactgtatgggtgacgagtacagctatatcggagctgttgtaggagccacatatccggagatgggaaaagtgcttcgcaaagtgatgccaaaatcttacattctggtacctggatatggtgcacagggcggacagggcaaagatctggtacacttcttcaatgaagacggactgggtgcgatcgtaaactcatccagaggaatcattgcggcttacaagcaggaagcttatgcaaaattcggagcagagaatttcggagatgcttccagagctgcagttgaagcgatggttgcagatatccagggcgcattagaagcaagataagtaccggggaggaagattcatgtctaagaaacagaaaatgacagcagtggtcatctcgcaggagaagatcgcagaagatatttacagtatgtggctgaaagcagagcctgtggctgcagaagcggttccgggacagtttatttccatgtatacaaatgacggagcaaaactgcttccaagaccgatcagtctgtgtgagattgacaaagaaaagggcgctttgcgcgtggtgtaccgcgtgacaggagaaaagaccggaacaaagcagttttcacagatgaaagcgggcgattcactggaggtcatgggaccgcttggaaacggttttgatctggaaacgggaaaagaaaaaaaagcgctgctttttggcggcgggattggtgtgccgccgatgctggagctggcaaagcagttaacagccggatatcagaccgagtgtcagcttgtgatgggatatcgaagtgagacgtttctgacaaaagagatggaagcaaatggaacactttatattgcgacagaagatggaagtacaggaacaaaaggaaacgttatggatgcagttgcagcggacagtctggaagcagatgtgatctatgcctgcggtccgactccgatgctgcgtgcgatcaagcagtatgcacaggagaaaggaatcgagtgctacatttccatggaagagagaatggcgtgcggaatcggagcctgtcttggatgtgtctgccagtcgaaggaagtggatgatcacagccatgtacacaacaaacgtgtctgcaaagacggaccggtatttttggcaacggaggtggaactgtaatggatatgcgggtaaagattgcaggtgtagagtggaacaatccggtgacagtggcatccggaacatttggatcaggggaagaatacagtgaatttgtagatctgaaccgtctgggcgcagtcactacaaaaggagtggcaaatgtgccgtggccgggaaatccgacaccgagagttgcggagatccacagcggaatgatgaatgccattggactgcagaatccgggaattgatgtattctgtaagagagatatcccgtttttgcgtcagtacgatacgaagattattgtcaacgtatgcggaagatccacagaggattactgtgaagtggtagaacgcctggcgaatgaagatgtggatatgctggagatcaatatttcctgtccgaatgtcaaagaaggcggaattgcattcggacagaacccaaaggcagcagaagaaatcacaagagcagtgaaaaaatatgcaaaacagccggttatcatgaaactgagtccgaatgtgaccagcatttctgagatggcaaaagcggtagaagccggcggggcagatgctatttctctgatcaatactctgacaggaatgaagatcgatatcaatcggaagacctttgcactggcaaataagaccggcggtgtttccggtccggccattcatccgatcgcggtccgcatggtatatgaggcggccaatgcagtgaatgtgccgatcatcggtatgggcggaatcgagacggctgaggatgccatcgagatgctcttagtcggggcgagtgcagtatccgtgggaactgcgaatttctacaatccgaatgtgaccatggagattgtggatggcattgcgagatatatggaacagaaccattttgcaagcgtgcaggatatggttggaattgtaaaatagcagaacgaaaaagggtgtgaaaaaagtgacacatccttttttcatgtgtgcggacattccttaaaggatgccgtaatttgttgtgacatagtcgtaaaagttctttacgacaggtgtcatatggtgtgttttcagagcagccatataaaactttcgttcccagtcagggtaggagatctgaatgatttttacatccattctgagaaggtctgtcatatatggaacgactgccaccccgaatcctttcgaaacgaaacctgcgattacgatgtcctcgtctatttcatacgcaatctggggcttcacctgtattttttgaaacaaattgtcaacaatacctcgcagaccggaggcctgagaaaaataaatctggggataaggagccagttccttcagatttattgattcgtgtccggaaagcggatgatttttcggagcgatcacaacaagatcttgtttagaaacaggaataaaatggatatcaggttcattctcgcgttttgtacaaaagacaatatcatatttttcatctttaagaccttcgagcaaagaagcagtaatgcctgtgtgaaatttgaactgaatggtcttttctttttgttcttctaaaaatcgatgtgccatttcgggcaaaaatcctacacccagtgttcgaagaaagcctaattcaatgactcctgcgcccattgcgatgtgacgcatatttaaaatcccttcatcaagaacgtccagtgatttttctacatatttcaaaaattgagatcctttcggagtgagtacagaacgccgtccctgtttttcaaataaagtgccccccaattcttgttctaataaggagatagaatgactcaggcttggctgggtaatgcacaattgttctgcggtttttcgaaaatgtccggtctttgccagcagagaaaagtagcgaagctgatataagttcatatgacgattcctccaggatatcctggaaattcttaagaagtatgaaatgcaggtaactgaagtggaatatatcgttcagtgggcagaagacaatcgaagctacgaacagaaatacaaagaacagatgtgttttcatatgtgtgagctgtttggcgtttcccatattaactgtggtctgatggaaacatattctgtggagcacacagctcaaaaactgaaagaattatgcggcagagcgggcagtcttgtgatcggagtagaaccgatgccatacagcggcattccaaatgtaaaaagagcctgggagattgtaaaagcaagtgaatgtgaaaatgcaaagatcattctggattcctggcactggctcagagcaaaccagctgatcgatctttgtgttctggaaggaattccggcagataagatcgtttctgttcagatcaatgatgtatatgagagagcgtatgcagaaaatgtgttgagagatgagtctatgcatgatcgtctggcacctggaacaggatgtggagatacggcagctttttgcagaatgcttaaggaaaaaggtgtacagccgcgtgcattcggagtagaagtgatcagtgacagtattcttgcccggggtgttgaggaagctgcaagattcaattttgaaaatacaaaaaagtgctggaaagttcctggccggagattttagaagcatagaaattggggaaggagaaaagcaacgatgaaatttgaggcaatgtttcaaccggtcaaaatcggaaatatgacagtccctaaccggtttgtgatgagtccgatgggaaataattttgcgaatacagacgggaagatgagtgaacgttctgcagcatattacggggcgagagcaaaaggcggatttggattgatcacatttgaagcaacggttgtctacaaggaggcaaagggaggtcccagaaagccgtgtctgttttccgatgataccgtcagcaattttaaagaggctattttagcctgtcataaggaaggggcgaaggtttccattcagcttcagcatgcaggtccggaaggaaactccaaggtgacggggtatccgttaaaatcggcaagcagtattcctgcctctgtgaagacagaaatcccaaaagcaatttctacggaagaattgtaccggctgatcgaggcttacggagatgcggctttgcgggcgaaacaggcgggagcagatgcagtggaagtacattgtgcccatggatatcttgtaagttcttttatctctgaaagaaccaataaacggcaggatgaatttggcggatgctttgaaaatcgtatgcgtcttccaaaactgatcatagaaaatatccgtaaaaaaacaggtggaacacttgctgtaatctgcagaatcaatggttcggacgatgtggtgggaggtcagacaccgcaggatgcagctgcagttgcatcttatctggaaaaagaatgtggtgtagatgcgcttcatgtatcgagagcagtgcacctgcatgatgaatatatgtgggggccaagcgttcttcatgagggattcagttctggctgtgtgacagaaatcaagcaggcggttaagatcccagtgattacagtaggacgttatacggaaccacagtatgcagagctgatggtagaagaaggaagggcggatctgattgcttttggccgtcagagtatcgcagatcctgagcttccgcgaaaggcaaaggacggagaactggaattactccagccgtgtattggatgtctgcagggatgtgtgccaaacatgttccggggagaagcaattacttgtctggtcaatcctctggcaggaagagaagccgagcttgatctggcagaacagaagaaaaaagttgtcgttgtcggcggaggaccgggaggtttatatgcggcatatgtatgtgcgcttctaggacatgatgtgactttatacgaagaaaaagagatgcttggcggaaatatgcgtctggcagcttatcccccgggaaaaggatgtattaatggcatgatctgcagttacatcaacaactgtaaggcacagggagtaacgattgaattaaatacgtccgtaacaccggagctgctccgggagaaaaagccggatgcggtgattgttgccacaggttccaaacctctcatgctgccgattccgggaattgaaaagacagtacatgcagcagatgtactggaaggaaatgtaaaaccgggaaaacgtgttctggtagtcggaggcggcatggtaggatgtgaagtggcggatttccttggagaactgggacatcaggtatcaattgtggaactccgtgacgaattaggcgcagatgtgatcccggaacatagaaaattcctgatgaaagaactgaatgagtatcaggtacaggggattacaggtgcaaaagtgacagaatttcatgaggatggtgtctcttatgttctggagaatggaacagaaggtcgtgtggagcaggtggatactgtggtgcttgcaatgggataccgtaattatgatcctctgagccaggaaatcaaagtatttgcaaaagaagtatttgtgataggagattcagttcgtgcgcgaagagcgatggatgctacgaaggaagcattcgaaacagcaatgatgatttaggaaagaaaggagaattgttatggagattaatggaagaacaggatttttttgcctgatcggttcaccggtaggacattccggttcaccggcaatgtataattacagttttcagaagacagaacaggattatgtttatctggcatttgacgtggatcttgacaagacagaagaggcagtcagtgcgttgaaagcacttggatgtaaaggggttaatgtgaccatgccatgcaagacaaaggtggcagagctggcagatgagctttctgacgcagcagaactgatcggtgcctgcaatacagttgtggtaaaagacggaaagcttcatggacataatacggatggaatcggatttgtgagaaatctcaaggagcacggtgcagatgtaaaagataaagtgatcactgttatgggtgcagggggagcagctactgcgatccaggttcaggccgcattggaaggggcaaagaagatttatattttcaattgtaaggataaattttatgcgaatgcagaaaatacggcaagaaaaattgaaaacaaggttcctggtgtaactgtagaggtatatcctttggaagacagccagaaattatatgaaaaaatcaaagaaagtgatatccttgtgaatgcaaccaagtcaggaatgaaaccggcagaggatgagtcgttgatcaaagatgtatccgtattccagccggattttgtagttgcagatgcggtttataatccaagagaaacaaaactgattcgggaggcaaaagcagcaggctgcaaaattgcactgggcggaattggtatgcttctatggcagggcgaagctgctttccggatttttacaggagagagcatgcctacggaggaagtgtatgaaagattttttcgaggataaggaaaaaaggattccgggcaacatggaatatgatatagaacaaatcagaaatgagcttggaaaaggaatgaacatcgaaaaaatagcagagaaactgaacttagatcaagcgtatgttgaatttttgttttggtttggaattttataaaagtgtgaaacgtcctttctggtgaactgtccggtgggagattatccgtgatatgagtagtctccctgtttttatacgggcagcttccgggaagaaaattcaggagattttaactgcggctgataaaaaattgaaataaccgaaaaattatgataaaattgagaagatttaacagattacaggggcatacagatgtccataaatatggaggtttaaggaagatggaagcatacaaacaggaatttattgaatttatggtagacagtgatgtattaaaatttggagagtttacattgaagagcggaagaaaatctccgttttttatgaatgcaggcggatatgtaacaggttctcagctgaaaaagctgggtgagtattacgcgaaggcaattcacgataaatacggcgatgacttcgatgtgttattcggacctgcttataagggaatcccgcttggagttgtaactgcaatcgcatacagcgaattatacggaaaagaagtgcgttactgttcagaccgcaaagaagaaaaagatcacggtgcagacaagggaagtttccttggaagtaaattaaaagacggagaccgtgttgtgatgatcgaggatgtaacaacatccggaaaatctatggaagagacagttccgaaagtaaaaggtgctgccgatgtagagatcgtcggactgatggtgtcattaaaccgtatggaagtcggaaaaggcggagaaaaatgtgcattggatgaagtgaaagagctgtatggctttgacaccgcagcaatcgtaacaatggaagaagtcgtagaacacctctacaacagaccatataaaggaaaagtgatcattgatgatacattaaaagcggcaattgatgcatattatgaaatgtatggtgcaaagtaagcggggagtgaaagaagatggagaaggcatataaaacaatgagtcaggcaggagcaggaagcattgtgatcggaatcattacgatcgtaacaggcgtgacagccggaattatcgccattgtcaatggggcacgtctgttgaaaaataagagcgagattacattttagctgtggaaaacgggggagtaatttgaatcagagacaggtgaaaagaacccgcacggtgggaaaaatattatttgtgctctatatttttttcttattatatttcctgatcttctcagactggtacggacgcagcggtattggtgaagaataccgctgtaatcttgtgcttttcaaggagatcagacgttttgtggaataccgggaaacgcttgggcttttcgcggtatttaccaatttatttggaaatatcctgatttttgtgccatatggattttttatatccgttgccagcaggatgagaggctttttgatgacattgttctatagcttgggactgagcctcggagtggaagtatttcagcttttgacaagagtgggaagctttgacgtagatgatctgttactgaatacgatcggcggaattttaggatatgtattgtttttgatctgtaatgggataaggagaaaatatgatggcaggagaaaaaaaggaaaaaaaggaaaataaggaaaagaaagagaagaaagagaagaaagaaaaaatcagacaggcaagacagggaaaaagttcttgtatgtatgcgattttttcattgtttgttcttgtattgttgattcttcatgcgtatacaatgcgtgagaaaacggcagatattgcaggtgcattgggactgatcgatatgatgtttacagtttttggaatccgggcaggtcttaagggacgtcaggagccggaaaaaagacattttacgtgctggctcggaatcgtacttaacgggctggtattgctggttctgatcatgatatttttaggaggactctcatagatgaaattggaaacatggcagcgggatagaaacgagagatgtatggaacgccaccagctctcaatagaaagactgcagatgatcgatcaggaagagactgtgcaggacaggtatcggccgtatttccggatgtgtgccgcttttttgctcaaactggaatcacttcgcagaacaatagaagaccacagttttgaaaccttcactctggaagagaggaagagatggaatcaggagctgtatgtagatattctgggggaaaactataagaagagttttgctgatccgacatatgcggtaaagatgctttcagaagtctatggacagctcctgagttttttgtatacagaattgcgcagcgggattctgtatgcattttcgaacagactggattatctgacgatcttaaatgagttgtttctggagatctatcagtgttttgaagcgcaggaacagccggaatacaggaatttaagagagtgtgtgtactggtatgcaagcgattactgcgatgtatttctggcagatcatctcagagagtccataaatccagtgtacacaaaatcagtcattgacaggatcagggaaatggatctttcagataaccggtatctgtattcttacggggaatatgtgggagagaaagaactggaaacggcagaatatttcagaaatctttccgaggaggctctttggaaaatagcagacacgtatacaagaagatatcgcaaagaggattgccaggctgaaaagtcagtggtacagatcttttatcgtccgggatttgagcggcttgttttggctgtgctggcagatttggaaaaacagggaatcgaacctgtcatctgcattccggcatccggtgtgattgcaagagacgaactgcatgggaatgtaaatccgcagtatgaagcagatcataaatgtgatgaggcgctgtttctggataagaaatatatcgagcgaaaactggatgtgatgaagtacggatatgagcgtgagaaggagtggacagccagagtgacaggaagaatacgactggatcgggcggaagaagcgttgtgcggacaagccggtcctgatgcagtttcctacatggaggaacaaaaggaatgtctgcgcatatttgatgaaaaatcagttcagcttatgaatcaatacggtttagatataatcacaccttatgaagagttagaagaaataagtgtattaacaaaagaaggaaaaaatattatactattggaggacggaagattcgtgactgagggcaaaaagatgccggacggatcttttgagaaatagacagggaatacacaaaagttaagaaaggtggacaagatatgccaaaagtaggaattgtaatgggcagtgattcagaccttaaggtgatgagcaaagctgcggacatgctggaaaaactgggaattgattacgagatgacgatcatttccgcacaccgtatgcctgatgtgttttttgactgggcaaaggcggccgaaggaaaggggatcaaagtgatcatcgcaggagcaggaatggcagcacatcttccgggaatgtgtgcggcacttttcccgatgccagtagtaggagttccgatgtccggaaagaatctggatggaatggatgcactctattcgatcgttcagatgccgccgggaattccggttgccactgttgcgattgacggaggtatgaatgcggcaattctggcagcaaagattcttgcgacctcagatgaggaagttttgaaaaaactcaaagcatattcagaagagatgaaagagacagttcagaaaaaagcagaaaagctggacgagatcggatatcaggcgtatctggaaaaatagagcacagacgatgtaagaaatggagaatagttatggattataagaatgcaggtgtggatattgaggctggttacaaatcagtggaacttatgaaagaacacgtaaagaaaacaatgcgtccggaagtactcggtggactgggtggattttccggtgcgttttctcttgcaaagatcaaagagatggaagagccggtactgctttccggaacagacggatgcggtacaaaagtcaaactggcaatgatcatggacaagcatgatacgatcggaatcgatgcagttgcgatgtgtgtcaatgatattgcatgtgcaggaggagaaccattatttttcctggattacatcgcatgtggaaagaattacccggaaaagatcgcatcgatcgtaagcggtgttgcagaaggatgtttgcagtcagaagcagcgctgatcggtggtgagacagcagagcatccgggactgatgccggaggaagattatgatctggccggatttgcagtaggtgtctgtgataaaaaagagatgatcacaggagaagacttaaaagcaggagatgtactgatcgggatggcgtcttccggtgtgcacagcaacggattctctctggtgagaaaagtgtttgagatgacaaaagaaaatctggagacatatcatgagagtcttggatgtacattgggcgaagcacttttagcgcctaccagaatttatgtcaaagcactcaagagcatcaaagcagcgggtgtgacagtcaaagcctgcagccatattacaggcggcggattctatgagaatattccacgtatgcttaaagaaggaacgcatgcagtgatcgaaaaggacagttatccggtgcttccgatttttgatatgctggcaaaagaaggggatatcgaagaacagatgatgtacaacacattcaacatgggacttggtatggttctggcagtagacgccgcagatgtggagaagacaatggaagcaatcaaagcggccggagatactccatatgtagtaggtaagatcgaagccggagaaaaaggagttactttatgctaagagtagtcgtgatggtttccggaggcggaaccaaccttcaggcgatcatagatcgtgtggcagacggtacgatcactaatgcggaaattgtcggtgtgatcagtaataacgccaatgcatatgcgctggaacgtgcaaaagaacacgggatttcggcgtgttgtatctcgccgaaggagtttgaatccagagaaatctttaatgagaagcttctggaagcagtcgatgcatatgcgcctgatctgatcgtgcttgcaggattcctggtggtgatcccgccggagatgattgcaaaataccgcaaccgtatgatcaatattcatccgtctttgatcccttccttctgtggaaaaggattttacggactgaaggtacatgaggcagctctagagcgcggtgtaaaggtagtcggtgcaacggttcattttgtggatgaggggacggataccggtccgatcctgttacagaaagcagtagaaacacagccggatgatactcctgagattttgcagcgccgggtgatggagcaggcagaatggaagattctgccggaagcgatcgatctgatcgccaatggaaaagtaacggtaaaagacggaagaactgtgatcacacagtagaagaggagactgccatgaaagttttaatagtcggaagcggcggaagagaacatgcgatcgcagccagcgccgcaaagagcagcaaagtagaaaagatgtactgtgcaccgggaaatgcagggattgaagaattcgcagagtgtgtgccgatcggcgccatggaatttgaaaaactggtcgcatttgcaaaagaaaaatcgatcgatctttgtattgtgggaatggatgatcctctggtgggaggtcttgtggatgagatggaagcagccggtatccgcacattcggaccaagaaagaatgcagcgatcctggagggatccaaagcgttttcaaaggacctgatgaagaaatatcatattccgacagccgcatatgagaattttacagatccggatgcagcaatcgcatatctggagactgcaaaattcccaatcgtgctcaaagcagacggactggcacttggaaaaggtgttttaatctgtcagaattttgaagaggcaaaagaaggcgtgcgtacgatcatgctggataagaagttcggaacagccggaaatgagatggtcatcgaagaatttatgacaggccgggaggtttctgttctttctttcgtagacggaaagaccattaagaccatgacttctgcacaggatcacaagcgtgcgggagatggagatacaggcctgaacacaggtggaatgggaacattttcaccaagcccgttctacacaaaagaagtggaagaattttgtagcgaacacatttatcaggcaacggtggatgctatggcagcagagggtagagagtttaaaggcgtgatcttttttggactgatgctgacagaagagggaccgaaggtactggaatacaatgcacgcttcggggatccggaagcgcaggttgtactgccgcgtatgaagaatgatttgattgaagttgtggaagcatgtattgacggaacactggatcaggtagatctgcagtttgaagacaatgcagcagtatgcgtggtactggcatccgaaggatatccggtaagttatgaaaaaggtttcccgattcaggggttggaagaatttaacaagcatgaagggtattactgtttccatgccggcacaaagcttcaggacggacagattgtgacaaacggcgggcgtgtgctcggtgtgacagcaaagggaaaagatctcaaagaagcgagagccaatgcctatgctgcaacagagtgggtgcagtttgaaaacaaatatatgcgtcatgatattggaaaagcaattgacgaggtataaaacaatataaaatgtataaagaaagaagctgcctggcggatttgatttaaatttgatctgccgggctgtttttgtgcgaattaaacgataaaaaattgaaatataaagaaaaattgagggaaaataaaagtgtaatgcgaaaaaaggactccagtccttttcttgattataaaaagtgtctaaaatgtgaactatagaaaagacggaattggcaaatttgaaaggcggattaaaaatggaaaagaaacgagtttttctgattgttctggacagttatggaatcggagagatgacagatgcagctgattttggagatgtcggagcaaacacattgaagacgatcaccaaagtgaaggagtatgataccccgaacatgaaaaggatcgggcttttcaacatcgatggcgtggactggatggagaaagaagagcaccctatcggttcatatgcacgtatgaaggagcagtccagagggaaagatacgacgattgggcactgggagattgccggagtgatctctccaaaaccgcttccgacgtatccggatggatttccgaaggaagtgctggatgcgtttgagcgtgagacgggaaggaaggttctgtgcaacaagccgtactccggaacagacgtgatccgggattacgggcaggagcatgtagagacaggagcgctgattgtatatacttctgcggacagtgtatttcagattgcagcacatgaagatgtggttccgatcgaagaactgtatcgggactgtgagatcgcaagaaggatccttgtgggagagcatggggttggacgtgtcattgcaagaccgtttatcgggacagcaccgaattttaccagaactgcgaaccggcatgatttttccttactgccgccaaaagacacgatgctggatgcacttgtaaaagccggatatgatacgtatggtgtaggaaaaatctatgatatttttgcaggacaaggaatccagcatacacagcgtatccagaataatgtggacggaatggaaaaaaccatcgagacacaggatgtagattttaacggaatctgttttgtgaatctggtggattttgacatggtgtacggacacaggaacaataggaaaggctatgcagaggcggcgacaacatttgaccgtcagctgggaacctttatggaacggatgagagatgacgatattctgatgatcactgccgatcacggatgcgatccgggatttccgggaacggatcacacacgggagcacacaccgtttcttgtttacggcaagagcatccgggaagatgtgaatctcggaacaagagaaagttttgcagatattgcagcaacgatccttgatattttcaatgtggaaaataatacggacggaacaagtatgaaagaatacattttaaagaaataaaagagaaagggaggaagcgaatgtggaatatgtaattgaaatgaaccacatcaccaaacagtttggaaatttcaaagcaaacgatgatatcaccctccaggtaaaaaaaggcgagatccacgcgctgctcggtgaaaatggagcaggaaagtcaacactgatgagcgttctcttcggtctgtaccagccggaggaaggagagatccgcatcaatgggaaaacagtgaacatcaacaacccgaatgacgccaatgatcttggaatcggaatggtacaccagcacttcaagctggtacacaacttcacagttctggaaagtattgttctgggacgtgagacaacaaagatgggtgtgctcaaaatggatgcagcccgtaaaaaagtaatggagctcagtgagaagtacaaattcaagatcgatccggatgcgtatatttcggatatcacagttgggatgcagcagagagtggagatcttaaagatgctctactgcgacaatgatatcctgatctttgacgagccgacagcagttctgacaccacaggaaatcagtgaactgatgaaggtgatgaagcagctgatcgcagaaggaaaatccattatctttatcacacataagctcaatgagatcaaagaagttgcaaatcgatgcagtgttctgagaaaaggaaaatacatcggaactgtcgaggtggcagagacatccaaagagcagatgtctgagatgatggtcggacgcaaggtcaactttatcgtagacaaaccggagatgacaccgggagaaccggttctggaagtgaaaaatctgactgtaaaatccagacatcatggaaaagctgcggttgacaatgtatctttccaggtaagaaaaggcgagattctctgcgtggcaggtattgacggaaacggacagtctgagctggtatatggaatcacaggtctgataccgatcgagcatggacaggtgatcttaaatggaaaggatatcaccaaagagagtattcgtcagaaatgtctggacggagtggcgcatattccggaagatcgtcacaaagacggactggttttagattacacacttcaggaaaacctggttctgcagtcttactataccaggagattccagaatcacggctttttaaaatttgatgcgattcgtcagtatgcgaaaatgctgatcgagaaatttgatatccgttccagtcagggggagaagagtattgccagaggcatgtcgggaggaaatcagcagaaagcgattattgccagagagctggaccgtaatccggaaattgtcattgcagtacagccggtacgaggtctggacgtaggtgcgatcgagtacatccacaaacagctcattgagcagcgggacgcaggaaaggcagttcttctcgtttcactggaactggatgaggtgatgaatgtcagtgacaggatcatcgtcatgtacgagggtgagattgttgcagatctggatccgaagaagattacgacagaagaactcggactttacatggcaggagcgaaaaggagtgtgaagaatgaagattaagaatttgtttaaaggagaaggctttgtcaatttcagttcctccattcttgcgatcgtctgcggtctgttgtttggtctgatcattcttctgatcagtaatccaagccaggcattcggcggatttatgatgatcattcagggtgggtttacggatggaatgcagggattcggacaggtgctgtatatggcgacaccgctgatcatgacaggactttccgtaggatttgcatttaagaccggattgtttaatatcggagcgtccggacagtttacagccggtgcgtttgcagcggtatatgtgggagtcaaattcacatttctcccgccgggagttcattgtctggcggcacttctggcagcgattctggcaggagcgctctggggcatggttcctggacttttaaaagcatttttcaatgtaaatgaagtaatttcatccattatgatgaactatatcggaatgtatctgaccaatatgctgattcagaataccgtatatgatcaggtaaagaatcagtccatggcagtagcagagggagcaaatcttccgaaaggcggactggataaactgttcccgggagcaagcatcaatgtcggaattttgatcgccattggatgcgtgatcttaatttacattctgttgaataagacgattttcggatacgaactgaaagcctgcggaatgaatccggatgccagccggtatgcaggtatcaatgaaaagcgcaatatcgtactttccatggtgatcgcaggtgcgctctccggactcggcggagcactgttatatctggcaaactccggaaaatatatgcaggtactggacgtgatcgcaccggaaggattctccggaatttccgttgcactgctcggactttccaatccgatcggaattttatttgcaggacttttcatcggatatatcacagtaggcggaaacaatatgcagctgtttgatttcgcaccggaagtgattgatattattattgcagcgattatttactgcggagcgctttccctgttatttaaaaatacgatttataaatttcagatgagaaaagcgaaaaaggcagagaaaaaatcaggaacagatcgtgcagggaaggagggacagtcatgaatgtagcatatttcgttgtacagcagacgatgtattttgccattccgcttttgatcgttgcaatcggagcaatgtattcggaacgaagcggtgtgatcaatatcgcactggaaggtatcatggtcatgggagcctttgcggggatcttctttatcaatattttccaggggacattaagtggtcagggattgttcctgctcgccatgctggtagcgggactgaccggaggactgttcagtcttctgcatgcatttgcttcgatcaatatgaaagcagatcagaccatcagcggtacggcgctgaacctctttgcaccggcttttgcgatttttacagcacgtatgatccagggaatgcagcagatccagtttacggacacattccatatcaataaagtgccggtactgggagatattccggtaatcggagatttgttcttccagaattgctatatttctacttatattggaatcctgatttttgcggtagccgcatttgtgatcaaaaacacaagattcggactccgactgcgcgcctgtggagaacatccgggagcagcagattctgtgggagtcaacgtctacaaaatccgttatgccggagtgattatttccggtgtactcggaggaatcggaggactgatctttgttgttccgacttctacaaacttcaatgcaagtgtagccggatacggatttttggcaatcgcggttctgatcttcggacagtggcgaagcaacaagattttaatggcagcattcttctttggaatcatgaaaacactctccagtgcatactctacgattccattcctgaaatcactgccgataccgaatgaggtatacaagatgattccttatattgcaacactggttgttctggcattcttctccaagaattcacaggctccgaaagcagagggaatcccatatgacaagggaagcagatagtcgaggaaaggcagggataagacaatgagaatgtatgacctgatcatgaaaaaaagaaacggagaagctttaaaccaccaagagattcagtatctggtagaagaatacgtagcgggaaatattcctgattatcagatgtctgcatttttgatggcagtgtattttcagggaatgacagaggaagagacacttgccatgacactggcagtggctcattccggggatatggtagatctttccgggattgaaggaactaaggtggataaacattctaccggtggagtcggagacaagactacactgatcattgcaccgattgtagcggcatgtggtgcaaaagtggcaaaaatgtccggtcggggtctgggacataccggaggaactgtagataaactggaatcgattcccggacttcggacgactctgacaagagaagaattttttgaggtagtaaataagacgggagtcagtgtaatcggacagtccggcaatctggctccggcagataaaaaactgtatgcgcttcgggatgtgacagcgactgtggacagtattccactgatcgcagtttccattatgagtaaaaagctggcagccggaaacgactgtatcctgttggatgtcaagactggaagcggagcttttatgaagacactggaagattccgtggcacttgcaaaagagatggtctccattggggaaaatgcaggaaaacgtacggttgccctgattaccaatatggacattccgctgggacataatatcggaaacagcctggaagtgatcgaggcagtggagacactcaaaggaaacggaccacaggatctgacagtggtttgtatgcatcttgcctctaatatgctctatctggcaggaaaaggaacgctggatgagtgtaagagtatggtaaaagaagtgatcgcaaacgggaaggcactggagcatctggcagctatggtgagagcccagggcggtgatgatgcggtgatctgggatacgcagaagtttgcaaaagctccatattcttatgaagtttgcgcgaaggaatctggatatattacatttatggatacggagagctgtggaatcgcttctgcaatgctgggagccggaagagagacgaaagacagtgggattgatttcgcggcaggtattatcattcacaaaaaagtgggagattatgtggaaaaaggcgagtctctggcgactatgtatgcttccagagaagaattatttgaagcggcagcgaagcgttatttgtcagcagtgacacaaaaaagtatacgtgcagaagaggaaaagcttgtttacgcacgtgttacaaaagagcaggtagagtatttttaaaaagaaaggcggcgaacaaaaatggatcagaaagaaattttgaaacatgtggatcacacacagctgagggcatttgccacttgggaagacattcagaaattatgtgaggaagcgatcgaatacgagacagcttctgtatgtatcccgccatgctacatcaagcgggtgcatgatacgtatggagagaagatcaatatttgtacagtagtgggatttccactggggtacagcgttacagaggcaaaggcggcggagacaaaaaaagcactggaagacggtgcatctgaagtagatatggtagtgaatatttccgatgtgaaaaacggaaattacgatgcggtacaggcagaaattgcggcactcaagaagattacaggcgataagatcttaaaagtgatcattgagacctgctatctgacagaggaagaaaagatcgcgatgtgtaaagctgtgacagcggcgggagcagattacatcaagacttccaccggatttggaacagccggagcaacactggaagacatccgtttatttagagagaatatcggaccggacgtaaaaatgaaagcagcgggcggagtcaagacagtggctgatatggaagcattcctggaagcaggatgtgatagaattggtaccagctctgcaattcaactgattcagggcgaacagaccagtggatattaaggaggagaagacatgaaaaagaaaatcttaagtctgcttatggcagcaacactcgttgtcggaatgacaggatgtgtacagaaaccaggaagtgaaggatctgatgcaaaagatggagacaaaggcggaaaaggcggttatgagctggcactgatcacagacgttggaaccattgatgacaagtcatttaaccagggaacatgggaaggacttgaaaaatacgcaaaagacaacaacctgacacacaaatattacaaaccaacagaaaaatctgatgaggcttgtatgaatgccattgatctggcagtaaaaggcggggcaaaagttattgcaacaccgggattcttgtttgagtatccgatcatggaggcacagacaaaatatccggatgtaagctttatccttgtagatgcagagccaaaggataaggacggaaatgtacagatcgaagacaatgtaatgtctatcatgtatgcggaagagcaggccggatatctggctggatatgcagcggtgacagaaggatacaagaatcttggatttatgggtggtatcgcggtacctgcggttatccgctatggatatggatttatccagggagcagatgcggcagcaaaagatatgggactcaaagcaggggacatcaaaatgaaatatacttatgtaggaaactttgatgcatctccggaaaacaacgcaaaagcagcagcatggtacaatgaaggaacagagtgtatctttgcatgtggcggcggagttggaaactctgttatgaaagcggcagagacagcagacaaagttgtgatcggtgtagacgttgaccagtctgtagagtctgagacagtcatcacttccgcaatgaagaaccttggagattctatttatggagcactggaagattactataatgacagcttccagggaggaaaaacagtgactctggacgcttctcaggatggtgtaaaacttccaatggaaacttctaaatttaaagtattcacacaggaaaaatatgatgaactgtatgcacagttaaaagacggtacaattaaagttggaaatgaccagacagcagaggatgcaacaggtgttccgacagaagttgtaaaagtagagctgatcaaataagaatggcgtacatgtatccggctggcagattttaaatgtcagccggaaatttttttcacggaaatgtaagaacttctgtttttttcggcgatttgttttataatagtaaggagactatttaccagatacaaaggaaggggatgtatgggaacagatcgtctatatcaagtgctccctattatgcgggagctgaaaaaagaacgacgggaagaggttgaacagttttttcaggatgctccagattggctgctggattctttccgtgtggtggaactggataaaaatgttgtatttatcagagaaaatcagccagtagataccgtacacattattgtgagggggatgtttaaaatcacagactaccgggtatacggcattgcctatgactttatgcagtttgacgggatcaatgccatgggcgggatggagctgatcatggatctggatacgtatcaggcaaccctgcagacgatcacaccgtgtacgtcgatccgcattccggccgatgtctatgcaaggtggcttcgcacagatatccgtgcgctgaagcaggaagccaagatcatgggacattatctgtatgagcagggagtgaccagccggacctatatgtttgtgccggggacagaccgggtggcggttctttttgaacacagatataaaaaatatgcaaaaaacggaaaattaacatttaccaatacaagacaggaactggcagaatattcgggcttaagtgtaaagaccgtgaaccgtgcggtaaaaaagtttgaagagcaggggctgatcagccgtagcggaaaaacattttatattgatgaagggcaatatgagcagcttcatgcactggtatccaaattaattgagccattgatagaaaggggtcgaaatgatgaaccagatttatgaaaaattagtaaaatgcgcagatgcagtgaaaagtaaaattaaatttcagccgaaggtggcattgatcttaggatccggtctgggagactatgcagagaccatgcaggtggaagagacgatggaatacactgagattgaaggatttccggtgtctaccgtggccggacacaagggaagatttttatttggttatgtagaaggtgtcccggttgtggcaatgcagggaagagtgcatttctatgagggatacccgatgcaggatgtggtacttccggtacgtctgatgggaatgctgggagcaaaaatcgtgatgctgaccaacgcagcaggaggtgtgaattttgactttcatccgggagatctgatgctgatcacagatcagattacgacagcggttccgagccctctgatcggaccgaatatcgaagaactgggcgttcgttttccggatatgagtgaagtgtataacaaagaattgcaggatgtgatccgcaaagccggggcaaacacaggtgttgctcttaaggaaggtgtttatatgcagtttacaggtccaagctatgagacaccggcagagatcagaatgtgcagaacactgggaggagatgcggccggaatgagcacagcatgtgaagctatggcagcaagacatatgggaatgaaggtgtgcggaatttcctgtatcacgaatctggcagcaggaatgtccacgcagaagctggatcacaaagaagtacaggagactgcagacagagtggcagaggactttaagcgtcttgtcacagaatcgattcgtctgattggagaaactctggcgtaggatgtgcagcagtgcaaggagagtgcgcaatgaaaaaagaatttaaatttggaacagatctggatggaaaagcaaaagaggaattgatccgtctggcatatgagggaaaagagagatcatactctccttactccggatttcaggtaggcgctgcccttctggcagaaaacggaacggtttatctaggatgtaatatcgaaaatgcggcatacagtgctacaaactgtgcagaaagaactgcgttttttcaggcagtgtcagagggcgtgaaagaatttcgggcgattgcgatcgtcggaggtccgaaagggagtaaaaaaggagaactttgtgcgccttgtggagtatgccgtcaggtgatgatggaattttgtgacccaaaagaatttcagatcgttcttgaggacggaaacggtggatgttttgcaaaaacactggaagagatactgccgtttggatttggaccggcaaatttgagagaagaggagtgaaaacgcgtatgacgggaaaaaacagacttcccaggctggatctgcactgtcatctggatggatccttaagtcagggatgtattgaagaacttctgggaagaagtgtaaaactggaagagctgcaggcagatatggattgtcagagtctggcagaatatctggagaaatttgagattccgctggaatgtctgcagacagaaaaggggcttgagcgagccggttatgatttgatgaaaagtgccgcatcagaccaggtcgattatatcgaggcacggtttgcaccgcttttttccggacagagaggtctgtctacagagcaggtcattgagtctgtactgcggggaatggagcagggcaagaaggaatttgacattgattatggtgtgattgtgtgtgccatgcgccatgagaaggaagaggcaaatctacagatgttaaaagctgcgagagagtttcttggaaacggtgtctgtgcagcggatctggcaggaaatgaagcggcatttccgatgtcgcagtttatgaacctgtttgcggaagtaaaacggatggagatgccgttcacacttcatgcaggtgagtgcggcagtgtgcagaatattctggatgcagtgcagtgcggtgcttccagagtgggccatggaattgcgcttcgcgggcagaaagaagcaatccggatctgcagagacagacacattggaatcgagatgtgtccgctcagcaatatgcagacaaaagcggtaaaggatcctgcggattatcccatccaggagtttttgcgggagaaccttcttgttacgatcaatacggataatcggatggtcagccagacaacgctggaaaaagagtttgcgtttctcagagaacagtatgcagtgaccagagaacaagaagtgcagatgacaaaaaatgccattgaggtggcgtttgcgtctgatgaagtgaaagcacagttgtggaaggcgatggaattataagagtaacagagatcatattcagggtttgagaatatggtctctgttttttgtattgcagacgatgaaaaaactgttgtataagaggaatttatggtaaaaagtgcataaaaatagagaacaaaaattgtttaaatcatagaaaacaaataaatgaacatataaatgataaacgaacatataagtacgttgtaaaaaatcataaaagatgctaatatgcatataacgaaacaaaaaacaatcgtaaaacgaaggaggaagcaacgtgagcaagattgatgaaatcacaagagaaaattggatcatgagtacatttccggagtggggaacctggctgaatgaagagattgagaatgaagaagtaaagccgggaaccgttgcaatgtggtggcttggatgcaccggaatgtggttcaagactccgggaggatgcaacatcaccgtggatctctggtgcggaaatggaaagagatctcacggagacggaaagatgaaggttggccatcagatggcgaatatgtgtggtgcgagagcaatgcagccgaacttaagagccgttccatttgtaatcgatccatttgcaatcaaaggtgtggatgctgtgcttgcaacacattatcatcaggatcacatgagtgcggaatatgcagcccacgtgatcaagagcggtatgatgacaacagatgagaatggaaaagaaattccggttccgtttatcgggccgaaaaaatccgtagagctctgggagaaatggggagttccggcagaccggtgtattacggtgagaccgggagacagcatcaagattaaagacattgagattatcgcgttggattcctttgaccgtacctgtattgtgacaacagattctcaaggagaggacagagaagaattgacaggaaaatgcccgacagatatggatgataaggcagtcaattacctgatcaagacaccgggaggaaatatttaccacagtggagattctcactactcaatctactttgcaaaacatggaaaagattatgacattgatgtggcattcggatcctacggagagaatccggtaggtatgcaggacaagatgacttctgtagatattctccgtatggcagaagcacttcgctgtaaagttgttgtcccgattcactatgatgtatggacgaacttcatggcagatgtcaacgagatcaacgttctctatcatatgaaaaaagatcgtctcggatatgagtttcatccattcttctgggaggtcggaggaaaatacgtttatccgacagacaaggagaaaagagcatatcatcacagaagaggtttcgaggactgctttgaagcaccacagaatattccattccgttctcttctgtaattgccggaggtggaagtgatgctgagagaatttgtagagaaaaaacatgtaaagtttgcagacagtgcaccggattggcgggaggccatccggatgagctgtgaagtgctggaggcagatggaacaatagaagaaaattataaagaagatattatcgcatgtgtggaaaaatatggaccttatattgtgatcgcgccgaacattgcgatgccgcattctcaggagggtgcaaaaggagtgcataaaacagagattgcgtttatgaaactgaaaaaaccggtgagcttcgaagaaggcaatccggaattggatgcacagctattctttacattggctgcctgcaataatgagcagcatcttcagaatatgagcagactttccgaaatgctgatgaatgaagaattggttgaggaacttgccgatgtcgaaaccgaagaagatcttttaaaactccaggaaaaatatctggacgcataaggaaacggcaaaggaaacgagaggtaaaaaagaaagcatagatacaggggtgaacaaatggatatattaatgactgtatggtcgtattttgcgacaaatattcttcagcagccggcgtttatgattggtttgatcgttatggtaggttatatacttctgggaaaaccgtggtatgatactcttggcggtacactcaaagcaattgtaggatatctgatcttgacagttggttccggtggactgacaaataacttccggccggtgctggtaggactcaaagaccgatttaatatggatgcgatggtgattgatccatattttggacagaatgcagtaacagtaggtgtagaagaggtatttggaaaaggctttggagatgctatgattcttctgtttattgcatttattgtcaacattcttctggtacgctttacaaagtacacaaagatgcgtgcactttttactacaggtaatgtacaggtacagcaggcagcgactgcttactggctgattatgtttgcctgtccggcgcttctgacaaatagagtcggaatgctgatcgttatggcattgcttcttggagcgtattgggcagttggttcgaacctgacgatcaaaccttgtcaggaggtaacagatggagcaggtttctgtttggcgcatcagcagatgtttggggttgcatttttctactggctggcaggaaaactgtttggtaatgagaataagaaaaataaaggcaaaaaagtaaaaagaatcgaagatatcgagcttccaggattcatgtctatgttcaatgacaatatggtttccgcgtctattttgatgctggcattctttggagtaatcctgtgtgtacttggaagagattatctgatcgaaggcggatttatgcaggaaggacagagcatggtattctatgtgatccagacttgtctgtactttgcagtatatctggcaatccttcagcttggggttcgtactttcgttgctgagctgacagcatccttccagggaatcgcagacaaactgcttcctggatctgttcctggtgtggactgtgcggtaatcttcggattcggagctccaaacgcagtgacacttggatttttggcaggtttcatcggacagatcgttgcaattgcaacactggtactgttaaagagcccggtacttgtaatctgcggattcgttccggtattcttcgacaatgcgaccattggtgtatttgtcaatgaaaaaggcggtttgaaggcaacattgatccttccgtttatttccggtctctgccaagtatttggttcagcgctcattgcaggatgggttggaatggctgcatacggcggatacttaggtatgtgggactgggcagtggtatggccggtatttacagttgtgatgaagtacttaagctacgcaggtattgcgatcgtatttattgctctgttggcaattccacagattcagtaccgcaaggataaagaaggatatttcctgatgacagaagattacgaggcttataaagaactgaaagcgaaaaaggctcgggcagaatagcctgaaataattgaaagaaacatcatatcgtcatataattaagaaaaagagcaaaggagagattcacaatgacaaatcagaatttgaaatttttagtatgctgcgcaaatggttccggttccagcctgatggctcagatggcacttgagaaggttctgaaaaagaataacatcaaacctggcaaggtacatcattgtccgctctcagaaggaaagagcagtgcagttcagtacgatgtacttgtgtgtgcacagaattttgcaaatatgtttgaagatgcaaaagcaaagggtgtagttgtaattccgctgaaaaatgtgatgtcagctcctgaaatcgagacaaaattaaaagagaacggaattctgtagatttgttgaaagacagcagaaaagaagtgaggtgaggaagatgaagagagaaaaagcatatgtagatgcaagaaggaagagtattctggagctgttgcgtgaaaatccaaccgtacgggtggatgaactggcaaagcggatgggagtttctttgattacgatccgcagagatctgcagtatctggaagagcagaagctgttggtcagattttacggaggcgcccaggtggcagaccgggagactgcggagaaaaatgaagtgcagatgtaccgtaagctgatcgcgaggtatgcggcaggactggtagaagacggcgattctctcttcatcaatacaagccgcaacgcattgcagatgctggattatatccagtgtcgcaatgtgactgtgatcacgaacaatggaaaagcaatcggcagagaatattatgatggaatcagtattattctgaccggaggagaactacggcatcccaaagatgccatggtcggcgattttgcaatccgaagtgtacagaatgtattcccgaagaaagcgtttatggggtgttccggaatttctatgctttccggaatgacaacggagattgcggcggaagtaaaagtaaatgaggtgatgatccagaatgtgacagaggatgtatatcttctggcagatcatacaaaaatcggaaaaaacagcagctttacaagttcgccgatccagggaatcaagcatttgatcacagatgaaaaagcacctcaggatgtactggatgaactgcgcagtgcgggcgttttgattcatcaggtacacaaaggagattttgaaatatgaaaccatataccttaggaatatatgagaaagcaatgccggcagaattaagctggaaggaaaagatggagacagcaaaagctgcgggctatgattttatagagatcagtattgatgagacagaagaaaagctgaaacgtcttgacatgggaaaacaagagcgtctggaactggtccgtctgatgtatgagacgggaatgccaatccgtacaatgtgcctgagcggacatcgaaaatatccgttgggaagcagccagccggaagtttccggtcgtggtatggagattatggagaaagcacttgaactggcagaggatctcggaatccgtatcattcagctggcagggtatgatgtatattatgaagagggcagtgaagagaccagaaaacggtttgccaagaatctgaaaaaagcagttgagatggcagcggcaaagggcattgtccttggattcgagacaatggagactccgtttatgaataccgttcaaaaatccatgaaatatgtaaatctcgttgattcgctgtatctgaatgtgtatccggatctcggcaatatcaccaatgccgcaaaggcagagggcggagatgtacttaaggatctggagaccggaagaggaaggctggcagccatgcatctgaaggaaacagttccgggcaagtttcgggagattccgtttggaaccggacatgtagattttgaatccagtatccgcaaagcctgggaactgggcgtgcgtcgctatgtgacggaattctggtatacaggcagtccggcgtggaaagaagatattgattttgctgtgaagatgatgacagagattctggacaggcagaccgtataatgaaagagagggaagatcaggtcatgaaagtgagtaaaaaagtcatatcaaatcttacaaaatgttattcgattgcaccgcttacatatcagggaaagagacatattctggtagcggcagaaaagcaggatccatgttatctgtttgatctggagggcaatcaggaagagacagtatgggaaggtccgggaggagtcatgagtatggtgcaggttccgggaagtgatggtgtttttctggcaacgcacaaattctactctccgaatgattccaaggaggcaaagatcatcattgcatcgccgggaccagacggaatctgggaaatccgtacgctggtcgatcttccgcacgtacatcggtttgatattgtgacaagaaacggtgtgaattatctcatcgcgtgtgcactgaaatccggacatgaatataaggatgactggtctatgcccggcaaggtttatgcggcagtgcttccggatgatctgagtggatttgatgaggagcatcagctgagtctgcaggtgatccgggagaatatgctgaagaatcatggatattacaaggtgacagaagatggtgtggagcagtgtctgatttcctgtgacgatggtgtataccgttttacaccgccggaatcagaagaacaggactggacagtggaaaaactggtggatgaggcagcaagtgatgctgtactagtagatctggatcaggatggagaaaaggaactgattttgatctctccattccatggggaacatatttatttctataaaaagattgatggagactacaagaaggtatatacttatgatactgcagattttgcacatgcgatctatggcgggacactgcttggcaagccggcagtgatcatcggacacagaaaaggagagagaaaccttcttctctttacctgggagcaggaaaaagggcagtatcaggttgagattctggatcgggactgcggaccggccaatgtgttcaagtatgaacggggcacagaagaggttcttatttctacgaaccgtgagatcgatgaagttgcaatgtatacgtttgaaaagtagatggggaggaaatgcaaaatgctggaacagttaaaaaaagaagtgtatgaggcgaatatgctgcttccaaaatacggacttgtcacttttacctggggaaatgtcagcgggatcgaccgagagagcggattgtttgtgatcaagccaagcggtgtagaatatgacaaactgactccggatgatatggttgtggcagatctgaatggaaataaagtggagggaagatacaatccgtcttctgatacgccgacacatgtggttctttacaaccggtttccgaagattggcggagtggttcatacacattccacatgggcaaccagctgggcacaggcaggaagagatattccatgttatggaacaacgcacgcggactatatttacggagagattccatgtgtgcggaatctgacaaaggaagaaatcgaagaagcatatgagaagaataccggtgttctgatcgcagatgaatttgagagaaaagcaaaggattatctggcggtgccggcagtcctctgcaagaatcacggtgtatttacatggggcaaggatgcgcacgaagcagttcataatgcggtagtggcagaagaggttgcaaagatggcggcacgctgtgagatcatcaatccggatgtgaagcctgcgccgcaggaattacaggacaagcactattacagaaaacatggtgcgaatgcctactacggacagaaataagaggaaacagatatggtaaaagcgttttttttcgaccttgacgatacactgtatgattatacaacggcagatattctggcaaaagaagcggtacgtgagtactgcctgcagaatctgtcgatttcaggagctgtatatgacaggcagcttgcgaaagcgtatgttgtggcagaggagcggatcggaagagaatgtgcgtcagtgcataatcgtctgatccggtatcagtgtatgctggagatgttgaaaaagccgctttttccgcatgcatacaagatgtacaggctgtactgggatacactgatgaaacagatgacgttggaagaaggggtctctctggtgatgaagcagctgaaggaacagggcgtgtatgtggggatctgtacgaatatgacagcagagatccaatatcagaaaatagaaaagctcggaatcaccagatggatcgatggtgttgttaccagtgaagaagcaggtgtggaaaagccggactaccgaattttttctctgtgcagagaaaaagcagaggtgctgcctgaagactgtgtttttataggggacagtctgcggcatgatatagagggggcaaaacaggcgggaatgcaggtcatctggtatcataaagcagaactttcggaagaagagcagcaaaaagcagcgcaggagaacattccggtgatgcggcagttttcgcagtgcatcgaattgctgcagccatatgttcagagaggaagagggcaaaagagatgtttggaggattgacgatacaggcagtatttctggtagtgatcggagctgcacttctggtgacaggaaccagcgggctgagacgcagtattcggatgaagaagcaaaaagcacagagaacagggaagattcttcggatcagtcatgtggaaaagcgggatgaagaaggatttctgattcagaattattatgagacgaggatcgaatatgtggaaaatggtcaccgtcagcaggccactgtcaagagtgtggatgagtttcaggaaggggaagaagtcaggatcctcaaggacaatgagcggggcggacagctgcggattgtagagaatgaaaagtctgctgtattcggtccgtggattttgatcggagcgggaattttgattatttccatgccttttgtccagaaacaatatggagacgcctatgtttcagcaattctggcagcattgatgttccttacaggtgcagcgctgtgtgcatcatatggaaaagacaaaaaaagaaataccgaagaaatcaaagcagttcttacagatgtcttaaaatggcagaatggacagaagaaaaagtggtctacaccggccgcatcgtactacccgatcctgacatatacattggatggaaaagagagaagaatgcgcagccgctataattccagttccccggtcaattataaaaagggcaaagaaattacattgtatcgggatttggagagcggacgtattctggaaagaggaccgaaactttccatgctgacaggagggattatactgatcctgatttctgcgatcggagcgatcagtacactggatgtgctgggaattctgtgatgcggagattactgttcacagtaatatatggactacatttgaataagagaaatgaactttctagtgtcaaaacaccttgtatgtggtatgattggaacaaaccacatgtaaggtgtttttgcttatttgtaatccaggattgatatttggaggcagtatgaagaaaagaaaaaataaaaaaggatttttgatcggtggtattgcagcaggagcggttgtgattctcgcagggggaggaattctggcatggaaactgttgataaatacggcaacaccgcaggaaacggtgaaaaattattttgcgcttgtagaaaaaggacaatataataagatgtatgccatgctaagtgagagaaccagagagacggtgtcagaaaaagaatttacagagcgcaatcagaatatttacgaaggaatcgaggcaaaagatatcaaaatctcgatccctgaaaaggagaaactcaaagggaacccggtgactgtgaaatattcagaaacgatggaaaccagtgcggatgagatttcttttgacaatgcggtgacactgcaaaaagaggacggagagtataagatcgactgggattccacagtgatctttccgaatcttcaggattcgtataaggtgcagattcagacagaaagtgccgatcgtggaacgatttatgacagaaacggtgtagtgttagcagggaatggaacagttctggaagttggcctggtgccggggaaaatgggagatgatgcagcaaaagcggaagcaatcaagaagctggcacagatgctggaagtttcagaagaggcgattcagaacgcactgggggcatcctatgtacaggatgattcttttgtgccgatcaagaagattgcaaagggaaatgaagagaaagaagcacagcttctgacgattcccggagtgatgttaaatgattcccaggatcgcgcgtatccgcttggcgctgcggcagggcatctgactggttatgtgcaggcggtgacagcggaagatctggaaaaactggaaaataaaggatatcacgcaaacagtgtgattggaagatcaggcctggagcaggcttatgaggaagagcttcgtccggtggacggcacacggatcattattgcagacgaaacgggaaatacgatcgagacgctggcatatcagccggcacagaatggaaaagacgtgcgtgtgaccattgatgccgaggtgcagaagacggcatatgatcagtttgcacaggatccgggaacggcggcagccatgaatcctaaaaccggagaggtgctggcattggtgagcacaccgggatatgatccaaatgaatttgtgctggggatgtcagatgcaagatggaatgcgctgaatgaagatgcatccaatccattgatgaaccggtttgtcaacacctgggttccgggatctacatttaagggaatcacagcagcggtcggagtggatgcaggaattatcaatccggatgagaatctaggatatgtagggctttcctggcagaaagatgcaagctggggagattatcatgtaactacgctgacagattacggtgaaacggtcaatctggtcaatgccatgacatattcggacaatatctattttgcacgggaagcattgaaaatcggggcggatacgatggaagaaaaattaaaatcctttggatttgaagaagaacttccatttgatcttaccatgcaggcatctacgtttgatgatgacggaaagattgattcggaaattcagcttgccgataccggatacgggcagggacaggtgctggttaatccgctccatctgctgtctatgtattccatgtttgttaatgatggaaacatgattcagccagttttgaaatatgaagaaaacgctgctgcaaaaatctggaaagagcaggcagtcagtgcacagacagcacagactgtgaaacaga

SEQ ID NO: 7065 - DNA, 3067 bp, Unknown
  gut microbiota DNA sequence
gacaggagtggagcgaggctggtttatctgtgagacaacagaagatatgccaaaccagatcgcagtggtcggcatggtggaagatgtaaagacaaaaggcagcagcagttatgtgacacagaaggtgcgcaatattgcagtgtcttatctgcagtaaatgaacggaggaattatgaatgaatggatcggtcaggtgctgccattctggaaagacctgacagaaacggaaaaacagatgctgctcacccatacagcactggaagaatatgaaaaaggagtcctgcttcacatcgatggcggggactgcgcaggtgtacagattgtaaaggaagggcaggtccgtgtctatattacgtcaccgagcggtggagagattacattgtatcgtctggtggagggagatgtcagtatcctgagtgcgtcctgtatgataaagggaatggatatttcgttggatatgatgatggaatcggacacggtactgtatacgattccgaaagaaatttacaagaaactgaatgatacaaacactgcagtgaaagattacacgatggagatggtatctgagcgcttttccgatgtgatgtggctgttcaatcagtatgtattttctaatgcagcgtctcgtctggccggggcaatcctggaacatatggcactggcgggagaggagaaattttctattactcacgatgtacttgcaagagatatgggaacggcaagagaagtcgtcacaagactgctcaagcagtttcagacagaagggtatgtgagattatcccgcggctatatagaagtactggatgcaaaagctctgaaaaaaatatgagaaatgtgattttgtcacggaagaaacacaaaaaagtggtatactaagaacatatgaaagttgaaggaggatttataaaatggaaattataaaattaacaaaagataattttgaacaggaagtattaaaatcagagaaaccggtactggtagatttttatgcagactggtgcggaccatgccagatgctttctccgatcgtggacgaagtggctgaggaaagagatgacatcaaagtcggaaagattaatgtggacgagcagatggaactggcacagaaatatggagtcatgacaattccgacactgcttgtgatcaaaaacggagaaattgcgaacaagcatatcggtgcattgtccaagagtggagtgattgagcttctgtaagaacaacagaagaatgatgattggagaagaaagcagttgatggaaggtcagctgctttttctacgtagaacaattacaaaaataaagattgcgattgtgaacaaaaaaacagataatagaaaagactctataggaaacaggtgaaaaaatgaaattaacggtgaaaaagtttcaggaattaacaacaactgaattatatgaaatattaaaagcaagagcagaaatttttattatggagcaagagatcaattatcaggacatggatgacattgattataaaagtctgcactgcttttttacagaagataagaaagtgattgcatatcttcgtgcgttttatcaggaaaacgatggggatattgtcaggattgggagagtattgactttacaacacggaaacggcacaggaagagacttattagaacaaagtttaaaggcgatcaaagaaaatatgaaatgtaagaaaattgtcatggatgcacagaaatatgcagtcgggttttatgaaaaattcgggtttaaaacgatatccgatgatttctatgaagaggggatcctgcatgtcgtgatggagctggacgtataatttaaaatgtgcgaaagagagttttacctttctcttttctgataatcgtgctataatgcagaaaagcataaaattctggttttctaagcggaacgataccgcatcttttattcttatagcatatcggaagatctctatgctttgatttcaatctaaaacagcagagaggtttgagagaaagatgccgtattggaaagcctcctgcagctattttcattcaaggaggtatttatatgaaccagacaacacagatgcagcccgtaaacagactgtacaaatcgaggatttttgccatgctctacagtgacaggaaagatctgctcgatctgtacaatgcggtcagcggaaaacattatgaagatccggaattgctggaaatctttcagcgtttttgaaacaaaacagactgaaagaaatcggtcctcaacagtttaaagaggatacagtgcgggcagcagctgcatcctctttaatgaatatttcaatatcataatctgttatattcgtcatcactgaccggttcacaccactcatttgagctttcttcccctgtcggttcaaatgtcagatgagagaaccaactgtcttttttcgcaccatgccagtgctttacattggcaggaatcgtgattatcgttccaggaacaaggctgacgggatcgtgcccttcttcctgataccagccttcttattccagttttctccaaataaaatatcatcattgtaatgtgcaaattccggcgcaaatttgccaagtgcatttcttcctgctgtctgtacaattttttccgttttagaaacttcctttcgattattgtatttttttgatccaggtcatgatatctgattctggtgtgagcagtttatcttcattaaaacggatattacagccttgcatgacctgtgcccccggacattcttttacaaaatcttggaaagtatggccaagccagcctccatttgttgcaaaaggataaacagtttttccggataaatcagtatcatgcagaaatgtcttcattgccggagcaaaggcataccaccagacgggtgcaccaagaattacggtatcatactcagttagatcgatgttcaatggttgaatctttggcataaagccactttcgacttccaaataataattgttttcatgtgtattaaagcaccttctttctttccggatgatctccgatatagttattataaagtcgatgcttttatatgtcgaatacctgttttttatatgaggttcatgcttaaaaagcat

SEQ ID NO: 7066 - DNA, 51953 bp, Unknown
  gut microbiota DNA sequence
gagtttgtacttaagttgctcacagcagctatgttaagatgctcataatgtttgccgaaccagtttgcaacctctgcgtgcactttttttcggcttggcataatgaccgggacttttgcaagttcttctgctgtgacagagtttcttttcgccagcggaacacatgatggaacaattgctgcccatttttccgtcacaggcatgcggatatattcgtactgttcgatgtctgacggttccagtaaaagcccgatatccgacagtccttcatccatccgctggcgaatttgatctgcattggccgtatagatatcaaaaacaaccagggggtggatttcgtgaaatttttcaataattttcgccagatattggactgctgcaatttctccgcagccaatggtcactgttccttccagttcttccttaccacagctgacttcagcttctgtctttgcaagaagatctaaaacctcttctgcccggcgtcttaaaagatatccttcattggtaagagaaagtggtctgcttccctttataaaaagtgtggctcctatttccttttcaagcatagccatttgccggcttaaagtaggctgtgtgatgtgcagacttttgctgcttttgtgatattctgttcttttgcaactgccagaaaatactgcataagtcttgtctcgatcatattctcatctccttatttttggcaataaagcctgatatttactgtcttttctcactacaaggtaaaatgtcacatttacttccggatcagtcacaggaatcgcgactctcccggctgtatctgtaaacctgtctgacattacaacatctgttataaaacatggcagcgatgaggatctcaccagttcgttcattgtgaattcatccgtctgtacaagaaatttagatgcaggcatttttttacggcagattgcatcccagaacccaagttctgaatgcagaagaaagttgaagccattaatatccttaaatgacagctttttatatcctgcaagttcatgattcttcgggacacagacaaatagtttttccttcatatattcttttgaaacaaagtgtttgtcatgaatcagaaaaggcaggatcgccagttcgcatttgtgatggtgcaatgcttctaaaacttcggcattctggcatataccggaagagattgtcatttccggatattggctgtttaactgcataagaagcttccatagtggcgcaggcgcacaggattttacagtaattgtttttagtttggcatcatacgttcttactctttgaactgcatgatcggcttcttccaaaagctttctggcacattccacagcaacctttccggtttcatttaactcaattcgatttttggtccggtgaaacaggaaaacaccaaattcttcttctatgtttttcatagaacgggtaaccgacggggtggaaatatggaatgcttctgccacctttgataaagttcccgtatctgcaaaagcaatcaactgttccagttcattcagatctaacatactatcacctcggattttttaaaatttaaattcacttttcgatttctgaaaagcagatttcgatataaatattgtacattttccgtattatcaagtaaagtatcacttgtaaagaaaaagcacttttcataaaaggaggtattatttatggaatatgtaactttaaataacggaatcaaaatgcccaaattaggatatggtgtctatcagacagctctggaagatacgaagagatgtgtccttgatgcaattgaaacgggatacagaagcatcgatacagctcaggcatatcaaaatgagtcaggggttggtgacgcgttggctgaatgtggactgccgagggaagaatttttccttacaacaaaagtatggattacaaatgcaggatatgagaaagccaaagcttctattgaagagtctctgaaaaaactgcgtaccgattatctggatctgcttttgatccatcagccgttcggtgactattatggaacttatcgtgcaatggaagaattttataaagccggaaaaatacgtgccataggtgtatccaattttggtccggacagatatcttgatcttgaacatttttcagaaatcaagcctgtggtcaatcaggtggaaactcatgtattccagcagcagaagactgcaagagaatacatgcagaaatatggctgccagattgagtcatggggaccatttgcagaaggtaaaaatggactgtttacaaaccctgttcttacagaaatcggaaagaaatatgagaaaacagcggcgcagactgcccttcgatttctactgcagagtgacgttgtagtcatcccgaaatctgttcacaaagaaagaatgaaacagaacatcgatgtgtttgattttacactgaccgcggaggatatggctgcaattgaagcactggatggcggtgagagcttattcttctcccactatgatccaaagacagttgagtggttcatgtctattttataaagagtttggccgaggggataacaaaaatggttgtcagaaacagaaagatatgtctataatgtttgcagaagagaaaaaaggagagaaatacctatgctgcatgaaaaaatcaatcttggaaacagtggatacggaacaagggatacaattctgacaacctacgtgcagaacaatctggaaggagtccctgcgcgtcggcgtccggcagtgatcatttgtccgggtggcggatatgaatatcagtcagacagagagagcgaaccgatcgcattggaatttttgaaaagagggtatcaggcatttattctggaatatgcagtcctggaagagaatgaaacgaaaggtcttcttccatatccgcagatggatcttgcgaaagcggttgcatatgtgaaggaacatcaggaggtatggaatgtggacggagagcagatcacgatcctgggatgttcggcaggcggaaatctgtgtgcgctttacagcggattttatcagcaggactggtttataaaaaagacaggatacagccagaaacaaatgcaggtacaagccatgatcttgtgttatcccgtgatcgacttcagggcaggatggccgaaagaggatgacatacggagaagaatcagtgttgaagaagcgtggcaaggtgcgcagaatcttgtgacagaacagacgccgaggacatttatctggcatacgaatacagacggaacggttccggcagagaatgcattactgtttgcccaggcattgttgaggaatggagtagattcggagtgccatatgtatcacagaggatgtcatgggctgtcacttgcaaatgaacagacgaaggtaagaggagaacatctgaatccacatgtggcgggatggtttgacacagccttcgaatggctggaagaatgagtccatgaggtggtatcagtagaagcctgcgtgataatatcacagaaaacaacatatgtatcttatataatgacagagtcagcagacaaagaaaacaaatttgtctgctgactctatattatttttaggaggattcttatgaatcaggtaaaacgaaaaaagagaaaagcccatgtggaagaaagggattgtgttgcctgcggatgctgtgtcaaggtatgtccgatgtcggcaattcagatatttcatggagtgatggcagtggtggatcaggaaaaatgtgttggctgcggaaagtgtgtaaaagcgtgtccggcaacggttatttcaattcaggaggcggcagaatgaaaaagagttggtatgattatttgtggattgcttctctgatgtatctggtgttgggattttttcagattctatttgcgtggctgggactgttatgcttttttattccgctgatcattgcaattgtgaaggggaacaaggggtactgcaatcgttattgcggaagaggacagctgtttgagctgatcggaggcagatttgggttatcccgcaggaaggatgttcctaaatggatgaaaagcaaagcgttccgttatggatttctgattttcttttttgcgatgttttttcaaatgctgtggacgacgtatcttgtgttttcaggagtagaaagtctgcatcaggcagttaccttgttatggacctggaagcttccgtggaactgggcgtatcatggcgtgaatgtttcgccgggaatcgcgcagttcgcatttggattttacagtgtgatgctgacttctaccgtacttggatttgtgacgatgctgttgtttaagccccgttcctggtgtgtatactgtccgatgggaacgatgacacagttgatctgtaaaggcaaaaataaaagagcgctgtctgattttaaaaattgagactggcaggtgtgaggcatgtttgatacaatatgaagtaatggaatcggagaggagttgaaaacgtatccattccgaataaagaattgatggatcgttttgatgagatgttgcaaaaaatagaagtattataactcaccagaaaggacacagcatgcttcaatttattttaggaaattcaggtgcgggaaaatcgcattatttatatgaaaagatcattcaggagtcaatgaaacatccggaaataaactatctggtcatcgtgccggaacagtttacgatgcagacgcagcaggatctgtgtatactgcacccgaatcacgggatcatgaatatcgatgttttaagttttggacgaatggcacaccgcatttttgaggaagtgggacagtcgagaggacaggttctggatgatgaaggaaagaatctgattcttcggaaaatcgccggacaatacgaagatcatctgatggtattaaaagggaacttgaaaaagcagggatacatcagtgaggtcaagtcggtgatctctgagtttacacagtatggagtcggattcgaagagctggatgtgcttatggaaaatctggatgaagaaagttttctatattataagctgtcagatatccgcatgatatacgaggggttcgagcagtttcttgcagaaaaatatattacaaaagaagaactgctggatgtgctcagtcagatggtggcaaagtcggagattttgaaaaacagtgtgatcgcactggatggatttaccggatttacaccagtgcagaatcggcttcttggagagctgatgagcatttgcaaagaagttttaataacagttgagatggatggaagggaggatgcgtttcggtatacgcatccgtatcagttgtttgcactcagtaagcagatggtgacgggtctggtacagattgcgggagagcgaaaaatagaaattgccgatccaatttatttgtatgacaagccggtttaccggtttcgcagcaatccggagcttggctttctggaatctgagttgttccgctattccagaaaacagtatccggatgaaacagatcatctttcggtgtatgcagcgggcagtccggatatggaggcaaagctgactgcacagaagatccgcagactggtgcgggaaaaaggataccactaccgggatatcgcagtaatctgcagtgatatgggaacatatgcagatcatctggagagggcatgcacagagtatcagattccggtgtttatggactacaaaaagagtattcttttgaatgcatttgtagaatatgtgaggagtgtcctgtccatggtggagcaggacttttcctatgagagtgtgttccgttttctaaggaccggatttacggaatttacaagagatgagatcgatcgtctggaaaattatgtggtagcagtgggcttaagaggctataaaaaatggcaggcagtctgggcgagaaagacaagttcggctgatgaagaagagctggcagtactaaatggtctgcgggtccggtttgtagagatgacacagtcactggtttttgttttgaaacagcgaaaaaagacagtgcgtgatatttgtgaagcagtgtatcgcttctttgtggaaaatcagattcagcagaagctgaaagtgatggaaaactgttttgcggaaaagaaagagctggcactggcgaaagagtacgcacagatctatcgtattgtgttggaattgtttgacaaatttgcagaacttttgggagacgaggggatttctctgaaagagtactgtgagcttctggatgcaggactggaagaggcaaaagtcggtgtgatcccgccgggtatggatcaggttgtgattggagatgtgcagagaacccgtctgaaaagcaatctgaaagccctgttttttgtgggggcgaatgataccctgcttccgggaaatatggggcagggaggactgcttaccgaacgggaccgggaatggtttcagaaagaaaagcaggcactttctccgggcgcaaaagaaaagacgtatattcagaaattttatctgtatatgaatctgaccaaaccggaagagtttcttcatatttcatatagtaaggtttcgtctgacggaaaaacattgcgtccggcgtatctggtctgggatttgaaaaaactgtttccgaagcttgttgttacagaagaagaggcgcttctcatgacacagagggagctgactccgggagaagggctggaatttgtgatccgcggagttcgggaccggtatctgggtgtggatgaatcctggaaagaactctatacctggtatcggcagaatgaagggcagaaagtggacagaattctggatgcaggatttttcaaaaagaaaccggatgcgcttacaggagaagaagcagcagaattatacggggagaaaaagcagttcagtgttacaaggatggagcggttctcggcctgtgcctatgcgcattttctgacttatggactgcatctttcggatcgggagcgatatgagtttgaggcgatggatctgggaaatattgcccatcagtccatggagcggtttgcaagaaaggcgcaggaaaagcggatgccgtggccgaaactggaagaggtgcagagagatgccatgatcgaggagagtgtggaggaaagtatcaaagactacggaaatacggtactctacagtactgcccgcaatgagtatatgatcgtgcgcatcaaacagctgatccgtcgttcggtgtgggcgctgaccaggcagatggaaaaaggggattttgaaccgagcggatatgaaatgaatttcggaagcggaaagatcgaccggatcgatacctgcgaggatgaagatgtggtttacgtgaaagtgacagactacaagaccggaatgaagagttttgatattgtggcattgtatcacgggctgcagatgcagcttccggtgtatctgaatgcggcactggagctggaagaacgacgtgcgccggggaaaacagtagagcctgccggtatcttttattatcggatcaaagacccgatcgtggacagagaaaaagatgatcatgcactggaggagaagattttaaaagagctcaggctggatggaatgatcaatgcgaaggaagaggtgatcgagcatctggagcatcagctttcggggacatcggttctcaacccgatcgggaaaaataaggacggaagtctcaacagatattccaaagtactgcctccggaggcgtttgctgccatgctttcctatacaaagaaaaaagaagctcaggtgaagcggcagatctatgcaggagaagtacaggcaaatccatatgagttgaatggaagtacagggtgtgactactgtgcataccgggatatctgcgggtttgatccaaggctggacggttatgcgtaccggagcctggaaaagtactcgaaagaagaagtcatccgccggatggaagaagaaatcgaaaacagggaggaaccgtcatgagtgtacagtggacagaagatcagaaaaaggtcattgaattaagaaacaggaatattctggtctccgcagcggccggttccggaaaaacggcggttctggtagagcggatcattcagagactgttggatgagagggatccgctggatgtagacaggctcttgatcgtgacatttaccgaagcggcagcagcggaaatgaaagagcgaatccgggatgccattgaaaatgccctggaagacacaccgggaaatgtgcatttacagaggcaggcaacgctcatccacagcgcccggatcacaacaatccacagtttttgcctgtctgtgataagggagcattttcatgccattaatctggatccgggatttcggatcgcagaagaaggggagttgaaattactgcgtcaggatgttctggaggaaatgctggagtcctgctatgatgagggaacggaggcttttctggaatttgcagagaaattttctacggggagaagtgacaggcagctggaagaagtgatcctgcagttatacgaatatgcgggcagctatccacagccggaaaagtggctgaatgcgtgtgtggacaattatcaggtggaaaacgaacatttttctgacgctggatttgtacagatcctgatcgaaagtatccgtcagaacctgcagggggcaaggattctgctgaatgaggcgctgcatatctgtgaggagtctgacggaccgtatctgtatgcagaggcgttggaagcggatcttatgatgatcgagactatggaaaaggcagagacgtttgaagcattttacgggaagatcaatcagattgcatggaagcggctttctgccaaaaaggatgagacgattgatccagagaagaaagaagcagtgaagatgctgcgggaaaaagccaagaagatggtaaaagatctgcaggaaacctgtttttacgaaacgcccgaggaactggcagaagatttgcgaaatacaggaagtaccatggaagaactggtctttcttgtgacaacctttgcaaggctgtttgcagagaaaaagagaagccgcaatgtgattgattttcaggacatggagcagtttgccctgcagattctgacagaagaaaaagacggaagtctggtaccatctgctgtggcgagagaatatcaggagcagtttgaggaagtgatgatcgacgagtatcaggacagcaacctgatccaggaagcgattctgaccagtgtgtctactgtgagccgcggaagttacaatgtgtttatggtaggagatgtcaaacagagtatttaccgtttccgcctctccagaccggaactgtttatggaaaaatatgatacatacagccaggcagacagcgagaagcagcgaatcgatctggaccggaatttccgaagccgcaaggaggtgctggatgccacgaactacgtgtttgagcagattatgcacaaaagtgtgggcggtgtggagtatgatgcccgtgcggcactttatccgggagctgattatccaaagagcagggagcaaaacggagtatcggcaaatcgggcagagcttcttttagtagatgcacaggagctggaagaagaggacaatgcacgccgtctggaagcccgggcagtggcagaccgcatcaaactcttgcttttacaggggcaggtggtggataaaaagacaaaggaataccgtccggtacaatataaagatattgtgatcctgacgagaagcatcaaaggctgggcagatgtgtttgctcaggttctggcagaagaaggaatttctgcacatgtgggaagcagagaaggatattttgaaacgtatgaagtcagtgttcttctggattatctgcagattctggacaatgagcgtcaggacctgccgctggcggcagtacttacgtcaccgtttgcggggctggatgcgagagaactggcaaagataagaagtacgtatccggaactctttttctatgaagcggttcacgcctatgcgtctgatgatgaaaaggagaaggaaccaatcctgcagcaaaaactgaaaaacttcctttgccgggtgtcggaattccgggatatgcttccatatacagcgatgcatgatctgttgtgggagattatagaaaaaacggggtacggtatgtgtatttcggcgatgccgggtggtgcacagcgaatggcaaatgtacagatgctggtcgcaaaggcagcagcctatgaaggaaccagctataagggactgttcaattttgtgcggtatattgaacagctcaaaaaatataatgtggattatggagaggcgaatcttgcagatgaacaggcggatacagtccgtatcatgagtatccacaaaagcaaggggctggaatttccaatcgtgatcgtggcaggtatgggaaaacttttcaatacgcaggatgtgaagggcagtattgtaatccatccggagcttggtgtgggaatggatgtgattgatctgaaaaagagaacaaaggctccgacactgttaaaaaaagtaatccagaaacaggtggcagtggaaaacttaggggaagagatgcgggtgctctatgtggcaatgacaagagcaaaggaaaagctcattctgacgggagtgtgcaaagatgcacggacaaagctggaaacactttccacaagggaaaaaacagcatttcttccatatgaagttctttctgcgaattcgtatctggactggctgcttcctgcggcatccccggcagaaagttcgatcggaattaccgttgttgacagtctgggcgcggctcagatggagggagcctgggaagcggcggatgaactgactcgaaatgtactggaaaactgggatacaaatcagattcatgatgccggataccgggaagagctgaaaagacagttggactttgcatatccgtttgcggaagaacagcgttttcagatgaaatttacagtttcagaacttaaaaaacgggcctacatggaagaggaggcaggagaggtattatatcaggaaccggaagcagtgcctcttgttccgagatttttaggagcggaagaagcggcatccggagcagtcagaggaaccgcgtaccacaaatttctggagcttcttgattttgaaaaagaatataccagagaaagtctggaggaacatttgaaacatcttcagacagaaggaaggatcagtccggagatcgcagaggctgtaaaaacggaagatttcctgaagtttctgcaatgtgaaagcgggaaacggatgcatcaggcggcaaagaaaaaacagttgtacaaagagcagccctttgtgctgggggtggattcaggagaaatttatccggatacagaatgcagagcacagcttctggtgcagggaatcatagatgtgtattttgaagaggaagacggacttgtagtcttagactataagacagaccgggtaagaacggccgatgaacttgttcggagataccagtcacagcttacatactatgcccgcgccctgtcacagattacaggaaaggcagtcaaagaaaagatcatttattcatttgctcttggaaaggaaatcaacgtttaaatggaaagttatgtactgatttatttactggcagccaatgtggcggcatttctggtgttcgggatcgataaatggaaagcagtaaaaggcaggtggaggattccggaaaagacactgcttctttttgcggcagcgggaggctctccgggagcactggccggaatgtttgtatttcatcataagataaggaaaccgttgttttatctgggggttccactgattttactcgtgcagattggtgttgggctctggatctggcagaggtagtgacaagcagcagacacagattgttctgctgcttctttacgtttagaaaatagaaagagttctttagaaaatcttaaacaatattatattgacaatctatattatacaaaatataatataggcataagaacagtattaaagagaaaacagcataggaaggagcggttggatggtatttaatacaggagctgcgcttttagatgcgatcgtactggcggtcgtctcgcatgagagtgaaggcacgtatggctataagatcacacaggatgtgcgcagtgcaatcaatgtatcagagtctacgttgtatccggtgttgagacgattgcagaaagatgaatgtctggaagtatatgaccgtcagtacgatgggcggaaccggagatattataaagtgacagaaaagggaatggcacagttgaacctgtaccaggtagagtggaagaattattccagaaagatccaggaaatttttgagggaggagtgacgggatgaaccgagaggaatttatggcaaaactaaaagcgctgttaggggatattccggcagacgaaagagaagaagccctgcagtactatgaagactattttgatgatgcaggagcagacaacgaggcagaagtaatccgggagctggagagtccgcagcgtgtggcagctatgatcaagaatgatttaaagcatacgggaaatgacggtgagtttacagagaatggatatgagcaggagtgggcatcgaagaaagaggtgccgcaaagaaaaggttattcctaccagagtggacagacaggagagtactcttatgaggcatcgcaaggcaggaacgacaaactggtaaagatcgcactgatcgtactcattgcgttgatcggatgtccggttgtgattccggtcggtgtgggaatttttggtgtgattgccgggcttctgatcgcagcagtttgcttttttgcagcactggtgattgcatcgctggcagtcgtacttgccggatttgtagtcgcggtgacagggatcggcgtaggaatcgccattcattcagtacctgcagtacttttgatggcagggattggattgatcctgatcgcgcttggagtactggcaacattatttaccggaaagctttgcattgtaatgtatccggcgatgtttcggtttatcgtgaaactgtgccggaagccgtttcacagaaaggcggtgtctgaatagatgaaaaaaggttggaaaattctactgatcagctgtggaatctgtgcagggatcggagttgtcctgtcagtggcaggtactgttctcggaggagtacgggatcttcaggaatatggaaggcgtgggatgcagtatctggaaaacgatcactggtggtcacagaagtattcagaaccggaggagatggatgaagaactggattatatcgacgaagaagtttcaccggagatagcagaagatttggaaggaatcagcgaactggatatcgaactttcttatgtagaactgatcatggaacgatcagattccaatcagatcgaggtttcgacccgaaatatggatccgcagcttttagaggatctttcgatttacagagatgaagatactctggagattcgtgcccaggataccaggctttggaagaatatcggaaaaaacaacgcaggagagctgattattcacgttccggacaatctggaggggatttccacatccctaggaaccggtacgctgtacatgtgtgatatcaggaccggagagttggatatttccatagggaccgggacagcggatattcagggatttgaagcaggggaagtgagtgcctcagcaggaaccggatcgatctcgctgcaaggaagcgtgaacagtgatctggatctcgaatgtgggatcggaaccattgagtttcaggatagcggaaaaatgaccgattataattatagtgtcagttgtggtatgggaagcattcagattggagatgatgaatttacgaagccggcaggaaaccagaatatcaacaatcatgccggaaaagaaatggacatcgagtgtggtatgggaaccgtcaatattgcatttgcgaaaggagagtaagaatatggaaccgaaaagattatatcgttcaagagaaaacagagtattgtgtggagtgtgcggaggaatcgcggaatatttcaacgtggatccggttttgatccggcttggaatggttttgtttatctgcgccagtgttggaaccggtcttttggcatattttattgcgtcagtgatcatgccggatcagaaataggcgaatgaaatcagatatttggggcaatacttctggaaaaggaaggagatgctctgaatatgaaacagaaaaagatcactcgcgaagagattccgtcaatggaagaaaaagacaggatgaaatatgaaattgcagaagaactgggacttttggaccaggttttggaggaaggatggaaatctttgtcttcaaaggaaaccgggcgtatcggtggtctgatgaccaggagacgccggaaatctgcggaagatcctgcctgagtcagagtgtgaaaggaaaaaagagaggctttgtttttgtttgagaaagacagagtctctttttatatttttgacaaaaagtgactgtgaacagtaactttttatcaaaaatcaaagggaatatttaggaaatacgccaagttgtatttgaagaaaaattgttatatagtgagaacagtatgagattaaccatatagaacgagaattcaggcaggaggagaaaaagcaatgggaaaaagtaactttgcagagcagatcagaaacaaagagacatatattggaattgaatttggttccacaaggatcaaggcggtcctgacaggagcagaccatacaccgatcgcatcaggaagctatgactgggagaatcagtatgaggatggaatctggacctatcatctggatatgatctggagaggacttaaagagtgctatcgcagtctgagagaagaggttggttcccgttatggagtggaactggaggggacaaaagcaatcgggattagcgcgatgatgcatggctatctggcatttgatgaaaatggagaacttctggtgccatttcgtacctggagaaatacgatcacgcaaggggcagcggatgaacttaccgatgtgtttcagtacaatattccgcagcgatggagtattgcccatctgtaccaggcaatcttaaatcaggagccgcatgtttcaaaagttcgttttatcaccacgctgagcggatatcttcactggaaactgaccggagagagagtacttggaatcggagatgcggcaggaatgtttccaatcgactcttccatcagggactatcatccaaagatgctgtcacagtttgatgaattgatccgggagaatgaatatccgtggaagatagaagagatccttccgaaagtgctgtgcgcaggagaaaaggcgggaactttaacagaagctggtgcaagacttcttgatgagtccggcacattgaaagggggaatcccgatgtgtccgccggagggagatgccggaaccggaatgactgcaacgaacagtgtgacagtgcgcaccggaaatgtatctgcaggaacgtctgtgtttgccatgcttgtactggaaaacgaattgaaaggtgttcatcgtgagatcgacatggtaacaacaccggccggagatccggtcgccatggtccactgcaataactgcacatcggatctgaatgcgtgggtcggtctgtttgcagagtttctggagacgatggggatggatgtggacagaaaccaactgtacggaactctttacagaaaggcaatggagggagaggcagacggaggcggactgctttcctacggatacttatccggagaacatattacgggatttgaagagggaaggccaatgtttgtacgtacaccggattccaggtttaatctggcaaattttatgcgtgtcaatttgtatacagcacttggagcacttaaaacaggaatggacattttaaagagagaagaaggcgtacagtcagacaggatcatgggacacggaggactgtttaagacaaaaggggcaggacagcagatcatggccgatgccatggagattccggtggcagtgatggagaccgcaggagaaggcggtgcatggggaattgcgcttctggcagcctttatgcaggaaaaaaacggaagaacactggatcagtatctggcagaagcagtgtttcaagacagcgagatttccgttttgaatccagaagaggaaggtgtcgcaggttaccgaagctttatggagcgttatacgaaagggctttcgatcgaacgcgcagcagtggaaaacatgtaaatgaagaacacaatcaggtgcctggtatcgtcaaagagaataaaatactttacaaatcttcttgtttttgatacaattttacgactgggaaaaaagtacaggtgagacagatgaatgagaagatcaatatcttgaatatagaactctatcagacgagtgcaaaagcagcgatgcagaaagtggtgcagtatatggaaagtgattccattaacacagttgagatcatcacgatggacatgctgctgaaagggaaagatatgccgggctggaaagaagcagtggaatcactgaatctggtgctgccgggagagacggagattctggaggcggcaggagtcagagaaaagacgctgctgcgtgatacggcgggacaggtgtttttaaagatgtttctccgctatatacagagaaacaaaaagcgtgtatttcttgtggcacagtcagaaacagagcttttagagatggaatccgcgatccgggaacatgacagaaagctgatcctggcaggaagaggcgttctgccgccggatggtgcgggaatagagcaggtgatcaatgcggtcaatggtgctgagacagattgcattttttccctgcttccatcaccggagcaggagcttttgatacagaggaacagcgcattgttaaatgcaagagtgtggtttgggtgcgggagcgttctgaaagaaatctatatgaaaaagcagaaaaaaggaaagcttcagagatttctgcgcaggaaagtgttccgttaccaggtgggacggcagcagagaagtgaagaataaaaaagcttcggtttgtatactatgtatagccgtataaatatgaattttttgtaaaaactatgaggaaatgcataaaaaaagtggatttcctctttctttttttgatgttttgccttagtatataaaatatgggttgtgcagacaaaagtgaaagagtaaaaaaattgtgaaatatgcacatggaaacgagtagataagcggaggaaaaaggtatgatttcaaatcagatacttcaaaacacaatcgaaggattaaaaggaatttccagaattgacttttgcgttctggatacagaaggaaaggcgcttgctacgacatttgaggatacatggaattatgaaagcgcggtgttgtcttttgtagaatctccggcagacagccaggtgatccagggatgtcagttcttcaagatctttgatgagcagcagcttgagtatgttctgctggcaggcggagagagcgaagatgtctacatgctgggtaagatcgcagcgttccaggttcagagtcttctggtagcatataaggagcgttttgacaaggataatttcatcaaaaatctgcttcttgacaacctgcttcttgtagatatttataatcgcgcaaaaaaattacatattgacacagaagcaaaacgtgttatctttattattgagacatcacacgaaaaagacagtgttgctctggataatgtcagaaacctgcttggcggaaagtcgagagacttcgtgacagcagtagatgagaaaaatatcattgttgtcaaagagctggctgataaggccggaagcagagagcttgaaaagatggccaaagaaatgatggagatcctgcgggctgagtccgaggatgacaaaatccacattgcctatggaacggttgtcaacgacatcaaggaagtttccaagtcctacaaagaagcaaaactggcgttggatgtcggcaagatcttctttgatgagaaagacattgtagcatacagcacacttggaattggacgtctgatctaccagctgccgattccgctttgcaagatgtttatcaaagagatttttgaggggaaatcaccggatgaatttgatgaggagacactgactacgatcaacaagttctttgagaacagtctcaatgtatcagagacatccagacagctttatattcacagaaatacactcgtgtacagactggataagcttcagaaaagtacagggttggatctgcgtgtatttgaagatgcgatcacattcaagattgcactgatggtcgtaaaatatatgaaatacatggagacgctggaatattaagcaggcggatttacgcccgataaagtatacccatccgggcatcccgcaatgtatgcctgcggcgggcggacttcgtccgataaagtatgaataattaggaggagcatgatgattgaattaagagatgtaacgaaggagtattccaaagggaatgctgcgttaaacggtgtgtctgttaagatcgaacagggagagttcgtttttatcgtaggagacagcggttccggaaaatccacattgattcgtctgatcatgaaggaactggagcctacagaaggcacgatcattgtaaacgggcagaatttaaaacggatgaaacatcggaacattgcaaaatacagaagaggcatcggggttgtctttcaggatttccgtctgttgaaggaccggaatatttatgagaatatcgcgtttgcacttcgtgtgacagaaacaccgacaagagtaatcaagcgaaaagtgccggcagcactttctcttgtaggtctggcgcaaaaatataaagctttcccgaaggagctttccggtggagagcagcagagagtggcgattgccagagcaatcgtaaatgaacctgcaattttgttggccgacgagccgaccggtaacctggatcctaccaattcgtgggaaatcatgagtcttctcaaagaggcgaatgacagaggaacgacagtacttgttgttacacataaccaggagatcgtaaacgagatgaacgaacgagttattacgatgaaacagggcgtgatcgtgagtgatgaacaaaaaggtgggtatatagatgaggattagtacattaggatacgtaggaaaacagggagttaagaacatcgggagaaataaaatgttctctatcgcatctattgcgacaatgtcagcttgtatttttctgttcggactgttcttttctatcgtgctgaatctgcagcattttgtaaagactgcagaggaaggcgtggcgattacagtattctttgatgaggatgcaacagaaagtcagatcgaggagattggcaaggagcttcgcagcagggatgatgttctgaaagtagagtatgtttcggaagatgatgcatggaacagttttaaagaagagtactttggagacaatccggaactggcagatggatttaaggatgacaatccgcttgcaggctccagcagttatgcggtttatatgaaaccgcaggaggacaaggacagcaatatgatctccaagagcaaatcactttctgcaacacagaaggaactggtaaagtttgcggagggactggacggagtcagaaaggtcaataaatcagatgttgtggcgaatacactttccagtgtcaatgtactggttggatatgtgtcaatcgcgatcattttgatcctgtttggagtttcgatcttcctgatcagcaataccgtaaccatgggtattacggttcgtaaagaagaaattgcaattatgaaatatatcggtgcaaaggactttgtagtacgttctccatttgtgctggaaggtctgatcattggaattgtcggagcggtacttccattggcattattgtatgcactttatggaagagcagtgggatatgtgatgacaaaattccagatcctgaaaaatatcgtggaattcctgccggtaggagatgtatatcgctacctgcttccaatcggacttctgcttggagtaggaatcggatttctgggaagtttctttacagtacgcaagcatttgaaagtataggtgaacatatgaaagaacgtatgaaaaaagtgacagcattatgtctggcagcggcgctttctgtcggaacggtacttccggtacatgcggagactgtacaggatgcacagaatgcagtagatcagctgcagcagcaaaaggacagtgtgcaggcagagaagacgactgttgagacagagttgaaaaagattgcagaagagatggaaaagacacagtccaagctggatgcaaagcaggcggagatcacagaagcagaggaaaatctggtgcaggctaaagtagaagaaaatacacagtaccagagtatgaagatccgcatcaaatatatgtacgagaatggaaatatggaatttattgaagttcttgctgacagtgaaaatatcagtgattttttgaataaaacagagtatatttccaagctgtctgaatatgatagagataagttaaaagaattccagaagacagtaaaggcagtggaagagcaggaagcggcgctgcagaaagagtatgaggaattaaatacacttcagacggatcttgtgaaccagcagacacaggcgcagacattgttaaaagaaaaggatgttcagctggcagatttaagcagtcagctcggcagcaagatggagacactgcagaagctggtggaggaagagaagagacgccaggaagaagcggctgaggcagcaagacagcagcagttacagcagcaagagcagcagaatcagaataattccaataataatacaggcagtggtacaggaggcggttccacagtgacacctccgtcatccggcaatgtatccagcggaagtggttatttcacacatccgtgtccgggaatgagttaccagtccagttattttggagaaatccgtgagtttgaagtcggcggacacaaaggaaacgattatgctgcgccgaccggaacacctacatatgccgcggcagccggtcgtgtgatcatcgccggatacagcagcagcgccggtaactgggtagttatcgatcacggaaacggtctggtgacaaaatatatgcaccacagcagtatttgtgtaagtgcgggacagtatgtggaaagaggccagcagattggtgcggttggttctacaggacagtccacaggaccacatctgcatttccaggtagagttaaatagagttgcagtcagtccggatcagtatttctaaaataccgaaagttggtaacagagtatgaacagacataaaagttttataaaaggggcgctcacaggcgcccttattatgttatttgcagtaggagtctgcacaaaggtaccggagctttccggattgcttttgcaaaaggacagtgtgactgccaagcaggagcgggcagagaaaaagaccgaagcaaaatttaaaaaaattgaaaaaatgatcgatcagtattatctctacagtgatgatgtaaagcaggaggatctggaagatgcagtgtatgccggatttttgagtgcactcaatgatccgtatacggtatattacaatgaggaagagacaaaagagatcaaagagagcacctcgggagaatattcggggatcggagccgctatgatgcagaatgtacagaccggggagatcacgattacaacggtctatgaagacagtccggcagaaaaggcagggcttttagaaggagatatcctgtatcaggtcgatgaccataagatcgaagatcaggatacgtctgaggttgtatcctggattaaaggtgaagaaggaacagaggtgaaactctccgtttatcgaggagaagaccgggaagagcacacgctgacagctgtgagagaaaaaattcagtcacagacagtcgagcatgagatgaaggaagataagataggatatatttctgtgcaggggtttgaagatgtgacttacgaacagttcaagtccgcactggaagatctggaagctcaggggatggaaggacttgttatcgatcttcggaataatccgggaggaaacctggatactgttgtagagatgctgaaactgatccttccggaaggaagaatcgtttctattaaagacaaatacgggaatgaagaaacctacgactgcgatggaaagcatgaatttcagaaaccattggcagtgcttgtaaatggctacagtgccagcgcgtcagagatttttgccggtgccgtaaaagactacggaattggtacccttgtgggaaccacgacgtacggaaagggaatcgtgcaggaattatttagttttgaggatgatacgatgatcaagatcacgacggcggagtattttacaccgagtggagaaaacatccataaaaaaggaattcagccggatgtggaggtagaatatacctacgatgcggcgaatccgaccagtgacaatcagctgcagaaggcgctggatgttgtaaaaagtaaatgataacaggaaatgatgtgtctgcaaagctgaaaaagcagcaggaatgggagggcttatgcttgggggaaagagatgttatctgtgtggtggaaaactggtaaacggacggtgcgtggaatgcgggcttgataatgaaaaaaacacaaagaaagtctatcatcttaatgaaagcgtaaagatgcaggattcacagccgcgtgatgcggtgcagaagatcgggaagggtctggcgatcggaagcgtaatcctgcttgtggcagcagttggtgccgttgcactgaacagttatttcgaggaacaagagaaggggcagagtcagtcgggagaggaatatgatgaatatcagtttgcaaagagacagctttctgagacaggcgaagcatacgatgaagttcttaccggaggatattatgaggttggcgttcatattccagagggaatttatacagtagaggcgcaggatggggaaagtgcgatttatttgatcgatgatgagaatggaatttacatctggcaacagattggaaatgaccctgaaaatccgaatcaggcagctgtgatggatgatctgcgtttatacgatggagctcttttggaagtgaaaagcggggcagcacttcaattccgttcggattgtgcgcagacagaaaggcttcatggagagacaaatccactgcaggattcagtgcgagtagaagtaggacagacaatgactgcggggcgtgattttccagaggggctttataatgtgaagtctgaaccggactggaatgatcttatgatgacacttccggattcatttttatcagaatttgcagcagatgaagaacacagagtagaggtgatttcgtttgcaccaaaagaattggaactcagttatgagaatgtaccgattccaaaaggaacagaaatacagacaacaggggcggccgttacgcttgagccgagtgagaaaattggttctactgattatggagagttttataaagaatagacaaaagaaaaatgcagagtacggtcagactctgcattccaggatataatcgtccatgacatatccgtttccaatatccgctacctgtgaacgaaccgtctcaaatccaagatgatgatagaccgcaagggtattcgtattgtatttgttgcacgtaagccagatggaagagagaccgcgtttttgacagagagtttttaaatactggatcgtttttgtagagaggtgtcggtttcgcgcctctttttttaaatagagtttgcttagaaacagtgtagtttcttcttgatgaatcccgcagtacccgcaaaactctgtattgtcaaaaatctgaaaatattcatatccggtttccatctgttctttcagggcatgaaaagactgaaatttttccagcatatattctacctgctgtatgccgataatgggagtgaagtgctcatgccagataacagaagcaagattggaaatttcctgaatctgtttgtcagtatgcaccggagtaagtgaaaaattctgttccattttgaaaacctccttttctttggaaagagtgaataagctgacagaattgattataccacttgacaggagtattttgtatttgtttcttgtttataaaaagtttatagagttcataattttattagcactcaactgaaaagagtgctaattttctgttgacttttaaaacatggtgtactaaaatacttcatagacagaagaaaacccgcaggacgggtgagtttgtaaagaaagaggagtgtttagatatgggaacaaaaaaaggtaatttatctatcgacagcgagaatatatttccgatcattaaaaaatgggtatattctgaccatgatattttcattcgtgaattagtgtccaacggatgcgatgcgatcacaaaatataaaaagctggatatgatgggtgagtgtgagcttcccgatgattataaaggaaagattcaggtcattgtcaatccggaagaaaagacgctgaagttcattgacaacggtatcggtatgacagcagaagaagtggaagagtatattacacagatcgcattttccggtgccacacagtttttggagaaatataaagacaagacgacagaggatgaaatgatcggacattttggtctgggattctattctgcgtttatggtagcggacgaagtgcagattgatacgctgtcttataaagagggtgcagccgcagtacactgggtaagtgaaggcggtacagagtatgagatgcaggaaggaaaccgtacagaggttggtacagagattacattatatctgaacgaggacagtcttgcatttgcaaatgaataccgtgcaagagaagtgctggaaaaatactgctcattcatgccggtagagattttcctctccaaggccaatgcagagccggagtatgagacaatcgatgaggcagatgttctggatacggatgaagtggtagaacatattacagaagagccaaaagaaggtgaagaaggtgagccgaaacagaaagttaaaattgtaaaacgtccggtttccttaagcgatattcatccactctggacaaaaaatccgagcgactgcacaaaggatgattatatcgagttctacagaaaagtatttatggattacaaggagccactgttctggattcacctgaatatggattatccgtttaatctgaaaggaatcctgtacttcccgaagatcaatacagagtatgattccattgaaggaaagatcaaactgtataacaatcaggtatttattgcagataacatcaaagaagtgattccggaatttttgatggtattaaaaggtgtgatcgactgtccggatctgcctctgaatgtatccagaagtgcactgcagaatgatggatttgtaacaaaagttgcagactatatttctaagaaggttgcagacaaactgaacggtatgttcaaaacagacagagaaaattatgaaaaatactgggatgatatcagtccgtttatcaagtttggatgtttgaaagatgaaaaattcggagaaaaagtaaaagattcgatgttgtttaagaatcttgaccacaaatatctcactctggaagactgtatcaaggccaatggcggagaaacagcagaagagacaaaggcagaggagacaacggattcagaagagacgaaagagacaccaaagactaatattttctacgtgacgaatgaacagcagcagagtcagtacatcaatatgttcaaagagcaggggcaggatgcagtgatcctggcacataatattgattctgcattcattacctatctggagcagaagcatgacaatgtaaaattccagagaatcgatgcagatgttcatgagtctctgaaagcagaagttgcagaagaagaaaaagagacattccagaagaatgcagacagtctgacagaaatcttcagaaaagtgctgaataatgagaaactggatgtcaaagtagaaaaattaaaagatgagaatattgcttccatggccgtgttgtctgaagagtctagacgtatggaagagatgatgaagatgtatggaatgggtggtatggataccggtatgttcggcggacaggcgtccttgatcctgaatgcagatcatccactggtgcagtatgtggtagagaacaaagaaggtgagaatgtagagctgatctgtaagcagctgtatgatctggcgctgcttgcccacaaaccactgagtccacaagagatgacagcatttgtacagagaagtaatcagattatgatgcttttgacaaaataaaaaaatatagggagtccgaaaaagaaagggattagaaccatttctttttcggactcccttttatattgtttagaaagcttcgcttccctgtctttgtcccatccgatgccagttgatgaaaccgtagatgtcatttacgaaaaaggcaataaaatcactttgtaatcttaagaaaaactttcataatttttaagattaaaatgtggatctgtcttatataatgatattcgttgaactaaaattacagattacaaaatttcgaaatccagtccttttttctggaaaaacttctgtaccatgttgtcccaggcgtgttccagcgacttgtccatggagaaggatttgaaagatgtaccggtaatgcattgaagtccggtggaatcatagcggagattcaaatagagtccctggatgtcatcggcattcaggccgagtttattctgctcgataaggcgggcaatatttttcggagacagactgaatacaaaacgaaatccaagcggagtctttttccctttgatcagggagaagcagtattcccgaagctgcttccagtaagcgtattcagggagtgtgcccatttgttccagttcttcagaagcataaaagtttttttgaataaaaccgtctattttgaacgtattgaatgtcatgatctctccttcgatcagaaggaatgaatcgaaggtgtccatcagaagaagatgagacatacaggctttgacattcgtcagttttaacgcgatcataaggatgtcctcctgataaaaaatataagtattgatttctctatcataccataaaaaagagaaaaaaacacaggcaaaaatattgattgtaagaaaattgtatagtatcctattatagactgtatagtcaaaaagaaaggataacagcatgaaaaaagaagaaaagacaaaacagacttgtgaaaaaattgtacatgcagctacgatcgagtttggaagcagatcttacgatgcggtttcgctgaatgcgatatgcggtaagtatcagattgcaaaagggctgatctaccataattttaaaaataaggatgagctatatctgtactgtgtgaagaaaagcttcgaaaagttgatgagttatatggaagaagggaaagaagaggcaaaaacagcaagggaagaaatccgtatttttttggagagacgggaagtgttttttgctgaaaatccgtatgacagaaatatattttttaatgtgatgttatatccggcagagcatttaaaagaagcactttttggtgtgatggaaagatatgatgcctatataagagagcaataccggcatttgctgtccaagattcgtttaagagagggaatcagtatggaaatggcagtagaatatctgagtctgtttcagaatatgtacaatggatattaccagaataaagcaagccgtacaggagatttttcccgatttatagaagaacataatctgaagatatcagagttattggatattattttatatggaatcagtacagaagagaagggcagttaatatggaagaaatgaaatttgaagaattgacagagttgaaagaaccggagaggcttttagaatcagcgatgccgtttcagaagctgatcatgcagtatcagtgtgcactgctggaagttaagacaaaatttgaagtgttgaatcacgaattatcgatcaattctgatcagaatccaatcttatcaattgaaagcagaatcaagaaaccgattagtatcctggagaagatgaaaagaaaaaatatagagatcagtgtacaggccatagaagaaaatatctgtgatattgcaggtatccgtgtgatctgctgttttccgaaagatatctatacgcttgcggaaaaaatatgtgagcaggatgatatcagactgatcgagagaaaggactatatcaagaatccaaaaccaaacggttacagaagtctgcatctgattttggaagtaccggtattttttatgaatgagaaaaaaccgatgaaggtagaagtgcagatgcgtacgatcgcgatggatttttgggcaagtatagaacataaactgtattataagaaacagacggacggatttccggattctgtttcagaagatctgggaatctgcgcagaacagctccatacgatcgacatgaaaatgcaagagatcagcgagagaatctatcatcaggaacgttgacttttaagcatggaaaacgtattataaaataagataagatggtaagaataaggggacaaaagatacggatgaagagacagaaaaaaaagtatgtgataatcggagccggtgcagtcgcagtgcttgctgcagttaccctgatcgcggaaggaatcagctatttttccgctgaaacagtggacacgaaggagggacttgcgatcataaaagcggcagaaaaagaaaatgtaaaggatattgaaaaaaagatcaacaagctggacacgaaagacaagctggaaagtcaggaagcaagtggtgagatcaactataagagcttattttccagctcggtcgtgatgggagattcgatttctgaggcatttacagagtatgatcttttgaatgcatccagtgtggttgccaagatcggagtagaattggatgagctggatgatcagataaaaacagtggcagacattaaccctcaggttatttttctttcctatgggatgaatgacgtgattgcaacaaatggggatacggatttatttatcaaagagtataaagcagtgatcgaccagctgcgtaaaaaattgccggatacaactttgtatgtgaattctatcttcccggtcagtgcggcgaagcaggaagaaaagcctgtatttcagaagattccggagtacaatgcggcactgcagaagatgtgtgatgagaatcagattgcatttttagataatacttcgttggtttcagatacttattatgaagaggatggaattcatttcaaggcggatttttatccaatctggctcaaacgtatggcggaggtagcaactttatgacagataagataaaaaatctcaaaaaaacagtggtgatcaagtatgcactggtggcagtgatcgttgtttacgtggcactgttactgattttcaccagcggcagtacgaagagctttgctgcggtagagaaaaaagtagaggcatctctggatacgaaggctatgaaaaaagcaggagtgcaggggctgaagcgctattatgggctcaacagtgcagattatgaaggtgtaatgctctacacggcagaatccagtatgtcagcacaggagatcttactggtcaaaacaaagaccacggaacaggcagaagaggtaaaggcagctgtagaacagcgccgtgcgaacagaaggaatgactttgacggttatgcgcctgaccaggtgcagcttttggatgaagctcagatttctgtaagagggaagttcgtattttacgcagtctctccaaaagcagagacttataagtctgttttttcaaaaagtttatagaaacgcagggggaacaaaagatgctgtttagcagtataacatttttatttgtatttctgccgattgtactggcagtatattttcttgttccgtatcggttcaagaatctggtcatgctgatcgcaagccttttcttttatgcatggggagagcctgtttatgtcattttgatgattctatccatttgtctgaactatgtgtgcggtctggatattgccgaaaaggcagatgatgacagaaaaaaacgaaacagtctgatttttgcggtggttgtaaacctgctgcttcttggctttttcaaatattacggctttttgatggaatccgtaaatgcagttcttccgtttgatattccatacagagaactgccgcttccgatcgggatttctttttatacatttcaggcgctttcctacattatcgatgtatatcggggtgaggtaaagccgcagaaaaagctgatgtattttgcactttatatttctatgttcccgcagctgatcgcaggaccgatcgtgcggtatgtggatattgaggagcagttggagcacagatttatgaacctgaccaagttcggacagggagccatgtattttatgcggggacttgccaaaaaggtaattcttgcaaatacgacaggagcggtttttgagcagatcgcagcgatgcatctgggcagctattcggtgatgactgcgtggatcggatgtatttcttatgcattccagatttattttgatttcggcggatattcggatatggcgatcggtcttggaaagatgttcggatttgagtttttggagaacttccattacccgtatgtatctacgagtgtgacagaattctggagaagatggcatatatctctgagcacttggttccgtgagtatgtgtatattccactgggaggaaaccgcaaaggagattccagaacgatcaccaatcttctgatcgtctggatgctgaccggattctggcatggtgcggcatggaattttgtcgcatggggactgtattatggaattatattgattctggaaaaatttgtatggggacaatatgtggaaaagtggccgggtgcagtacggcatatttatgcgatggtgctgatactgatcggatgggtactgttctttagcccgtcacttggttatgccctgaagtatgtaggtgtgatgtttggaatcggtgccagcgggcttatggacaagctgggctggttttatctgctctccaactggctgatctatctgatggcagtgctgggatcctcctccattggatacagactgatgagaaatattcagagggctcctggaagcagagttggaaaatatataatgacaggtgtgatgtatctggtcatgtttgcactttcgctggcatttctggtgacacagtcatttaatccgtttttatattttagattttaggtgagcatatgtcagaaagaagaaaaacaaggaaaagaaaaagaatcgaatatatgatcggaatcggattccttatctgtgtattcgggatcgggatcatcaatctgctccttccgtcaaaaaaaatctcagaagaggaaaaccgcggattgcagcaaaagccggagctttcagtcagcgcggttacttccgggagctatatggatcagtatgagaagtatcaggccgatcagtttatgggaagaaatatgtggcgcagtctgaaagtcggattcagcagactggcaggaagtaaagaggaaaatggtgtttttatcgggaaaaaaggacagcttttggaagacattgcagttcccgatcaggatgtattgaaagcaaatatgaaagccatccagagttttagtcagaaatattctgatattccggtgaatatgctgttagttccggatgcggcgaatattttaagcgacaggcttccgtttaccgctacagttgccgatcagagccagtatatcgcacaggtgaaaaaagaactgggggacagtgtacagtggatcgatgcggtaaagccattgaccagacacagtgatgagaagatttattataaaacagaccatcactggacggcaaaaggggcatattacgtttttcaggaagcagccaggacattgaacctggaagaacaggagacagaatatgcttcttatccgatcacaacggattttaatggttcattggcatctaagagcggatgccgtctgaatgagaaagagcagattgatatttatgtaccaaagacagaagacaatgatgttgtcgtcaactatgtggatgagcagaagaaaacagcgtctttgtatgattcatcgaaattaaacagcagagataaatatgcagtgtacctgggaggcaacttttctgtagtggatatccgcacggtatcggagagcaatcgaagacttttactgatcaaagattcttatgcgaattcatttgttccgtttcttacaccgtatttccgggagatcgtgatggtagatccgaggtattattccggtacgatcggggatattatggatacgtatgaaattacagatacattgtttttatacagtgccaacatatttctacaggacaataatataagcggggtattgagcagtgaataatcggattttgcaggaatatcaaaagacgaaggaagaggttcgcctgaataaatatttaagcgaagcgggggtatgttcccgcagagaagcggacaggctgatcgagagcggccgggtgagtgtggacggaaagcgtgcacagaccggaatgaagattgttccggggcaggtcgtaaaagtcggaaagaaagtagtttcaaagcaggatgagatggtcgtgctggcagtgaacaaaccggcgggaatcgtctgtacagaagagcgcagggaaagaaacagtattgtgcgttttctggattacccgatccggatcacgtatgtagggcgtctggataaggactctaaaggactgcttctgatgaccaacaacggtgatatcatcaataagatgatgcgtgcgggaaaccagcatgagaaagaatataaggtgacggtggataaagaaatcacgcaggagtttctggaaaaaatggcatccggtgtaccgattttagatacggtgacacgtccgtgtaaagtagaaaaaatcggaaaatatacattttcgatcattttgacacaggggctgaaccgccagatacgcagaatgtgtgaggcacttggatatcaggtgagagagctgatccgggtgaggatcatgaatatccatctggggcgtctgaaagagggagaataccggaagctgacagatgcagaattgaatgaattgtatgatcagattaaggattcttccaatgaaactgtgatataaaaagtaaagggactctaaatatggaagcaaaaaagaaaagaatgcaggaactcgtagaacttctgaaccgtgccagacgtgcatatgagcaggaagacacggagatcatgagcaactatgagtatgacagattatatgacgaactggaaggactggagcgggagctggggacgactcttgcatccagtcctacggttaatgtgggatatgaggtgctcagtgagctgccgaaggagcggcatgaaaaaccgatgctctcactggataagacaaaagacgtggaacagctgaaatcatttttaggagagcaaaaggccgtgatctcctggaagatggacggactgacgatcgttctgacatatcagaacgggcggcttcaaaaagcggtcacaagaggaaatggagaggtgggagaagtcatcaccaacaatgcgaaggtatttcgcaatcttcctcttcagatcccgtatcagggagaactgatcctgcgtggggaagccgtgattggatataaggattttgagcgtatcaacgagcagatcgaggatgtagatgcaagatataagaatccgaggaatctgtgcagtggttcggtgcgtcagctgaacaatgagatcacagcgagaagaaatgtgaagttttttgcatttacactggtaaaagcagatggtgcagagtttgaaaattcgagaatgcagcagttaagctggctggaaaaacaaggatttgaggtggtcgagcatcatctggctgaccgtgcatccatcgaagaggaagttgcatggttttcggagcagattgtgcacaatgatttcccgtctgacggactggtattggtatatgatgatattgcctatggtcagtctcttggaacaacggctaaattcccgcgggattcctatgcctttaaatgggcggatgagatcagagagacgacacttctggagattgagtggagtccgtcaaggacaggcctgatcaatccggtagcgatctttgaaccggtagagctggaaggaactacggtaagccgtgccagtgtgcataatatcagcattatggaagatctggagcttggcgtaggagatgtcattcaggtgtataaagccaacatgatcattccgcagattgcagaaaatctgaccagaagcggtgtaaaagatatcccgcaagtctgtccggtctgtggcggtgcgacaaagataaagatggaaaatgagacaaagacattgtactgtacgaatccggagtgtcaggcaaagcatttgaaatcttttgcattgtttgtcagcagggatgccatgaatattgaagggctctcggaggcaactctggaaaagttcattggagaaggatttatccgggattttacagatatttatcatctggacagatatgaagaaaccatcaaaacactggaggggttcggagaaaaatcctatgcaaaactgatcacaagtgtggaaaactccagaagtacgactatgccgaaagtaatctacagccttggaatcgcaaatatcggactttccaatgcaaaaatgatctgccgggcatttgacaatgatccccagaggatgatgcaggcaaccgtggaagaactggtcgatatccagggagtaggcgaagtgatcgccagaacgtttgtggattatttttcagatgaaacacacagagatcttttcaaacgcctcttacaggaggttaagctccagaaagaagaaggagaggaaagcgcacagatttttgaaaatatgaattttgtgattacaggaagcgtagaacactttgcaaaccgccgggaagtgaaagaaatcattgaatccagagggggtaaagtgacaggaagcgtgaccggaaagacgaattatctgatcaataatgatgtgcagtctgcttcttccaagaataaaaaggcgaaagaactgaacgttccgattatttctgaatcacagtttctggaaatgctggaaacagggacggtttagaaaaagttaatttgtaactgccggtattctgtattataatgtggacataccctcggtgaatgtacaaagggcaagtaactggaaagaagggaaagaacatgtcagataacgattttattatcatagatgaagaaaaggagactccggtcaccacagaaggaaaagagtcttccgatacagagaaaaaggaagtctttcagacttccgcaaaagaggaacacgaggatgagtatgagaagatctgctttatctgccatcgtccggagagcgtgacaggaaagatgatcgatctgccgaaccatattacggtgtgtccggattgtatgcagaaaagttttgatgccatgacaaacggctcgattgattacagcagactgatgaatatgccgggtgtacagttcttaaatctgtcagatctggagaatatggctccgccaaagacacagaagatcaaaaagaaaaaagaaaagccaaaagagttccaaaaactggatattaagaatattccggcgccgcacaagatcaaaggaaagctggatgagtatgtggtaggacaggagtatgccaagaaagcgatggctgttgctgtttacaaccactataagagggtagcgacagattcggtcgatgatattgagattgaaaagtccaatatgctgatgatcggaccgacaggaagtggtaagacataccttgtaaagacacttgcgagactgttggatgtaccgcttgcgatcacagatgccacttccctgaccgaggctggttatatcggggatgacattgagagcgtcgtatctaaattactggcagcagcagataatgatgtagagaaagccgagcagggaatcatctttatcgatgagattgacaagatcgcgaagaagagaaattccagccagagagatgtaagcggagaatccgtacagcagggactcttaaagctgttggaaggcagtgaggtagaggttccggtaggagccaacagcaagaatgccatggttcctctgacgacagtaaatacgaagaatattctgtttatctgcgggggtgcattcccggatctggaaggcatcatcaaggaacggctgatgcataagacatccatgggatttaatgcagagctaaaagatcagtatgacaatgacaaggatatcctgtctaaagtaacggtggaagatttgcgcaatttcggtatgattccggaatttatcggacgtcttccgatcatctttacactgaaaggtctggacaaggatatgtatgtaaagatcttaaaagaaccaaagaatgccatcttaaagcagtatcagaagctgcttgcactggatgaagtcaagctggattttgatgatggagcgctggaggcgattgcggagaaggcaatgaagaaagagaccggagcaagagcactgcgggcgattatcgaagagtttatgctggatatcatgtatgagattccaaaggatgagaacatcggagaggtgacgatcacaagatcttacatagaaggaaccggcggtcctctgatcagtcttcggggacaggaagtgccgagattgccgtaggaaaagaaagagtatgagagagtctggaaacagactctcttttattgcggatttgtgcagaattatggtaaaaattatgtaaaaacgtcataaaatgtggaaaatgtattgaaaaaaggcatttaaaggtgtatccttatagatgtttgacaaaaagggggcacattatggactacaagtatttactagatctcgcaattattttactttgtacaaaagcgctggggcttttgacaagaagggtacagatgccgcaggtcgttggcgcgcttctggccggattactgttgggacctgccggagtcggcattctgacagagacatcatttctgcagtctgtagcggagattggtgtgatcgttctgatgttctgtgcaggtatggagacagatatcaaagaactgaaagcatgcggaaaggcatcctttatcattgcactttgtggagtactggtaccgcttgcgggtggatttgctacggcatatttcttcaatcggccggggatgatcgagtcagatgcatcagcaagtattttcctgcagaatatttttatcggagtaattctgacagcaacttcagtcagtattacggtggagacattaaaagagcttggaaagctcaaaacccgttccggcaatgcaatcctgggagcagcgatcattgatgatattctgggaattgtggcgttgacaatcgtgacaagcatttcagatccaagcgtgaaaattggaatggtcatgctgaagagtgttgggttctttgtatttgcagcagttgtaggattcatcttctacaaattgtacaagaactgggtggacaaagccaataaggagaaacatcgacacacgatcgtggcatttgtgttctgtcttctgatggcatacattgcagaggatatttttggagtggcagatattacgggtgcgtttattgccggtctgatcatttcaaacgtacagcgttctacttatctggagacaaaatttgatacactgtcttatctgcttttatcgccggtattttttgcaagtatcgggctgaaagtagagctgccgaagatgtctgcggcgatcgttggatttgcagtagcattgacgattgttgcagtattgacgaaggtcgttggatgtggatttggtgcaaagatctgtcattacaagaattatcaggcaaaacgaatcggaattggtatgatctcgcgtggagaagtagcgttgatcgtagccagcaagggcgcagcactggggctgttaggttctgcatttttaggtccgatcattattgttgtcgtgatcacgacaattattacaccagtctttttgaaggtggtatttgcaccgggcacggctccggtaccggaacagatcgtaccggaatcagagcgtgtaaagacaatttacgaatccaaaaagagagaatgattttttcagggacgcgagaaggcgtccctttttgttataactgacgcatggcttcgaatgtattgtaaaggtttaactggccgtatccccactctcggttcggatatttcatatccgggtttctggtggcgcctaacgtcagcagacttttgatcaaagcggtactcacggatgggatctttttctgctgaaggtgccattccacaagcaaagcggctgcgcctgcagtgatgccgaccgaggtactggaaccgctcctgctctcaaactgtccgccgggaagagcaccggtaatgctgattcccggggctgtaaaatccggtttgacctgctccgtacgagtaaaccctcttccggaggaaagtgcaagaccgttgttggaagaatcgtaataggagacggagatcggctgtacggaatcagaaggggcagtcagtgtatagtatggattggagtttaaaaaataaacttctccgcttaaaaattcccgcacaggaagccagatgtggaatcgcccgtcaataatctggacgggttctaccacaagcttccagattccgggagcagcatcggaaaaacgaaaatgaatcagttccgaggctgtactttctacaaacagacggtagtcgatgtagactgttgtattttcaaaaagaaaattgaaagttgtgcttgttcccgcacgaatgggaatgcgggacgtactctccccagacggagaggtcaggctgatggagaggatattggggagttcggtccatagctccatcacaaaaccgctagtattttctccgacacggatttctacggtctttgtatcagaagtattcatgatctcgctgtaaaagtgatgtctctgatctgcttcatttccgaccccgataacaggaatccgattagacaacaaggtatactgctgggcaatgatcgagagtgggagagagccggagtgtccgcccagattgctgccaagtgccaggcagaagatcagaggaagtcccagtttttcggcaagcaggtggagatagcgcataccaagcatgatatcattttcctgaaaagcaggggctgtattgggaataaaatagtagtctctcagatattgttttgcctgctttaactttacaacggcaattacagattccggcgcagcaccgataaactgcgcatcgggatctccggaaccggcagcgatacttgcgagaaatgttccgtgtccattattgtccacacttgggacaagggaatacggatcttccgaggcaagcgcttcattgatcatatcgggtgtataatgagagccatagtcaaaggattccggaggggtgccgctttggatcgtctgatcccagatgcctgcgattcgagtggttttatccagatgttgaaataccggattttgatagtcgattccggtatccagaaatccgatcataacctgttttccgcttaattgaatggtggagtggttctggatcggaaggattccggcctgatttagcgcctgcatactgagcagggagtagcatttcggaatcgaaaaataagaatagttttccagcgatacaggttttattacagattttgaaaggtaagcacattgataaaaaaagccggggttttgaagacagcagtctttttcaagcatatcttgaagaaagggcattcggatgtcggagacaataaaatcatgataatcttcagaaagaattttttcccggcataagtcagagtatggcatgaaatgatctcctggatgtttttgaaagtatatgccgaaagcttcaaaataagaagcggaaagaagaaaacagaagaaatctggttgaagttatgaacgtttggggtataatgtatatatgcacgagaaattctgttgaaaataacagatatgtgacagaaaggagaagaaagatgaaatctttttttgaagacttaggtaaaaaaatcggtgagacaacagaaactgtgacaagtaaagcaggcgagatgatggaaatacagcgattgagaggacagatccgaactctggagcgcggcaatgaggcggatatgctggagatggggcgctttctgtacgagaagtaccaggcgggagaggcgatggacgaacaggtacagatgctgtgtgaaaaaatcgataacagaacagaaagtatcgagagacatcaggcaaagatcgaggagatcaaaggaacgagtacttgtgcagaatgtggaaaacaggtagcaaaagagatggcatactgtccgtactgcggagcgaaaaaagaagaagacatttgggatgaaacggaggatgtgctcagggaaaaggccgatcaggcggttgaatttgtaaaagaaaaaacaacacaggcaatggatacagttgcagagaagacagaagatgcagcagaggtagttgtggaaaaaacagaggacgcagcagaggctgcctgtgagcatgtcaaagacctttcagaggcagtgaaggaaaaagcagaggacgcagcagaaaaaattaaagaatttacagaagaatagaggcagaatatgaaaaatctgtttggagcaggggcaacggcatttctgacgtgtctggatatggcagtcaaatcagaagtggaaaagtggccggacgaggaagaaaaaccgtttgcggacagcaaaaagatcgtccttagaaaagtgcataataaggggatgtgtatgagtcttttgaaagagtatcctcagtttgtaaagtacacatctcttgttatggctgcaattctgaccgtctgggatatcttgtgtctgcgaaaaaaaggcagttatttgaaaaaagcagggctttcacttggtgtggcaggtgcgtggagcaacacactggatcgctggatgcggggatatgtggtggattatatcgggtttcagacatctgacgagaagctgacaaagatcacatacaatctgggagatttttttcttgcggcaggaagtattctgattttactcagtgaatttttgcataatttcaggaaaggaagtgagtaaaatgatccaggacatagcaccgcatcagtttaagaacgaatacaggccggtttcgccgcaaaaggacagcattgcattgtattatgaagaacacacagcattgatgaggcggacacagacgggaatagagtttccaacatttggagaactggaacggttgaacgaagagatttatgagaacagtatttatctgtttacaattgatgagaagcagtattatctggttgataatctgaaccgggagccgcactctgagtttacaatggagaatacggagattttcaggacagcagatcctcagtacagcgcatttgcggggatcacgggatatcagctgtatcgatggtatcagacacgcagatattgtggacgctgtggacataagatgcgtcatgatacaaaagagaggatgcttttctgtgaacactgcagaaatatggaatttccgaagatctgtccggctgtcattgttggagtgacagacggtaaccggatcctgatgtccaagtatgcagggcgaagttataaaaaatatgcacttcttgccggatttacagaaatcggagaaaccgtggaagaaacagtggcgcgagaagtgatggaagaagtcggattgaaggtaaagaatatccgatactataaaagtcagccatgggcatttagtgataccctgttgatgggattttactgtgatctggacggtgacgcagaagtgacactggatgaagaggaactggcactggcggaatggtttgaaagagacgagattccggtagagccgtccagagacagtttaaccaatgaaatgatcataaaatttaaacaaggtgaagtttaggaggtagcacaatgagagcagaatttgatgaaagtctggtaacaggaaacgaaatgattgattcccagcacaaggaactgattgataagattaacaaattactggacagctgtgagacaagtaaagataaggtggtgtctgtaaaaacactggattatctcgcagattacacagaattccattttggagaagaagaaaaactgcaggaagagattacatatccgggtgtggaaaagcacaaagaagagcatgaaaaattaagacaggtcgtaagagatctctacaatatgctggaagaggaagaagggccgtctgctgcatttgtagaagcagtgaataaaaatgtggtggaatggctgtacaaccacattaagacatttgaccgttctgttgcagaatacaaatttatgcatgaaaacggtgagagattgtaagaaaaagattgcggataaaaagtggcacagcgggaaacatcccgtctgtgccttttgtctggatattcttttttatcatttcatttccgcatacagtttgaccagttcgatcatcacctctacggatttatccatgccctcagcggtaatgtgctcaaatggtccgtgatatccatgtccaccggttccaaggtttggacaaggcagccccataaagcttaagcgagcgccatctgtaccgccgcggatcggaaggatcagaggtgtgacatctgctgcaaggcaggcttttttcgcattttcgatcagatgcatgtttccatcttttatgatctctgccatattgcggtactgttcatcaatggtcagttttacggtgcccaatccccatttcagattcatctgtttggaaatttcttttaaggtttccagacgtgcggcaaacttgtcggtatcgtgatctcggacaatgtaatgcagttttgcgcaggctacatcgccggacatgcttacaagatgatagaatccctcatagtcctcggtatccgctggagtttctccctcagggagggcagcgttgatctccattgccaccagggcggcattgaccatcacatcttttgcagatcccgggtgtacattcacgcctttgatctcaaagatcgcatctgcggcattgaagttctcatactgaatctcaccttcggtgtctccgtccatggtgtaggcaaaatccgcatcaaatttttcgacatcaaaatgatccgctcctctgccaacttcctcatccggagtaaatccgatcgaaatctgaccatgtgggatattttcagtcaaaacccgttctgccatggtcatgatctctgcaactccggccttgtcgtctgcaccgaggatggtatctccgttgctggtgatcaaagtacgacctttgagatcctttaaatgcgggaacatggagacagaaagaacccgtccgtcagaaccgccaagaggaaggtcgcgtccgtcatagttttcagttacaaccggaacgatcttcttgtcacagaagtcagaaacagtatccagatgtgcaataaatccgatcttcggacaattttcatatcccggcgtggcaggaatctgtgcgtagacatagcatttttcatccgtccgtgcctttggtagtcccaaattgatgaactcccggatcagatcctgtgccaggtcaaactggcaggcagaagacggtacggtagtgcttgtctcatcacttggggtgcgtacagttacgtattttaaaagtcgttcataagctctcataaataaatctctcctgttttgttataatgatctgtgtttattataattcctgagaggaagaaagaaaaggcagaaatggaaaaaaatcagaaaagtaacttgacaatcaaagctgggaaattctataatgaacgttgttcagaatggaggtgcagatttgaatatggcagttacatcaagagaggaaatacttgcagtgtgcagagagattgtggcagaagaagggctttcgtccgtaaacatgaggcttgtggcttcccggtgcaacattgcattaggatccgtgtataattattttccatccaaatcggaacttttacttgcgacgattgaaagtgtatggatggatatctttcatatgaatggacaggtacttgtatttgaaagctttacagcatgtattgcctggttgtttgatacggtgtataaaagcagtcagaagtatccggagttttttaatctgcattccatgagttttgcagcaaaagataaaaatgagggaaggaaaatgatggagatttccctgatgcatttgaagaaaaatctggttcagatattgacagaggaccagaatgtgcgtgagaatgcatttgaaaatgagctgactccggaaatttttgtggagtatgtgtttacacttctgatgtccattcttctggaaaagcagaaaagctgcgaaccacttttaacgatgatcgcacacagtatctatgaatcccacttttaaaaagtgggaaattttaaacataaatatgaacaatgttcatattggagaggagaacaaaatgaaagtaaaaaaaaagaacattactgctactggccagcattgtctggctgattgcggggttcaatattattcgaattggaatactcagctatacggggcatgtgacagttgtgaatattttgctctcagcgctggtttttgctgtattctggtcgatggtattttataaactggtgatcagacataccgacagaattcaaaactacgaggatgagcttcagtttttctggcatttttttgataagaagtcatttttgatcatggcatttatgatgacttttggaatcggtcttcgagcctcccatttcgcaccggatgtgttcatcgctgtgttttattcaggattgggaatggcattgtttctggcaggagttctgtttggagttcattattttcagcaggaaagaaaagtaagcagatagaaaaggtgcaagtatctgtctgtttacgattttacgtaaattaaaattggtgttagaatatccctatggtaaagttctgagcaattgttaaactgtcaagggtcgttaatagttgctatagcttttatttttttaattttacagaaagcctaataccgcctaaaccaacgaataaatcattcgtagcatgagtcatcctccttcgttttggttccgttaaactatgagatggggtagttccctttttcaaggaatctaattttgtgattatttcacaattgaaatgtaaacgttttcccatataataagtgtatcgaattcttccggaggaattttagatatggaacatatagacattaaatttatcgcgaaaaaaagcggttgttcgattgctacggtttctcgtgtgatcaatcgttccaaaccagtcagcgaggagttacagaaaagagtaatagatacgatcagaaagtataattataatccaagcatttacgcacagaatctggcgggtaaaaagtcaaaattacttggttttatcatgaccaactacatcaatcagtatcagcttctgctgtttcgttatctgaacgagtttgcctgcaagatggggtatggttgtattattcgttattgtaattctgaatttgaggaaaaactagaggtattaagagaactggaaattaggggaatcgaagtctgctttagcctttttctgctttcgccgaaagaggaagcgtatataaaagaacatttcagaattaaagtctgccacatgcagtcaccggaaatgcacttgaatatcatagaaaaaaacgaaagttctgtttatgaggctgtgtgctatcttgctcagcttggtcacaaacgaattggaggcatcttttgtattgacgaaatagaggacagtttcctcttggcaaggaaaagaggctttataaaagctgtaagtcagataaatctcgatcaagatgaatctctgattggccagcttcatggagaatgtgaaaaagacagtgtgatttcagtgatagaaaagatatttgtacctcaaaatccgccaacggcattgttttgttacagcgatgaagttgcaatcgaggtcatgtcctggatcatgaagcaggggtatagaattccagaggatatatctgtgctttcatttgacggtattccgtttgcgggacgcgtaacgccatctctgtctacaattagccagccagtagaatatcaggcaaaatgcattataaaaggcatgttgtatctacaggatggaatagagagaccatgtgatgaaaaggaaaatgaatatcttctgcagattcgggacagtgtggggattcctggtcattaaaaaaattggaggaagaatatgaaagcgaaaaagttaattgccactggtcttgtggcatcaatgttaatgctggcgcttactggatgtggcgcaggcggaaatagcggtgaatccgcaaaagatacagataaaggatcagtatattttctgaactttaaatctgaactttcttctgaatgggaagaagtagccggaacctttaccaaggaaaccggaattgatatgaaagtagttactgcgggaagcggaacctatgaacagacattaaaatctgagctttcaaaaaaagaaatgccgacactttttaacattaacggtccaatcgggtatcagacatggaaaaactattgtgcggatctgaaagattcccaaatttatgagtggcttgctgacaaagatatggcaattacagatggcgatggtgtgtatggtattccgtatgcagtagaaggctatggaattatctataatgacgctattatgaagaaatattttgcacttccggataaagcagttgatatttcagatacaaaagagattaaaaatttcgacacgcttaaaacagtggtggaagatatgacaaaacataaaaatgatcttggaattcagggagttttcggttcaacttcatttgctccaggcgaagattggcgctggcagactcatcttatgaatcttcctgtgtactatgaatataaggctgacggagtggataatctggatgcgatcgaattcaaatataataaaaactttaaaaatatttttgatctctatctgaataattcatgtacagaaccatctatggttggatctaaaaatgtcgaggaatctatggcagaatttgcaatgggaaatgtagctatgatccagaatggaaactggggctgggcaatgatctatgacctggatggaaacgtggtaaaagaggaagatattaagttccttccaatttatacaggagtagaaggagaagaaaaccagggactttgtgtcggaacagaaaactatatctgtatcaacaataaggtttctgaagctgaccagaaagcatctgaagagttcctggaatggctgtttaacagcgagagtggaaaagcttactgcaatggaatccttggaatgattccgccattctcaacatttgatgaggatgaaagaccagataatccgctcgtacaggatatgcttagttatatgaacgatgattctttatattctattacatgggactttacaaccttcccgagccaggaatttaaaaaccagcttggaagttatcttcttgagtatgcgcagggaaatatgacatgggatgatgtagttgagcagacaactgattgctgggcatcagaaaaagccctgcttgcacaatagtagaaatttagttcctgtttataggctggcgttttccgaactgaaatgccgcatgatacagtgaatgtagcagatttcgccgatgtggaatgcaaagcatcggcaaaatccgttgctgtttgcgcaatgcgtgaatagcaacaaatttatggggcagagacaaaaatgtttctgccctgtgtacgaaaagggaggctgtttagaagatggaaaaagcttttaaaaagagatttgtgatattagtgttaccaacgctgatcgcatttattattgcatttattattccatttgtactgggaatttatctttctttcacaaaatttacaacagttacagatgcccagtggattgggctgagcaattatattgtggcatttcgggataaaggtttccttgcatcgctcctgtttactgttaaatttgtacttgttaatcttgtgacgattaacttaattgcctttatgcttgcatacgtgttgtcaagaaagttccgtggaacaaatattttccgaacagttatatttatgccaaaccttctgggcggaattgtgcttggttatatttggcagctgatcattaatgggattctttcttttttcagaacaacgcttactgcagatgcggcatatggattctggggaatggtgcttgctatgaactggcagttgattggatatatgatggttatttacattgcagctatccaaaatatttcagaggaaataaaagaagcagcacttattgatggtgtaacgcggggacagatggttagaaagattattttgcccctgatcatgcctgcaattacaatctgcttatttatgacaacaacaaatgcatttaaaatgtttgacttaaaccttgccctgaccgcgggacttccgggaaaatccacttctctggttgcactggatatttataattcattctacaacagaatgggttatgagggagtcggacaggccaaagcagtgatgtttttcttaatcgttgctgcaatttcagtgacgcagcttattattactcggcgtaaggaggttgaaaactaatgaaaaataaaaagggtgaaagcatacagataataattcttactgtaatctcggttttatttatcgctccgattgtgattgtgtttatgaattcatttaagagcaaactgttcattaacagtacgccgtttgcgttccctaatgccgactcttttgtaggtctggcaaattatggagaaggaatgattaagaccggatttctgcaggcattttttattactttatttataactgtagcctccgtgtttcttattgttatgctgacttctatgacagcatggtatctggtccgtgtaaaaagccgttttacaaaagtaatgtactatctgtttgcttttgccatgatcgtaccattccagatggtaatgtttacgcttgttaaagtatcaaatatgtttaatctggacaatctgatcggtatcatatttatttatgtcggatttggtgctggattgtctgtatttatgtttactggttttattaaatcaattccagtttctctggaagaggcagcgatgattgatggatgttctattatgcaaatttactttaaagttgtatttcctgtgatacgtccgattattatgacagttgcaattttgaatgccatgtggatctggaatgactatctgcttccatatcttgtaattggttctgaatataaaacaatctctgtggcaatccaatatctcagaggtggatatggctcgattgaccttggacttatgatgtccatgctggtactggcaatcataccaattgtaattttctatatgatttgccagaaatggatcatacagggagtaatcgctggagcagtaaaaggataaggagactaaaatgaaaaaagtattatacgaggaattacttccagaagaatgtgtgcagagaatacaggagatgccggttgcttatcttccgcttggaacattggaatggcatggtccacatatgcctcttggggctgacggaatccagtcaaaagaattgtttgtgcgagtggcagaaaaagtaggcggtgtagtacttccgatgttgtttatgggacctgatcgtgtgtttcacgacaggggaactgcgttttatggaatggatattaataccgaaggggcactgaatacatattgcgtccagcagatgaaaggcagtgcctattggatggaaaaagctctgtttcaggacaatctgcgcagtatctttgcccaactgttcagagcaggcatacgtatcgtagtcggacatggacatgggccatcaacaaatgtatttcaggaactaaaggaagaagcagaagaaaaatatggtctgcacattttgactgcttggacatttgcagaagacgatcggttgaaatatcagaatgaccatgccggagcgaatgaaacctctatcgtaatggctgtacgtccagagctggtagattttggacaggtgaaagaagatgaaagtaatttgataggaatcgcaggacgtcatccggtcagagaatcatctgcagcatacggaaatgagatccttgagtatacaatgaaaacactcatttcaggtattgaaaaggagtacaaaatactcaaagaaagctagatagatgcaaatgattttgaactgtcttatgaaaaagaatcctgcgagaaggattttccgcctgcggcgggtcgcttctgcgacatacttcttatccaccgtagtgctatcctcgcggaacacttaggaatttatgaaaacaagaatttttgagtgacgcctttaaacggaaacaagaaaatagcgaccacatagagtacaaaatgctctggtgtggtcgctattttttgtctatattatgctaagtattataacagttcagtttttggcattcacaatattttcctttaaaatagatgatcattttatgttcggcagacagatctccgaagtgttctggaggaaagactgcaaattacgcttaaacggaatgccagttccgctaccacggaacggctattccatttttaacggtacaaagtaccgttaaattacatcattctgtttcacgcatatttataccgttcatctccagacgatacgtatggtgcttatcggtgatacgtgtaaggcacgcatcagcgtaggtgttatcggcaaacatatcgaaccatgtactgactggaaattgtgagataactacagttgatttccttccatccctggtatcaaggacttcaaagagatcccggcatttatcgagatcgagatccataagaccgaaatcatcgatcacaagcagatccagtttggtcagtttattcagggaatccagatttgtggatttgatacgtgcctgttccatttcgctcataagggtgttcgcttttatatactttacgctcttagactgcttcattgcagttacgcaaaaagcattgatcagataagtttttctactggcaagaacctgttacaatgagattttttcctctatccaatgacaggtactcagtcgttctattgtctgggtatcaagctggcgttctggacggtaaatggtttcatcaagatctgccgccgggtatcgcagatgcgcttctttcatcagacgattaaagcgtttatctgcccgtgcctgccactctgcatcaaccattgctgtcatgcgttccataaaagtgttcagatctgcattggggtcttttaactgttcttccaggatatgtgccatttctggaacacggaaacttttcagacgcgtgatcagatcctgttcctgagctgttaatgtaatgtcttgggctgaactcatttgtatgcctccttcccacggatgtttgtatgggaaggaagttttccggttccgtttataccgttgccggaatgattatcctggaccatgccaagtactttcttgaaataagaatacttgcaggcattggcttctacgcatttctcagcagcctcctgaaccagcctgtgaggaatcaagtatattcataacctgctttatcctgcattagaaatggctgttgatgatgatattatccgaaagaaccctgcaaagagttccattagcgattatggaaaaccagcagaggaaaaagaagccttaactgtttctcaacaagaaaagtttatggagtttgtaaaacagagcaatgtctataacacatattatcccatgtttaccataatgattggtacggggttaaggtgtggggagttgattggtcttacatggaaagatataaacatcaaggcaaaaacggttaatgtagaccaccagctcatatataagaatttaggcgatggttgcaagttccatatctcaacaccaaaaacggagtcgggtattcgtattatacctatgacacaagaagttgcaaaagcctttgaggaacaaagtaaaatcaatttcatgcttgcaaaggataagagca

SEQ ID NO: 7067 - DNA, 229 bp, Unknown
  gut microbiota DNA sequence
ttgatgatcacagcagcggcaggaagaaattggatgaagtcagtcattcccggagggaaaaggaacgaacctatcgcggattcaacttttttgattcccgtgatctgtctgtaccggaagccatcagcaaaggggaatacatgacattcgggatacaaggaaaacagatccgccagcatcttccgaaaatcactccgtctgccatgacaaggatctttaaacgtctgaa

SEQ ID NO: 7068 - DNA, 276 bp, Unknown
  gut microbiota DNA sequence
ttttatatgttactcactgataaatacgctgataaaattcatggcatcattacctgttatgaccgcatgatcattcagggatatatcccaaactggagccatgcggaagcaatggctgcctatatgaaactcaacggtatccgtatttttgattatcccaccagtttctcccagccccttacggaacaggtccgtcagaatgcggaaaagattgctcacgaaaatggaatggaaattgagttcatccgaaaactccatgcttttcgaaaagatgac

SEQ ID NO: 7069 - DNA, 230 bp, Unknown
  gut microbiota DNA sequence
agccactgggtaaactcatatccatccttcggctctgctttcaccgtgatctctgttccctctttgtagatgtttccttcatttgcaggatccattgtgaccgttcccatctgctcatccggtgactctacatagatcaggtaggaatgctctacttctttaaagtttgcagtcagttccatattttcctggatctggaatacgtacggattctccttgctgacaatctc

SEQ ID NO: 7070 - DNA, 229 bp, Unknown
  gut microbiota DNA sequence
tctggatctgactgcaaactttgaaaagatccctgcagaaaaatatacattctctgttgcagcaaatgatgagaagatgggaagcgttgcagtagaaccgcagcaggatacctatgaggcaggaaccgagatcaaggtgagtgcagtgccggcatccgaggattatgaattcgtaggattcacaaagaaaggaacccaggagattgtcagcaaggagaatccgtacgta

SEQ ID NO: 7071 - DNA, 278 bp, Unknown
  gut microbiota DNA sequence
atgggaactgtaaccattgattcagcagacggaagctacaaaaaaggagaaaaagcagaagttatcgcagtggcaaacgaaggattccgttttgtaaactggaccgatgcagaaggaaacgtgatcagtgagtccaatccatatgtatttgaggtgacaaaggatctggatctgactgcaaactttgaaaagatccctgcagaaaaatatacattctctgttgcagcaaatgatgagaagatgggaagcgttgcagtagaaccgcagcaggataccta

SEQ ID NO: 7072 - DNA, 433 bp, Unknown
  gut microbiota DNA sequence
tgttgtttccaccattgttatcatttccgttgtgatcgtcgtccggacccgggtctggattcggatttggatctggatttggatcggctttttctcctctgaccaaaaccttcacatcagctttggctgttgctccgtttgtatccgttacctgaatggtcacgatcacatccgtatcattttccggtgttgttacctttccatccagtccgatgattccttccggatttactgccacgatctcgatcttacttccttccggaacttccggcagaaccagtctttctgttcccgctttcacttctgatggaatcttattgtttgccagaatgtcatctaagatttcctgtgcactcggaatatgcggcacttccacggctttgaattctccggtcagctcgatgttctttgtcactttaaactgatattctgc

SEQ ID NO: 7073 - DNA, 474 bp, Unknown
  gut microbiota DNA sequence
gatgttccacagcttgtaaacatatggtttcaggttctctttcactcccctcccggggtccttttcacctttccttcacagtactatgcgctatcggtcactaaggagtatttagccttacggggtggtccccgctcattcccacaaggtttcacgtgtctcgtggtactctggatcctgccatgctcgcttgcctttcgtgtacggggctttcaccctctctggctggctttcccaaaaccattctactaggctcactcgtcaatcctgcagtccgaaccccggagtgcacgcactccggtttgggctcttccgcgttcgctcgccgctacttacggaatcacatgttgttttctcttcctccggctacttagatgtttcagttcaccgggttcccttccacagcttatggattgggctgtggatacttgaggtcttctcaagtaggtttccccattcagatatctccggatc

SEQ ID NO: 7074 - DNA, 3266 bp, Unknown
  gut microbiota DNA sequence
gtgaacgcggaatccgcacctttgaaacatacaccagaaatactctggatctgcagagcattccggttctgaacaaaaaaacacatcttcccgtcattatcgatccgagccacgctggcggaaaatggtggctggtagaaccaatggcaaaagcttctgttgctgcaggcgctgacggattgatgatcgaagtacacaatgatccggaatgtgcactctgcgacggcgcccagtccttaaaaccggaaaaatatacaaatcttctgactcagatccggcagatcgcacaggttgtcggaaaacaggtataatctgacaaaacaggagggatttttttgaaactgacagtaaatttaggggaaaacagctatcccatttatattgaaaacaacattctgaacaatgcgggggcttatatttcctcctgcttttccggaaaaaagatcatgatcatctctgatgacaatgtctttccactgtacggagaacaattgaaaacttcgctttacgattatgaaatccatgaactggttcttcctcacggagaaccaacaaaggcattcgggacccttcccacactttacaatgcactgcttaagcaaaaattttcccgcagtgatctgatcattgcacttggaggcggtgtcatcggagatttggcaggatttgctgcggcaagctatttgagagggatccggcttgttcagattcccacctctctgctggctcaggtggattcttctgtaggcggaaaagttgctgtagatcttccacagggaaagaatctggtgggtgcattttatcatccaaaactggttctgatcgaccctcaggttctacacacacttccttctcattttattatggacggaatgggagaagtcatcaaatatggctgcatcaaagatgccgctctgtttgaaaccttaaaaactcgtggctctttcgacaatctgcaggatattctggcagatatcatttatcgctgtgtagacatcaagcgccaggtggtggaacaggatcagttcgataccggggaacggatgcttttaaatttcggccacacacttgcccatacgatcgaacaacattttcactatgagcgggaaagccatggagaagcagtggggatcggtatgtatcagatcactaagatcgctgaagaaaaaaatttatgccaaccgggtactgcaatggaaattcagcagctcttaaagtcctacggacttccagatgcctgcaatctgccaatgcatgtgctcacagatgctatttcactggacaagaaaaatctgaacaatcatctgaacctggtgcttctgcatcagattggtgagagttatgtatatcctgcggatcttacattttttgatcacgcagatgaaatctaaaacaggaggaaaccgcttatgaaacagattaccggacgtacaggactcaccggacttcttggaagcccggttgcacacagtatctctcctatgatgcacaacacttcttttgagcatctcggactggattacgtctaccttgcatttgatgtgggaacagaaaaactttctgctgccgtagagggacttcgtgccatgaatgtacgtggtttcaatctgaccatgcctgacaaaaataaaatgtgcgaactttgtgacaaactctcccctgctgctgaaatttccggtgcagtcaataccgtcgtaaatgatcatgggattttgaccgggcacacaaccgatggaaccggatatatgcttgcagcaaaagacgccggttatgatctgaccagaagaaagatgacgcttcttggtgcaggcggcgctgccacttctattctggttcaggcggctttggatggattggcagaaatctctgtgttcagcatccatgaccagttttatgcccgtgccgagcagattgttcagacattaaatgaacggacaaactgtaaggtacagctgtttgattttgaagacgattccatccttcgaagagagattgcagacagctatattctgaccaatggaacttctgttgggatggctccgaatacagattcctccatcatcacagatccatcgtttttccacaaagatcttatcgtttctgatgtgatctacaacccaaaagaaacgaagctgctgcgtcttgccagagaagccggatgcccgacctttaacggactctatatgctgctctatcagggtgcagaggcctttaaaatctggaccggacaagagatgccggttgaaaaaatcaaagagctatattttcaataaatagtgatagaaatgagcctattatgaatacatctacacgatttcgaaagaccatcaaaaacttatatttgttgttagatcaattgatcgactttgggttagaaaaaggtcattatcccttccgccctcatgaaaacgatgtcggggcagatgtatatatgccttatgactgcaccttaaagccgggagaaattgcaagaatccccttaggatttggtctcatgattccggctatcgtggagaaatccacgccattatcagtaatgtaagcaccataacccaatctctttataaaaatactcgcgtaggacagatcgtaattacgcccgttgtaattgcagattttgtcctagatctaggagaatcaagagatacaggtgctttcggaagttccggtatttaaaaattcaagatagtatttacaataataaccaggaaaaatcatgaccgcccgcccaacgggtggtttgctctagggctataagcccttgttactaggccagcgtctcaaggcgctggctttctctttcggctatgggaattctgtttacacatccttcccacagctccgttcaagccatattgctcttgactcgtcgctaccccttaaggggtattgttactacttggcattaccccttaaaagggtcttcatattcttttacacttaatttatccattgcaatatcatgcttttcctgttcttggatatatttttttattgttgcctcatttaatccgactgtactaacataatatccctccgcccagaaatgacgatttccaaatttatactttaaatttgcgtgtttatcaaatatcataagtgcacttttaccttttagatatcccataaatgaagatacgcttatcttcgggggaatacttactaacatatgaatatgatctggcatcagatgtccttcaattatttcaacacctttataactgcacaattgttttataatatctctgatatccgctttatattga

SEQ ID NO: 7075 - DNA, 750 bp, Unknown
  gut microbiota DNA sequence
ctagctagagtttagtttcttttttcgtaagcgcaaaatattgctacgctgcccatgaatcacgcttgcaccaaaatgatagatgcaagcgttttgctctatgtttagttttgacagttcgctttcgcagtctcgctccatggggcaagctgttccaactgttcatctgacattttagcgtctggccgctgtgataagagatatgtcagatatttgtaggtattcaggtcattcgcttttgccatctcaaccattgtatacacaatagcgctagaggcagctcccttcgggctggcactgaacagccagtttttccggccaacagtgaatggtctgattgcattctcgctaagattattggataaactgcaatgaccgtcttccagataggtcatcagggtgtctttccgattttgggcatagttcaccgctttcgccaaacgggttcccttgtttggacgctgttgatccagccaattccagaatgcctccagtatcggcttctccttttcaagacggaactgttttctctgctccgcagtatgattttttgcttttgagtaccgctcacaatcaaacagcttggagcagaactgtactccctgcactgccggaaggctgtaatcatactctttccctttcggtatggcatctgtgaagtaacgtctcacatgtgcccagcaagagcatcgtttgatatccggcagattgttataaccctggtatccatcagtctccagatatccgctg

SEQ ID NO: 7076 - DNA, 1618 bp, Unknown
  gut microbiota DNA sequence
aacgggcggaatggagaaaaccgtctggggaagaggtgaaaaacctggaattatggcagcagtatcaggaactggcagaacggcatgaaatagccgtcagatttagtaaacatcacgattacgtggaaaatttagagggattactggaggaaaaacagaatgtttgatgtatttggaaattttgattccgtagaagaattgaatgcatgtgcaaaaggacttttggaggagcaggatctggagcatttaaaagtactggcagaggaaaacgggattccggatggaatccgggaagtatatgagcagcatctgtcggaagaactggtagattcagtaaatgcggccatcggaaagctgcaggttgagttaaaggaggaaacagacgggatgccggcaggagagatcgtgtcgtatctgtctatgagatgttttgaaaaagaaattctggccagagcggtaagaagaaagaaccggacactcaaagaatgtcttcagaatatccgaaaagaagcggaaaaaagagtcaaagtaagaagcgggtcacaaatggtggcaatgccggatctggaagtatttgccatggcagaagaatactatctggaggcggagaaatgagacgaggagagttattaaagcttccagagttaaaagtaacggaaacgatgcgaaagacagtcggggaagatcaaggacatcaggtactaagatgtggaagaccacctgtctggagtgcaacatattattggttctatcgtgccaagaagacaggaacggttttagagatcgatgtatttacaagggatatgatcttggctggcacagcacatccggaataccggctattccttttggaagaaaacaagtactacacctatgacaatttgtgtgagaagtggagaactgcaaaaatagataacttaagctacatggaaggatgtgaagagatacaacaagggtactggtacagtagcagaaaagtgtggatacgagaagaggaccgaaaacggatctcagaattttgtcacaacggaaaggaagaaccacgtgcagcaatcgcaagatggcaaaattacagtaagggcagaaaagaaattgacgaaattgattctgagatggcactggtgccggaactgccaaaagattttgaagattttgtagatcgggaagtccttccacagtatttgttttatgatgccggaagaaaggtaacaaaagggtattgtacacactgcagaaaagaagtgaaaatccggaagcctcactatggggaagtgggagaatgcccatcctgcaagcatcctgttacctacagaagccgaaagaagggtggaaatgtaaatgtaagagggtatgcagggctcctgcagaaaacaaaagagggatatgtataccgatattttgagtgttaccagaaattcaggaatggacagagggaagaaggcggatactgggagacgatccggatcacatatgaccggaatttaaaaaagattcatgaatttgaatatgaacagtataagcagacagactgggttcggtggtgttacagagacggatggagatattataaagtggtagagcatgaagcgatcctctataaccgaaatctcaaacagat

SEQ ID NO: 7077 - DNA, 866 bp, Unknown
  gut microbiota DNA sequence
aaaaaatgtatttggatcgatatctggagggataccggcatatgcctggaatcgagcagctggtaaagtgtgggctttacagaattgtcaaagaaaaaatgcaggggtacaacacaggatacttaaagaagaaagaacggtcctgcaaaaagatattagggctcagcggggaatattaccagctgttggctggaaagaatccaagtgtaagggaatataacaccacttatgaaatgcaggagaagggattacatccaacatggcagcaggttcagttttttgcaaagtttacaaggaatttcaccaggtatatccggtataccaccatttacaagatggaacggtacatcaaagaagtgttaggagaagacaagagaggagccgtggactatcacgattatctgaagatggcagaggaactgggatacaacatgagagagtcgtggatcttatttccgaagaatttagagcagcgtcatgaagagttgattgaagagagcagagaacgagaaataaaagcaaaagaggatttggacaataaaaaagacaaaaagtacgagaaatacagaaaacgggacagctatctggaaatggaaacagaacaatttgtgttgagacttccgaaacggatccatgaaatcaggcaggagggaaatgccatgcatcattgtgttgccacgtacattgaccgggtggccaaaggtgagacaacgatcctgttcctgagaaagaagcaggatccggagacgccgttttacaccatggaggtaaacaatggggttatgatccagtgtcgggcaaaatataacggagacatgacagaggaagtcaaagaatttgttgagctattcaaaagaaagaagttg

SEQ ID NO: 7078 - DNA, 2262 bp, Unknown
  gut microbiota DNA sequence
agctggatagatggaagaattacagacaatcagtacactgcagggggtagaaattgcattacggaaagaactggaacatatcacagagggatacattaaagtcgggtatctcttaaaaaagactagagatgcagagttttataaagaaaaggggtatgcggatgtttttgagtttgcaaaagaaaccttcaatatcagcaggacgtgggccatccggtttatgcagatcaacgatacatacagtattgacgggaacagcccggaaattcaggagaaataccggggatatggcagcagcaagctgtctgaaatgttggcactgccggaagaagtgcgggaagtggtaccaagagatgccacggttcgggaaatccgggaggtaaaagaagtcatccgggaaacagaagatcgttattcgccgcagatgagcctgtgcgacatcgcaccagaagaacaccatggaagctggacggaaacgttagtgtatgaatttttcaaaggagaaggaaaagactgctttgagaaaatgcataaatggatatgggaagacgagccaaaagaggaaagtgtgataaaccgggagatcatgggaattgtagctccaacaaaattccggatgtttcggatgcaatttgcaaatgcactattcagtgaatttcagattcggatcatgccatacaacggcaggggagaaccagaagagatcagctatctggagttggccaaaacatttgagcagaccttttatccggaaggcaggaagatgtctgattcaaaagcctatgaagaagtttatcagatgccgctgagggaaaagaaagagagggaagtcttaaagacggaaccgttaaagaaaaagaaagaacctgccaaaccaaaggaaacattggaagagccaaaagaaccagaagaacagattccgggacagatggaagtggaagattatccggaactgatgacggatgctccggttatgaatcttccggaagaagaaaaacaggtacatgagatcacagaagaggtggtccaggaaggagaagtcatagaagacatcttaaaatccggggatccggagaaaatcatccagcttctgaagaaagaatttgcctggccaaaaggcggatgggacaactggaaaaagaaagtgattactttatgagtattgattatagtgatatggcgtttcctaagccgaaaaagaagaaaaagagaatcagccatccgaaaagcattttgaacacagaaaagggcgtgtgctatctctgtgccaatctgtatggagactatcggaagcagtataccgaggaacaccatgtattgtttggatccgggatgagaattctatcggaagccgagggattgaaagtgtatttgtgtgaaccgcaccataaaagcggaaaagaagctgtacataattgcagaaagacaagagaactgctttgcgagatcgcacagagggaatatgagaagtcacacacaaggaaagactggatgaagatcagcaagaagaattatctggatcagcaggagttgatgaaagaaccgcaaaatgaaaagcagaaagaaggacatccaggattccaatttttatagcatctccggccaagtgccgtgaagatacaacagcaggtacgtcacaaaacctgtcgtaagccatcacattatctcccagataactctgggagaggaaaggagcatcatgtttattaagacgagcgtatttaagagaatattgaaggatgcatggaaaggtgcaggactcactgtaggaaagaaagaggaaatgtacttcatacagggagcctattggatattatttgtatatgagaaggactttacaagcaagaataaggcggcagtcattgaacttgtaggggatcttccggaagaaggcgaagtatatagagcctatgaaaagggaaaaaagcagtatgaactaaaagtaagggatgagtgggaatacaagaaatggttatcagccagagaccggtatgaggatacagaaatcaaatacaggggaatggcagtgttacagaatgtagagacaaaagagatgagttacataccagatcaaattctggaattggtaagcctatccgaaacaggtgagtatgaagactttccgacaggacctatgggaatgggatatttcgtcctgtgggtaaatgagactggaatgttattgactgtaaaaacaccggcaaatgaagataacatggatggaagaatcttgaaagcgctgagcgggctggaaatggagta

SEQ ID NO: 7079 - DNA, 1513 bp, Unknown
  gut microbiota DNA sequence
acgctgtcatagaacatacacaagaaaaggagaaccaccatttatgattcaaatcatcatttcacctgcgaaaaaaatgaatatatgcgaagaatttcccggcactgccaccacccctgtttttgtagaacagacaaaccttttatatcagacactaaagcagatgtcatttgaagaattgcggaaactttggaaatgcagtgaaaaactggcacttcaaaatacaaaaagactgtgcgaatttacaccggctgacgctgtcactcccgcggttctcgcctatgaaggaatccaataccaatacctcgcaccgggcatcttttctgatacacagtgggactacgtaaaccggcatctgaacattctttccggattttatggtgtcctgtgcccttcagatgctgtcattccctatcgtctggagatgcagaccaaactggaaactgagaatgccactgatttgtatcatttctggaacaatcagctatatcaggcattgtactgtaaatttgagaaaaacgctccgaaagagctcatcaatctcgcttccgcagaatacagcaaagcagtacttccttatctgacagaagacgtacactgcgtcacctgcgttttcggcgagttcgttcagggaaaagtaaaggtgaaagccacgctcgcgaaaatggcgcggggagaaatggtccgctggatggcagaacaccagattcagactgcagaagagctgaaacagttcaccggacttggatttgctttcgaagagtctctatcttccgggacagagtatgtgttcctgaaaaaagctatctgcccggaagattagacttttcttattctgccttcatttcccggatctctccgcacgcgatcatagcgccggagtttccggaaggctgggttgtcatatcatccggatgtgcgtgtatgataaccgctcttccgatcacatcctcgggatgaaatcgatctgtgtaaaagatcaaaaatgcatttccgtcatttgccagaagcgaaggcatatctcccacatgctgcgggtgcatggcatttgtcggattgtagtgtccgtccgcctgtgcaaatggttccgcttttgtcccctgacaggttccctcatgaatatgaaatccatgaaaagcatttccatccggcagattgcggatatcggctgccacgatcgttccattgtgaactccgaaaaaatataccattccccggatttctggaaattctgagcttcctttgatctctgcagcggcatccgggatggtctgtatctctgaaaacatcttaccacctcccggattaccatatgcagtttttgaaaaattgttattcctgatgcactctccatgcttctgttaaaagctccggctcttcgatcagacgcagcgcacccttcgccatacattctgtcacatacagcattcccttctgcccaatgctcattccggactgtgcggctgcactccagtgatgcagcggtgtacccttgcacatggtcgccgcactg

SEQ ID NO: 7080 - DNA, 814 bp, Unknown
  gut microbiota DNA sequence
gaaaaataagtttgttatagtgtgcttgataatatattttctgttttcaaatctgtttctcctttcagcttttactcaaccacagcggacattgttaatgaataaaaaaaagggcactctctgaaagttttttctttcaaaaagtgccctcaacaatccatattgttggagtagtattactgacaactaatcaccattcttcatgatgattcatgttggaatacgaatttgttgtcaaattgttgtcaaagaaaatttttgttgtcaaattgcgaagtgtttttactcacttagtacagttttgctcctgctggaatcttatcatcaagaatcaaaacattgagtccttctcttccttctacaaggtgtgtcgcggagatgatcataccgcaagaatcaattcccatcatcttacgtggtggaaggtttgtgattgcaagtaatgtctttcctactaagaattctggctcatagtagtcgtgaattccgcttaaaatcacacgatctacgccacttccgtcgtctaatacgaacttcagaagcttcttagattttggaactgcttcacattcttttacctttacagcacggaaatctgacttgctgaatgtgtcaaaatcaaccatatctttgaataatggttccacttctacattagagaaatcatatgtttctttcacttcagcgattgctttttccactgttttttcaaccggcgcagactgtgcagcattattagcttcattctttgcagcgcccatgctcttcattgtcgggaaggccagaacatcacgaattgctgcagaatctgtca

SEQ ID NO: 7081 - DNA, 2320 bp, Unknown
  gut microbiota DNA sequence
cctatagggaaagagatttttccccgaagggatggatgaactgtgatccagcgaaaagatatctttatattgaagattttgaagaaaaatacgatgtagtcgggatgcaacgaagtgatatagaggatttgttaggctcgcctacctggagagaaacagagccagataccgaagaaattatatactacgagtaccgcattcaagaccatatcctagcaggatggaaggtatatcaaataagattccaggatgatcttgttgcagatacaagcattatagtagaagattggtaggaatatgacatgatacatatataaactttttctttaacaatatagaatatgatgagagttataattgaccgccaaaggagatagaaccgattcctgtctggtagttggagaaaaaatgcaggaaaatgggaagctacatcgttgcgaaagtaaaatcagttattgatattgtgcatttgatacggcaggtgttagcgtaagcacatctttccaaaaggtgggaatagaagaaatgaaacatatcattgaatttaatagagatgaactaaggattgataaaaaaataatgaaatttggctatgatattagagatattaaggtggtggataatcaagttattgttttattatccataccatttcatacgaatgaaatagataatatatatgcggtatccttagattgtaaaatcaattggagagtagaaagtctaaatatcataagtccagatggagataatcttccatatgaaaatctgttttttcataatggagaattaacagcaaccgatttttatggaagaagatattttataaatcttacaaatgaaaggatagaaaagacggatatcgtaaagtaaaacatggagggatttatgttagaagaacggtcatatttatgcggaaataaaaatgaaagaattgttcaggcgttgagaaaagctggttggtacgatgggcgtaaaacagaaatttcttcagttttaacttattataaaaaatggaatattgaattgaacgaatatgtaatccatttttttgaagaatattatggaatagccggaaggtggtatatagaggttgaaaacttagcctggggtccggactttgaatttctattattcccctatcctgagaaccagaaaatggagattgtagattttatgtacgatgattcagaataccggatggaatcagaggaatatagagctgtaaaagagtatgcaaaggaaaatataattttagttggcgagattggctattattatcctgcgcgtgtctggatcggaaacagtggcacattctattgtacacatgattatgaagaggattgtttaaaatttgattcggtgatcgcactgatttcctatgaattatccgcacatgagttttcttcagtagcaatgcggaggtagtaaatgagagagacaaaacggacatcaaaggatattttgaaggatatgctgtcaggtgatatgtagaaaatatggagtgcaagctgcgaaattgtatcattaagtcaaaaccatgaaaaaattatggaacttgttccgcatacagatgagatgtatcgtgcagtaaagaaacttgagccaggcggtttcatcattccacaccaaagagtcttagagaaggtctttcaaatcttgcatttacataaagaaggaaaagaatgtccctgcagattattaggaggagaatccaatccaaaggacttgatagaagagggatattttgaacttgttaatatggtatattgcgataataaggattacatagattcttaaatagtcaatttgaatttgaagatatacagtagagagtgtgatgacatgacggatattagtggtattttttcgataagtagtagtacaaaccctcaatggatttcattatgtggacatttggaagctgttattggaaattatttactttcacaagcaggaaatccagaagcatattggtatgctatatactacgactcatcagtagacgggtataatgaatgtgtagaaatcacagataaaaatttaattggttatgtatattgtgatgatagagtagcctttgttttgaacagcttccttgaaagatttataaacgatactgtagattatgatattcattatgttggtgtagattctttagatgaagaatgtattgaatgcagcagatactctgattattgtgagcatattttacctgctttatggatagatgatgatttcttaaacaatgaaaaacttgagtttgattatgaaaaatttgagttgatagatactggcgttaagtatcttaatccgaagc

SEQ ID NO: 7082 - DNA, 800 bp, Unknown
  gut microbiota DNA sequence
ctaggtctatcttcttatattttcgctatcaagcgtggttaaaatcgtggtaaatacttcttatgcgattagacgctgaacctctgattttgcggtatctatggacgcatgagcataccagttcattgtgatactgatgtttgaatgtcccatgatatactgtaaatctttcgggttcatgttcttgcttgccagtcttgtgcagaacgtatggcgtagcgtatgtggtgtgatatgtggcaaggggttatccttgtggtgtttgttatatttctttaccatacggacaaataaggcgttgtaatcaatcgcaactttaggattgcctttcggattgacgaacagaaaatctttgtatccgtctatctctatcagtttcccttttgtgcgtttccttatgacccgttgaaatgcctgtatcgtttctctgcttaatggcacttgccttgttccactctttgtcttaggcgtttcaatataatagccctgttccttgctctttaataactggtggtcgataaccacaacctcattcttgaaatcaatatcggctactgtcagtccgcacagttccgagatacgaagtcctgtctttaacagtatcagcacatcatcataatacttgtgatacacgttatccgtcttgatgaatgacagtaaggcttgttcctgttcctctgtcaatactactttctctttggtatcattttctatgatttcacttaacttgaaattaaaagggtttttccttacacaatcgtcttgtatggcgatatagaatgacgcttttaacgagcgtt

SEQ ID NO: 7083 - DNA, 284 bp, Unknown
  gut microbiota DNA sequence
aatagcggcttttcttggcagccagctcacatacttccggctttacgccccacatcacgtcttcagattgtgcaccggatttgcctgatgcactcctacctcgcttgtaccggtttttccattcccggcttatgctctctgtctgcgtccccacagttctgttatgatatagtacaggaatctttacctgttatccatcgactacgtctttcgacctcgccttaggccccgacttacccagagcagatcagctttactctggaaaccttagatattcggccgga

SEQ ID NO: 7084 - DNA, 818 bp, Unknown
  gut microbiota DNA sequence
tttccgcttaaataagtcataaaacaataatcttcttcatctttttctattttgatcctaagcccatcatcacatccacatttacaagaaataatcatttcggaattatctgacacttttaatactgccatgcaaaccacccactttcacttttttcttgaataaccttgttaaaaatggtatattatattcaaaggaacaaccgcccacaaggggttgacctcatagcattagtgacaaatcataggattgccaccctcggcactcggtcaaagtttagagggtggtttttctatgctcaaaacattatctgataaacgtaaatacgaatgccagaatgaacattccaaatgccataagatctttaaaatcaaacggtttcttgtccatcagcaccacccccattctatgtagaatagaggtcagccaccctgtaacacggttgttctgttttttatcatatcacgcttttttgcatggttcaatctattttattctttcttcccgatctgcttaatggtctgattcacatatgtactcaatccagctgttaaaattccctgtataatcgccgtgaataccgccattgcgatctcctgcccggtactaatcggacaagaagcaaacacccatactgcacacagggcaatgccaagcccgcccaaaataagcgggatgtacttatcctttactgtctgagactatttcagtccagttccaataaaatacagtaccactgctacaacaatcagttccggttttacataattcatgatccgttccatcattcctcacctttcctctccaaatcctcaatt

SEQ ID NO: 7085 - DNA, 264 bp, Unknown
  gut microbiota DNA sequence
tactttaaaccaattccttacgattggcagaatacttcgaaaaagagtttacagtattcagatgccacaggctgttattctggatctggattccactcttcttgatgcatacggtaaacaggaaggcagagcctttaactttcattatcggagcaatggataccatccacttgtctgttatgatggaatgactggggatctgataaaaatccaacttcgtgatggaacacagtattcctgcactggagtggttgacttcctgca

SEQ ID NO: 7086 - DNA, 687 bp, Unknown
  gut microbiota DNA sequence
tttaaacggacggtatctatgcgttgttttcgcatgtttgctgataacgccaatcgtctaaaccaattaaatatgttatacgcaagagcgtgtacctgaagtctgttggcatttacgattctagcatggctacttacagaagcgaaatcaaaaccagatttgctttctttgatgaagttttccatccgtcctcttttgcagtaaaattttatgagatactctggtgaggaatccatgtttgtgacaacaaatgtgtacatgtaaaccatctggttttccggcttttcaaccttgcaaaccacacgcctttcataaggccatggacctgctttgtacatgaattcaccataaactaccgcataatcaactttgttattcctggtgatttcatcaagctcatccacaagatgggatgctttttcacggagaataccattctccttcagccggatgacatagcttgtgccattttcctcgcactgcttgtaaaggtcaggcgtagcaaaaccgctgtcaccccgaagcagaatttggattgttggataatcattcagatattcatcaagtatcagttgcaggaagtcaaccactccagtgcaggaatactgtgttccatcacgaagttggatttttatcagatccccagtcattccatcataacagacaagtggatggtatccattgctc

SEQ ID NO: 7087 - DNA, 1491 bp, Unknown
  gut microbiota DNA sequence
ctcttttagtctctgtgctgtcagccctctgtacttaaccgcatccggtgcgctgaaaatacttcttcttgtgggtgcaaatcccagcttgatttttttcatgattcagtctcctttcacataccctttgtatttgtgtattttgctttttctttcaaggattttcttgttgttttctaacttcagtatagcttcgcagaaactcaatttcatccaataattaagtatttttcacttaattattaacttaattattgttttttctttgtatctggttcataataaattcagaacacaaaacaacaattcgaaaggatcatatatgggaattacagcaaaggaacttgcaagaaaattaaatctttctgccgccgctgtctccatggcactgaaccacaaaccaggagtcagcactgcaacacggcagctcgtcctggatgccgcagaaaaatatggatatgatttttcccggatcgcggaaaaacataccacttccggggcgatttattttgttatctataaaaaacatggaacagttgttgcagataccccgtttttctctcaggtttccgagggaatttcacagggatgcaaaaagaatgactatcgtctgaagatcagctatatttatgaagatgaggatacgatcacgaaacagattgaagaaattcagtattctgactgtgcaggaattattctgcttggaacagaaatggaagccggagatctgaaaccgtttttaaatcttccgatcccggttgtccttctggatgcttattttgagacagttccctgtaactgcgttctgatcaacaatgtgcagggtgcatatctggcagccagacacctgatccggacttgtaaaacacagcccggttatcttagatccgcctaccagatcagcaactttgcagagcgttcctcaggtttttacaaggcagtgcgcgcggctggtatgtcctcctcccgctcgatcgtccacagcctgaccccttccatggaaggggcatataccgacatgctggaactgatcaaaaatggagaagaactggcctcttgctactttgcagacaacgatctgattgcagtaggcgccatgaaagccttaaaagaaagcggatatcggatcccgcaggatatcggtatcgtcggattcgacaacctccctcttggtagcgtcgttgagcccgcactgacaaccatccatgtcccgaaacagtatatgggagaagctgctgcgcaaaaactcatcgatcttttaaatacacccggacagcctccgacaaagacagaggtgtctactatgcttgtgaagagggggacggtgtaagccgcccttccctctgcgcggggtcacgtggaaagatggagtgaaaacatcagtcatcctgcaggatgctcagatccatctggtaaatataatcttccggtaatctctgctttttcagcatccccacaagataaatcggacaatacagcaccttatccttt

SEQ ID NO: 7088 - DNA, 532 bp, Unknown
  gut microbiota DNA sequence
gcagatgggaacggtcacaatggatcctgcaaatgaaggaaacatctacaaagagggaacagagatcacggtgaaagcagagccgaaggatggatatgagtttacccagtggctggaagtgacagaagcagatggagaagaagttctgacaccagtagaaggcgctcaggcagaatacaaatttcatgcagagtcagaccgtgtactgcgtgccgagtttagactggctccggttccggaaacatactaccgtgttgtggtacagtccaatgatgagaacatgggaagggtttccatggataaagaggatggcacatacaaagagggtgcgacagcatctgtgaaggcagaagccaaagaaagatttgaatttgtgggctggaaagaaaaaggacagaccgaatatgtatcgaaggatgcagaatatcagtttaaagtgacaaagaacatcgagctgaccggagaattcaaagccgtggaagtgccgcatattccgagtgcacaggaaatcttagatgacattctggcaaac

SEQ ID NO: 7089 - DNA, 284 bp, Unknown
  gut microbiota DNA sequence
aatagcggcttttcttggcagccagctcacatacttccggctttacgccccacatcacgtcttcagattgtgcaccggatttgcctgatgcactcctacctcgcttgtaccggtctttccattcccggcttatgctctctgtctgcgtccccacagttctgttatgatacagtacaggaatctttacctgttatccatcgactacgtctttcgacctcgccttaggccccgacttacccagagcagatcagctttactctggaaaccttagatattcggccgga

SEQ ID NO: 7090 - DNA, 250 bp, Unknown
  gut microbiota DNA sequence
gtagcgtctggcaaagacatcgagaactttatggagcccttgcgggttgatacggtcagaaagtttctgagcagtttcaatatcggagatttcaaggaacgcgttgtcctgcatccggtaagaaagctgttttttatcaagcttataggcgagcaggttatgaccgttcatgtaaaactgaagacggaaaggcggccatgtagggacacgaagatagcaaaggccaagttccctgtcgataaaatagaaa

SEQ ID NO: 7091 - DNA, 931 bp, Unknown
  gut microbiota DNA sequence
ctctgcgaccaacaatctacgcaacatttctgtctgtccggtatctcctttataaaattcatacaaaatttcagaaccgccttgttccagaaatgtctggatatttgcttcatgatctctgataaacgaatcggagaaagcaaaagtgctcttcatccattcccagtgaggatcattttttaatagttcagcataggcagactgaaaatttgggtatccacttaatttttctttatttgctatcaaataccgcagttggaaaccatttttcacttctggaagaaaacgtacaacttcttcccaggaaagaaacaaatctagtatatccatccctactaggccggaaatatttcccaattcttctttcacccacttagataatggtttgtgggataaaaaagccgcaactctttccagcgtttcttcgctagttaccttgtccaagagtctctttttcaccacttcctgcataactctcaaccgatcgtctacccttctataatttagtttgtggtacaaacggatatactctctgtcaggacagacagcaaataattttatttccgcaaaagtatactctttttgtatcatatctgtcttttctatagcagaacattcctttatttttctgcattcctttaaattttgaaaatttaatgtatttagattgacatactcctcataaaatgctttttgaaataaaatagaattccatggaagttcaagaaacagttctgtattttcttcatacaacttcaaaaagtgttttttctgatgtttgactgcataaagaagtactgactcctgataatatttcaatcggtccaccgcttttatggcataccggtaaacctcctgtatataccctgctcttgtatagaaattcccttgcgaaatccatccttgtcttacaaatctgtttaaatcaaac

SEQ ID NO: 7092 - DNA, 377 bp, Unknown
  gut microbiota DNA sequence
taatcggtccaccgcttttatggcataccggtaaacctcctgtatataccctgctcttgtatagaaattcccttgcgaaatccatccttgtcttacaaatctgtttaaatcaaacaataactgttcattctccagccaccttgtcaaaaaacaagatcgtatgcctttatgtaaacgaggcatgatttctcttaatagcggataaagttcttctgcatttttaacaatctgtctgtatgcctctttacttagcatcggcaattgaaactttgacaaatacttcaaaagttccaatacattcacttttcctgaatcctgaaagaagtgttcttctccaatcacttctcctaaaaagacacctgtaaaaatcggttctt

SEQ ID NO: 7093 - DNA, 795 bp, Unknown
  gut microbiota DNA sequence
ataaacgccgaagcggctatatcatttccataactgctaaatggggaataaaataaataacatagttatctacagcagtacatacaccacgagtccttattagcagtcaatactttcttacatatattcggatgtgtatacagtccctatttgtgaacttaacgggatagtttattttacaatccaagtatttgtcttttcttaatttcaaactcatctctcgtaattattccttgatcaagaagtgacttgaatttcaaaatttcatctgcaccacttacgttcgatgactgaacaactggggaagattgaaatttgtaagagtctatagctgcattaagtgaatctacaaaagaaccaatgcatcctttatctatattttcgatttttatggcagatgcaccatcttgtattgtaattgaaccgagtaataatccgcgtttttgtgagatgctgttgattttatcgagcggcagctccctttgctttaatccgtatagcattcctttgtctaagaaaatcactcttctatctgttagtgcaataatccacgtgtttccatcaagaaatccggagatcagtccaagaacacgttcatccgggttgagaatttctggaagatacgaaacctctttcttggttccaaacatattgaatgtaggtaattgcttcaattctctcattacgctttgcttttctctcatactaaaactccttttcctaagtactttaacaccactttactctatataaacgccttagcgctcatatcatttccataactgctaaattagg

SEQ ID NO: 7094 - DNA, 1506 bp, Unknown
  gut microbiota DNA sequence
attcagatcgaacattgtgatgtccggattgtctttgaagatcatacaagtaacaactttgtctccaacctttaatggttttcctgcactgtctacttttacatttttacccatttttacaatctcaccggttccctcgtgtccgagtgctaccgggatcaggctaaatggatcttttttaaactcatgagcatctgttccacagataccgcatccttctacttttacaagaatatctccgtctccaacttccggcatcgggaattcttttacttcataattttccagagctgtcagcattgctacatgtgctgtctttggaattccattgctttctgtgtttgcttttgcagctgcaggtgcttttactgctgatttgccttccagcatgctttccagaacctgttttacaactgcttcaacacttgctgaattcatttccatgtttgtttcctcctatttatacttcctgacgaaactgtctgcattccattaacgaatgcacaggctgtctgtcattacgcaacgtcttctctttgtgaatgtgcttgcgcttgtgagtccttcgccagttctgcttgcgatcgtaaacgtacaatatccttctccgccgaatccaagggctgcataagatggtccgtttttcacaagaattgctgtatcgattgcttttgcatattttgtaatgttatccacattcttagagtgaatgtgagcggaatgtctgttgccgtgttccagccatactgcctgttctaccgcatcatcaaaatctttcgctcttacaactccaagaattggcatcatcagctcttctgcaatcagaggatgttccttcggtccttcaaatgtaatgcatctgatgttatccggaactgtgattccaatcattccaagaagtgtctttgcatcacgtcctacacattttctgttcaaacgtccgccttttaacacaacttctgtcagagcatcctgctcttctttggaaatcatgtaacatccctgttcattcaccatgtaatgcagaagttcatctgcgatggaatccactgcaacgatctctttctctgcgatacatggaaggttgttatcaaatgtacatccgtttacgatgtcttctgctgcttttctgatgtctgctgtctcatctaccagcgccggcggatttccggctcctgcaccgattcctctcttaccggaagaaagaaccgctgtcacaacccccggtcctccggttgctgcgatcagatgaatgtctttgtgcttcatcataatgtcgcttgtttccatcgttggatgttctactgttaccgcaatgttatccggtcccccaacttcaacagaagcctcattgatcagattcactgcataaatagatgttttgatcgctgccggatgcggattaaatacaactgtatttcctcctgccagcataccgatcgtattacagagaacagtttcacttgggttcgtacatggagtgatcgctccgatcacaccgaacgg

SEQ ID NO: 7095 - DNA, 498 bp, Unknown
  gut microbiota DNA sequence
agcagattcgtaaaaaacagattcctttcgtgatcgctgtcaataaaatggatcttgctccagcttctcctgttcttccggatgagatttccccggagcaagtcctgtatgtcagtgctgccgcgggaacacagattcacgaactgaaagagctgcttgcaaaacagctcggacagacaccaaaaacacgaaaaatcgtgggagatctcatccatcccggagactttgtcgtactggtcattcccattgacaaagctgctccgaaaggccgtcttatcctgcctcagcagcagaccatccgggatattctcgatcacggagcaaccgcaattgcagtgagagacagtgagctttcagaaacgcttaagaaccttggaaaatcacctgctcttgtcatcacagacagccaggtctttgatgccgttgccaaaatcgtaccaaaagaggtaccgctgacctctttttccatcttgtttgccagatataagggaaatcttg

SEQ ID NO: 7096 - DNA, 1279 bp, Unknown
  gut microbiota DNA sequence
gatcagttggaaaagaatggatgtttttacagagaaaagaaaggagcgtgagaatatgcaccttcataaactggcagatcttctgtcatttcatgaggtggcagttggaggaacccttccccagacagagtattatcgtgaaaagctgaaaagactgcatcctatgcagatgctttcgtcgaacatactgctgccactatatgaaatttctctttcttatatgacagtaaggggaaattacaggcaggcgaaaaaatatgctttcctggcagagtacagcgaagtagattttgaggcagaacttttattaaaggactggattgcggaacagaatgccagaaaaccttaccgcaaaatttccaatgtacaaattctggaaattcaaaaaattgcgtatgggatactggatatccggtcgtaaaagtgttccactttttcttatcctgagaaattcaggttgctgcttaggaaaaccggccattgcgggcttgtttttcgaaagtgaaggtcaggcagtgtaaaaagacacacctacaagcatggcttttccgtttagagcaaactttttgtaaagaacggagaaaagatggaacagttaagtttttttagcattgaaaagaaaatccaaaacgccataaccctgttaaaaatgtttgaagcaaaagccatagagatgcatccggaagggtactatttatgttttagcggtgggaaagacagtcaggtaatttatgaactggcaaaacaggcaaaagtaaagtttcaggcttattataatgttacaaccgtagatcccccggaattggtctattttatccgaaaaatgtatcctgcggttattatcaatcagcctgatacaaccatgtgggaactgattagccaaaagcattatccgcccacacgaagaatgcgttattgctgctctgaattgaaagaaagaggaggaaaaggacggtttgtagtcactggtgtgcgttgggcagaaagcaggaaacgaagaaaaagaggatttgcagaaatacaaggaccgtctgaaccaaaggttattttaaacagcgacaatgacgaaaaaagaaggcagatagaaaattgccagataaaaggaaaacgggtgttaaatccaatcttggattggacagatgatgaggtgtggcagtttatccatacacatatccgaacttattgcagcctttatgatgagggctttacaaggattggctgtattgggtgtccactggcttccaccaagcagcgggagaaagaactggcgcgctatcct

SEQ ID NO: 7097 - DNA, 1136 bp, Unknown
  gut microbiota DNA sequence
caaatttaggaggatggcaaaatgaataaaaatacagcgttaggagcaagtgaggttacgaaaaacataatttttcaaggagagatgcataagaaattttttctgctttatttaccggaatgtagaaacgaagatgtgtatcatcaggcattgatctattgtcttggaatcagtcgagatacacgagaacatgtggaagaaatttatgattttgaaacaggatgcgtcaaaacagaatgcatgagtgccggatggcagacaagtgggagtctgaaaatcattcggatggcatttaatctttactgcaatggcacaccgactgtatatgaaaaggaaggtgtagaaggtaaattaaaagagtgtgagcattatacggtagaggatctgttttgttgtgagtatgcgccatatttctggcaggcgattcaacttcgttatccagagtattgcggaatgtgaggtgaaacatgttaaaaatcagattacagggaactaccaatgatattaagtggttcaaaaaaatattggagagagacaaaaggattgctcttttggaaatttcacaaccatttccgaataagggaacgaaaaaatattttcgtgtgtatgcagaggtagaaagaggaacgaaataagcggagggaaagttatgtgtaaagtaatcgcagtagcaagccaaaaaggcggagtcggaaagacaacaacctgcatcaatcttggtgcagcattagcaaaagcaggaaacaaagtgttgcttgtggataatgatccacaagggcacttgaccataggattgggattttccaaaaagcagagagtgacactgaaaacagttctggaaaatcagatagaggaactggaacatccattaaaaggtgcgattctgaactatggtgaaaatctggacatcataccggccaataaaacgttaggaatgatggggatttatctgtcaacggtagaagaaggggaactggtacttggtcaggcattagaagaagtcaaaggaaaatatacgtatattttaattgactgtggtccgtcactgggggcattgtcaatcaatgcattggtagctagtgacagtgttttgattccagtggaattggataagtttgctacagatggattggaag

SEQ ID NO: 7098 - DNA, 1857 bp, Unknown
  gut microbiota DNA sequence
aaagccggttgaacaatacgaaaatttatcaagaagcaattgagacagcatatggggagcatgtgtatatttttaaatcttatgttcccaaaacagtacggattaaagaagcgcccaattttggtttaagcgttttggaatatgaaccaaaaagcgaaagtgtccggcagtacctgtccctgatggaggaggtggcaagtcatgaataaaagaaaagcagtcatttctcttgccgggtatgaggacatttttgaggattctatggaaaacggggaaagggaagaagttgtcagactccccatcagtcagtttcatatgtttcggaaccatccttttcgtgtggtggacgatgaaaaaatggaggaaacggtaaagagtgttaagcaatatggtattctgatcccgggaattgttcgtccgcttaatacgggaggatatgaagtaatcgcagggcatcgtagatggagggcctgtgaattggcaggattgaaagaaatgccagtgcttgtccggaacatgacagatgaagaagctacggtgattatggttgatactaacatccaaagagaagatattttgccaagtgagaaagcaaaggcatataagatgaaatatgaagccatgaagcatcagggaagcaaaggggaaaagtttacggcggatttggtaggagaagctgctggtgaaagtggaagaactgtgcagagatatatccggttgacagaattgattgcagaactcttagatgctgtggatcacaaagtgatttctatgaaagttggagaaaaactatcctatttatccgtggaagaacaaggctgggtatgggattgtgtgaaaacgtcatctgtacagattcaggacagacaagcagaatgtttgaaagcgcagagcaaacagggattgctgtatccggccatggttcaggatatcctgatgaagaaaacaaggagccggggacaggtgacgattccagaaaaaaggattgcagattattttccggcaacttacaacaaacagcagatcgaggaagtgatttatctgttattggaacagtggaaaaaacgacaggaaggtgagaaggatggagagcacaataaaatttgactattttagggggatggaagcggaacagtatacgttctatcggattccgaaggtcttgtttaccgcagaatgtttccgctcactttcctgtgaagcaaaagttttgtacggtcttttattagaccgtatgggactgagtattaagaaccggtggtttgatgaagaggacagggtttatattatctttaccgtagaggaacttgcagaattattaaactgtggaactcagaaggttgtgcgtcttttaaaagaactggatgtaaaaagtggaattggactgattgagaagaagcgtctggggttgggaaaaccaaatgtgatctatgtgaaaaactttatgattcaggaattgacaagggcagaaaaacaggatttagaggcggaaacccttgaaaatacactgaatggtgaaaatcacaattcaagaaatgtgaaaatcacaattcaagaaagtgcaaaatcacaattcaagaatgatgaaaatcacaattcaggaaatgtgaaaatcacaattcaagaaagtgcaaaatcacaattcaagaatagtgaaaatcatcattcaagaatagtgaaatcggacattccagaatatccaaaatcacaatctaataatactgagtatagtgatattgaacataatgagaatcaatctatcgatctatcagagggcgatgtgatggagcgaaagaaacattaccgaaacatggtacaggagcagatttattataagagtttgattcaaaatccacg

SEQ ID NO: 7099 - DNA, 1348 bp, Unknown
  gut microbiota DNA sequence
accccagctcagatagcgtactgaggatggtgtgaaacgtcctgcctttgtcatgcgaaagcagtccgggaacattttcaaggatgaaatacgcaggtcgcttgtctgcaaccaatctggcaatctcgaagaacagagttcctctggcatctgcaaatccttcccgctttccggcgatagagaatgcctggcaaggaaatcctgcacacaaaagatcaaagtccggcattcgttcagtttcgattgttcttgcgtcattgcaaaaccactccccttctgtgtcgaacagcaatcggtagttcttatccgcataagcatccacctcgcagtgtcccacacaggtaaaaccgcctgcacgtcttaacccttcccggaatcccccgatcccgctgaataaatcaaaaaatcgaatggttgcggctatcaacctcctttgctgagaaaaagcaggcggcatggtttcttttccacaccgcctgcaagttttatggttctatttgtttggcattatgcgatctcttcggtttcttccccggattccggaatctcttcttcctctgcatcctcagaaatttctgcatccgcctcttcctctgcggcttccactgtttcggtttccgcttcggtagtctcttcttcatagacatcttccgcagtttcttttgcttcttccagtctatctgtttctgcgttttcttccggctgttccagttccttccatttggcttctacctcttccaccgctttttcgatgatgcggatgataaaatctttctgtttgatgccttcctttgtgactgcccatttgactctctggaataattcctctgtgacctgtactgctaatgttcttttttccatgctttcttctcctttgttctccagtctgttaaagtgttcttcgatcacctgccggataaagatctgtgtacttgtttccctttcttcgatctcggctcgtaccttctcatgtaattccaccgggatctttccgcatatgttcttcatctctgccataagcgttttcccctttcgttttgttatacacaacatactccaaaatttgaaagaaagctattcacaatacccactaaagaatccatgtcaaatgtatgcaaaacccaagcatatccaacaatgccatactttccttgcccataggcctcaccccctttactcctgctccatctgaaataaaaaatccagcatctgaccgggaatttcttccttttcacatgctggcatccgttccacatcgccacattttaactcttcccgaacagcctcctgaatgagtctttttaaagtttccctctcttcttgttccaggatcacatccaccagataa

SEQ ID NO: 7100 - DNA, 4025 bp, Unknown
  gut microbiota DNA sequence
catgttcgctctggtgtttttccctgttctgccggatcctgtgttcccgttggttctgttttatagtactttactgtaaactctgccccttccagagaggcacttccctgtggtttattctggttggtctctttgtcaatttttccaagcagcactcccaccgggtctaattgtggaaggtctttcactttcaccaccgcagtccgtcctgctgtgacggtaaccggatgtacttttttatccaagacaaaccctttcggggctttaatctctttgacaaaataggtaccggcatccacttccaccgtattggagtttccctgcgcatcggtggtcagatctgcaatctttgtggtgcaggcctgctctttataaacaccatagattgcaccctccttactataacaactgtttccatctgtcatctccgggttagccgactcttttttaaggtttaaactgcctttctgatctttttcaatccacacaatatcctgtttatcgttatacgcaacataagcggtatactgatccatcagaccacgatctcggacaacctttacccaccgttctttcagttccacggaaatgttatacacccatgccagctggttgtaattcagtcctgtggtatatccgccatacaggtagccaatcacagcatgacagcatccgtaaatatccggaatgtgcgcctgcacagatggtgattcaaaatagggcttgctgacatcatatgccggtccacctatggagaccaacagcattgccttaatcaggtcattctctaattttgagacctgaaatacgcctgatggagtgggactgtttggttctgcacagtatcccaaatgggtacccgtttccgtctgtacactaaattccgttgtattccaggagccgtaagcatggggtgtccccggccggatcgttgcctgtgatcccactgccgaaaaaaagctgctccgatcctgtgtttccccttctacacgtgcctctccgattggttccttttttgtatacttcccaagctcttcttcggggatcagtccttccagcttttctttgagttcctggatgtctcctgcctgttcgtctggatccactgtctctgccgcccatacaggcatacttcctgacagcagcaagaccgccagaactgcagacaggatccgtttccattttttcatgcaagtttccctccttttttctttttgttcttcctgcaatagttcctgttaggaagaatccgcaatccggattcggttccgatatcgtctcatttttgctccctcccttcaaaatgggcgcaaaaaaagaacactctttcgaatgtcctttttctttcctgtcttttgtttatttgccttcccaaaactctgctcggatatatgcatcctgttcctcttctgtcatagcctcccacatgtcattccaggcattctccgcttccaactgctctaagggaaacggcagctcctcgttgggatcaatcagattcccctgataccaaaatggctgcattcgctctttctctaccatatgtactcctctctgctatttctttgctccacatccagtacagaaaaatccatcactgacagtttctgtccaggctggagtatcgactacataacgtgttccgtactctgccggatgctccaccgttctcgtcactgttttatagtactctatatgatgtccccctccttcaccagctaaggcatgttgttttgcatgtcctgatggatccgctgtacagtccgctccgcagacgttgcagcactcccatggatcatagacatcttctgtgactgtctctgtccaggcttcttttaccacatactgctcgttatgtcccacttccggatgattgactgtatgggtcttctcctgccaggtgtgggtatgctgtggtttttctggtttcgactctggctggctcggcttctgttccggcttactcggtttttgttccggcttagattccggctgactcggcttcgtctgtggtttgttgggcttctgttctggtttggatcccggttgactcggtttctgctccggtttggaagaagattctgtttttcctgtttctttctctgcttttaccgattctttcttatccgacttttctgccgatttcttattgtcagaattttctgacttttttgccgtagtttcctttttttccgctgtcttttcagacttggtttcttccttttttccagtatcctgtttcgtacccgttttcttattagaagttgtatccttcgaatccgttttcgcaatcttctgattggaggactttgcctcctgttttgtctctacctttgtctgcacagcagtatcctgattcgctgctacatatccgccgatccccaatgctgcaatcaaacagattcccccggcaatctggatctgtcgtttgtatcttttccacatttctttcattcctcttcgctcctttttctatacttttctaattttagtataccacctttgcaaggtgcattccaggttactttacgttactttaggttaccctgcgtccgcaaaatttacttccgaaaccgtttttcctgaaccgcttttcggaacatctcggcagatatttccggttgttctatctgtttctttacaaatccatcaatggaggtatcataaacaaagcgttttacttctctcatattccctgtttcataatatccaatcagctttgcaaaaaattccttctgacactctaccggaatacggagaacacctgcaccgccttgaatcatgatctgattggctgcaagctgcgccgtccgcttatttccatcaaaaaacatctgggaacgcatgatataaagcatgatcgtaatcgctctttcagtcacggacagatctgcattcataatcgcctgaatctccgattctattttttcataaattggaatctctggcttccaggatgttccaccaatactgacatctgaatttctcaaatccccagcatttgttacgattcctacaccaatttctttgtttaattgacgcacataacgcaaatctaatggataatctactgtatcaaacaaaaattcccatccatgttttaggttatttacttttacgatatcctccacacttaatccggcaacgctacgtccctcatagatttcctgtgtatctggaaaggtaaccgcaatcccttccaattttgactgggaataaatactatctacaatgtttcgctttgcataaaaaatattgtcttgttgctccattgagaatttatcttgaatcatcttctttttcctttcttaactcgcataaatctgacgaatttcctgttgttccttttctggaagttccgttatcaatctggccgtgtttccttgcaccattgtaccagtcggtgcatccgcttcctcgcattttaggaaaaacagctgtccttccttttttaaaattgctttttcctgatagtagccagatacatagtatgacataaaaccgtctccttttttcttgataattctaccactattttatccaaagcatatggattattcaagtctttcaaagccagcatttctaagagttagaaatcatacttgttcagatattctcgaatcatatccctcctgttatttgtgatgttccgaatttcggaacaaacttaattttccttgtaatcatcaggttttgcattttctcccttagttttttgggtctgtagtactgtttccacgcctgaaaaaacgaacaggaaaagcgccgcataaccagcaatcgtatacagatccttccacagatgaaatttcataaacaatgctacaattaggagcaaataaaatatttccaataaggaaacctctactgaaaacttgttcctacaacaaatttccctatatcctatcataaataaaatatagattgtagcacctataataaatatccctgtcaataacatttcatagtctttctgagctatggatatctgaactggaacttctgttgtcaatattggatctgtt

SEQ ID NO: 7101 - DNA, 771 bp, Unknown
  gut microbiota DNA sequence
ccatattcgcattttccatgtttctcggaagttgctttctttttccatcattccatcctttcttttgctctcacctatcgaaaatattttcaagtccttccacttgttccgaatttcggaacggtgctattctcatatcctcctgattctgtgcttttctttcccaggcctctgaaacaggggttctgctaccgcttttgccggttccaatagttttgtccgcaaattttccagttctccctcctttgccatggaatgatacgttcctgtacgtccacctacaatgatatgatctaacacgtcaatccctaaaatatttccacccgcacacaattttgatgtgaccagaaaatcatggtgactcggctgcggatcaccagacggatgattatgtaacaggatgacatagctcgcattggaaaggattgcacttttaaacacttcccgtcctgttaccagggacgcattgatcgttcccatgctgacgatattcatgttgattacctggcttttcgttgtacagttcaaaatgcagaatacttccctgtcatactctgacaactcttttctcataaactgtacgacctgatccggagaggataactgttcttcactgtacaaggttttatccatgaccaactttacctgcacaacgtccaatcctttattcggcatcaaacgtcacctccaggatctgcccttcttccagattttctatcagttccttcaattcttccggagtgcacctaacttctttttctttcacggttt

SEQ ID NO: 7102 - DNA, 390 bp, Unknown
  gut microbiota DNA sequence
cgtgaagaaaagcacacagaaacaacgggaacagctcatgcggttattgaaagaggacaagttaggtgctaggagcattgatacgataaaaccctctgacgctaaggaatgggcattacgcatgaaagacaaaggcttttcctataacaccattaacaaccataaacgctcgttaaaagcgtcattctatatcgccatacaagacgattgtgtaaggaaaaacccttttgatttcaagttaagtgaagtcctagaaaatgataccaaagagaaagtcgcattgacagaggaacaggaacaagccctactctcattcatcaagacggacaatgtgtatcacaagtattatgatgatgtgctgatactgttaaagacaggacttcgtatctc

SEQ ID NO: 7103 - DNA, 426 bp, Unknown
  gut microbiota DNA sequence
atgccaagctgcccgtcaatgacgagcagagcgatatctgttgtatttaaaatctgctgtgttttttcgatacgcagagaaccaagctccccggtgtcatccagtcccggggtatcgattaaaacaacaggccccagaggaaggagctccattgcttttttgaccggatctgtggtggttcccttaaaatctgaaacaatggataccggctgtccggcgagggcattgatcaggctggattttccggcatttctttttccgaagatcccgatgtggattcgttcggcagaaggtgtctgattgaatgtcataaagctgctcctttctctagaaacggaaatcccggcggttattctgttcgatcagacgcagattttccagtacgaccgctcttgctttttcatttggtacatttaacacttcttt

SEQ ID NO: 7104 - DNA, 238 bp, Unknown
  gut microbiota DNA sequence
ccacccttttcaacggatgtgggttcggtcctccattgccttttacggcaacttcaacctggacatggatagatcacccggtttcgggtctactccgactgactatttcgccctgttcagactcggtttcccttcggctccaggccttcagcccttaacctcgccagccagcgtaactcgccggaccgttctacaaaaagtacgcggttcatcatataaagatgttccacagcttgta

SEQ ID NO: 7105 - DNA, 693 bp, Unknown
  gut microbiota DNA sequence
accgtaaatgcgatctgacataaagaatggttatcggatcttttcgtaagaagagctgttctaaatgttctttgccgtattgagttcccaaagccttctctgtaatccgtttgttccgatccggatggagataacgatatcttcctctttcttcaatgacggaaatctgatatttttcaaaaagaagagattgaaattcttgaaagcttttagaatgcgagctgcattcttcgatggcatttcggagttcctgcttctgcgtctgaaacattgtggcatttggtttcaatccatctgcaatgatttttttgttggtctcttctaattttttctgcccggatttttgggccatatattcagcctgtgtgatctttgtttcagccggagagagaagatcaacctgatgaagtccctcctggatgcacatatccataatttcctttttgaaataattcaggaatttatttgtggatcggtgtttgtatccggcaatttcttcatggggcttatccatgtaacgttgccttctgacagcttccttacggacgctgttgatcacaatatgcgtatggatattgccggaaccattgtgaccatcggtatgtgtcacgataagagcctgatatcccggaaatatttttttggcaaggtctaaagatagagcctgtgctttttctcccgtcagatcacatt

SEQ ID NO: 7106 - DNA, 14524 bp, Unknown
  gut microbiota DNA sequence
catggtgtgcagagcaaacatgtggggaccagcccgaagcgctttatggcaaacaaccaggagtatcacaggatgaccagcttttctgagatgggtgagcgcaccatgagagaaatctatctggcgtccttttagaggatggaggaatttgacagaggtatctttgagagtataattgaaaaggtaatcgttggcggttacgatgaaaacggagaaaaagatccctataaaatcactttcatatataaaacaggatttacaaacggaattggaaatgcaaagaagcggtttggaaaatccgctggtgtcggagacaaaacgaaaaaaatgtgttccgatgtcagtgacaaggtgaaggatgtgtattccaatgttagtgacaacacatgtggagactatcgcgttacttcagaagagcaaccgaaaatccaaacctgatacttatgtgaaattaagtttggatatggaagactattataggattatggatgctgagaaagtaggaaagtaaattatcatataggctctcggaattgtgagcttgccgaccaaattcatcggtcggatgaactttgaaaagtaaatattatccagaacggacatgaaaagtaataaatgatgaaatttggcgcacttttatagaccttgcgtcaaacatggcttataatggtattgcttatgaaattaagcgacttgctcaaagagatcttttagtcgggaagtctttggcaaagtccaggcatcgagatgttgacacatcatgatggcaaacaggcggcagtaccacatcatagatgaacggtatctgccgtcttctaatttatagtctattttttctcgtttgttacaacgttcagcagatgttcttgcattgtattccagtttccaggccttgctgttacgcggcggattattgaagagtcttgggttatcttttaatacaaggtgaacatttcttccatactttgcatcagaacaaggctcatcgcaagtacaatgagttgtacctcccttggctgtgatcttaggacaacgatatttgatacgtccttttctaggttcgacagcagcttgtttcataggaaatcccttaggacataaaggaattccatcgctgtttatggagatgtcatctttataaacaggaggtctgccacatttccagttcagatcaataaagggtgtgatattgtttgctttacagtagtcatagtaaggcatcgcatcatgcgcagaatccagaaggagtttagtaaccgttacttctggaagcatctttttcatggaaaaccagttgtataaaaaaccatgagagtcatgccttgaagcaggactcaggaaaggaaatacaggcaggtcattttcagaatcagaagcggtcaacatgtataagtcgtatccaaagtaataacgattgcggtgggaatcccaaccgatatcacagtctggttgatgatagatacgattgcatttgcaatcacggatgccgttttccagacagtcacaggttcttgtttttcgttcctgagcagacgtgtaaacaggagttccgtcaccggctaaggaaagagattttaaagagataagtttcattctggcagaattttgaaggaaaaaagtattaaaaatttcccaaagtttcgcacagggagccatatcagcaggtggattttcttcaaactgccgaaagagatcatcaacggtaagtttttcaacagaagaagccttttcttctttgccatttggcttttgaggttttactttaggtggatgaactgcattggtcaggtttttgtcagaagataaccaaagtcgcctgtgaaagtcataaaaggtaccaacgccgggagtattaccaacataaaagcctgaaataatggcatgcagatgattctctttcagatcagaagccaatcttgtgtaagaagttattttaaattcaacagacacaaggatagagcgaagcatgtcggaaggaagtcttggctcaggaccaaagacagaatatcgatcatacataagatcatcaatttttgacagatcaagattccaaaacttattgagaatctgccaggtagaagaagacaaagaagaagcagcattcggataatatttacgaagttgagtcaggacacgttcctgataggcggaatgaccgccgatgttaataggtttcaatgaaacacacctccaaatcaaaaagtctgtccggcagcgccggaacaatatgccttattaattaaggggcgcgaagcgccgcatttttcggggcaaatgtcaagtactttttgaaaaaaggtggagaaaaataaaaaatggaatctcagaagccagataaataaagggctagagattccgagagtctattcatatattagggagaaaatacgatgagagttgctaatgcgtgaatatgctggcaactcttttctgatattggcattaatatttttatgagacactgtaggttgagagtgtttttagcaaatagaattcaaatcgggtacgaaggtagatgtggagaagtgaattgtagatgaaaattggagcgctttgtggcttggggaaagctgcagagcactttttatgggaagaaaattattgaagtagctatattgtggttgtcaaccagatgatttataataatactaactaatggaggtggaagatggcaacatcggatatgataagagaactatgtgataaaaagcatattagtcttgcggaactttgcagacggattgggcaaacaccacagaattttaataaaaagctacagcgtggtacggtttcttttgaggaaatggtaaagattgcagaagcattagacgttggatatgagcaggcgtttgtgttgccggatggagaaaaaattcaattttaaataagtttgtgaaggagtggatcagtatgaaggaacattataaatataatcaatacacaaaacggaatgtaagacataaggcaatttttagtgcagtagagtttttaacttctaaaagagggcagtcatgttgtgttgaaagaaattatgtacgtaggttatatgattattttactttatcagaagatgtaagccaaaataaagcagaggcgcagaaaattgatgtttcctatataacaaattgggagaaattacatgattcttttgtggagagaaaaaggccggaagacttgatgatttgttttttgagtggtccagagccagataacgattttcaggaattaattaatcttggtatattgcctcaaaatatttggggatttgagtcaaataatcaagcatataaaaaggcaattgctacttatgagcaaggagaatacccacaaccaagaatcttaaaacagaatatagaaaccttttttcaacagactcccaaaaaatttgatattgtatacatagatgcttgtggaagtgtaccatccactcaacatgcattgagatgtgtgtcaacgctatgtcaaaatcaccgtttaaattctcctggagtgatagttacgaatttttccatgccagatataacgaaagaatctgtagatgattattatgagatagtatctcagtatttattttttaaaaaatatccctcattagaaattaaaatagatggaaatgggattagcaatttggaatattgtaaagtttttgaggaagtaaccaagaattttgaattatattatggtgagtttttatctgcagtgttgcgtgatataccagcagtcattataccgttacaaagaattgcacaaaatccatatttgaatcaactgtttgacttaacagatttaaacagagataatgaggattttataaatatatcgaatggaaattctgtggctaagtatttttttactgtaagaaagttattacagtgtggccttttgagtgaaaaaagccaatgtttcttgggggagataggaaattatgaggaattactaaggggattaaaaataattgttttgttaagaagagggaaaattaaattaaaggaagatgtgcaaaaaataaaagagtattttgagttagagaggaatttatatcaatttcttgacaagcctcatagtaatttattttttgatattgttcttaaccagctagcatatccaatgcataataatattttacacaacaagagatttcaatatatcgcaaaggagaattgtatgtttacagatgttacagtatatgatgagtgcagatatctttacgaatggttaccagggcttcatcaaatagtatcatcttttgaaaatacttcttggcagtatgtttttcgtttcgcattagatggactagtaaaaatgagacaaaattataataatgaattcttttttcaaggatctattgtttcaaatactgtagaagaattttcaagtaaaaagttgcgggatcggataatagtggattaatagtatactgtgattagggaggaaatttataatgtcgaatatacaattagattattcagatataatggatatttttaaagagaaattaaaaatagataatatagtaaaaaaagtatcgtctatttttttgaatcaaagatatgcaggaaaaataaactataagccgtattttcagagaaattatgtttgggatgaggagaaagcaacgtattttatagagagtattttgttgggaacagaaattccgccacttgttttatttcaaactaaagataagaatgaggtgattgatggaagacagaggtatgaaactataaaacgctttttggaggataagctcgttttaaaggataaaggattacataatttaaaagctcttgctggaaaaagatacagtcaattagattcggatacaagagaattatttgaagataccagaattcgtattttgcaatttagcgtagttgatgaacctaaactggatgaagaaaaagaagagaaaattaaaaaggaaatatttagacgatataattcaggtattacaccattgcaaaaatatgatatcgatagggccgcttatattaatgacaaattatcaaacttactttatgataaaatatataataatactggactttataattttttgtgcgaaataattcttcctaaaagtaagaaaaaggcaagtaaacgtgataaggtaaatatcatagtttcactggtaagaaatttaataacacttccgtttgttccgatatttagttattcgaaagggagttcaaaagctgatatcattggaaaatattactattctatattagaaagtaaaagcgcagatgagatattagttgaatttgataatgttatcagttatttgtcgaaatttaatattgtatgtaaagaacgaaataattatttatgtgataataaattgttttatgaggtactttattgggcaatagatattgtattgcagaatggtggacaaattgaagatataaaaattgaacaagttttcgattatatatctggtgctagtgaaaatttaaaattgtgggataacataataaataatccacaaagaagtgtagaactaatttttgagtctacaggtagtcattattattcggcaatcaataatagatataaatttatagctaatatatttcaagacatctttaaaattgattatcaaaagtatatgaagaatccggaagccttttttgagatgatggaatgtacaagtgaaaaagatcaaatttcacattataaaattaataaaccattacctgaaactctaacgattgaggacattatttctgatatgaaaaaatccagatttttaataagaccggattaccaaagatcagaggtgaaaaatttgcaaaaggcttcatatttaatggaaagtattttattgggaatcaatataccgccactttttatttataaaaggaatgacaggataaaggaggttgtagatggacaacagcgtttacttacaattttgggatttttgggaaaaacttatatagatgaacgtggagaatctgtatgttctgataaggacaagtttaaattatctaaattaagaattttatccgaattgaatggaaaaacgatagatacagtagacgatgtctttgaagaaaagattttagaatttcctatggatataatagaaatagattcggaacaaaatccagattttagtcaaatagacttgtttttaagattaaatacaaagccgtatccgattaaagaaaatacttttgaaatgtggaatgcatatatagacaaagatatagttataaaggtaaaagagattgcagccagatatgaaaagaaggtttttagagctagagatacacgaatgaaattggaagaattaataacttctttagcatacattgattatagaatgaatcaaccccatgcggaaatcataaatgtcttaaatatttacaaacgaaatgatagaatgtgtgctaggataatgagtaaagataatgtcacaaaaacattaaatgatttatcgaatagcaatccaaaagcttttgtgacggcactagaaaatgtagaagtatttattgagaaaatattaatgttgatagagaataattctgaacaattgagggccttatttaatcattcaaaaaaggggattcaatataagactgatcaaaacttttattttttatgggcaattctttttaagacttctgtaagtgagattcaaaataataggcaaggagaatttgagagaatatctaaaattttttctgttatccaaaaaacacctgtcaattatacaactgaaatgcttttaagtgaattataataaatttattagtggatttgctcttataaaatttttgaagtaattgaggaaatgtaaaaaagtggacatgtttcttgttacgactgagaggttaggaacagcagtggattaagtcggtcgaatcgcctggcaaatgagacactttctattcgctcgtgtcatgtggaaactatcgcgttattccagaagaacaatcgaaaattaaaaccggatacgcatgtgagatttagtttggatatggaagactattataggcttatggatgcagaaggaaacacgtaaaatgagtgatttttagaatgtgttgaaaaagtgtaaaaactgtaaattggtcagatacctcatgactaatttaaaattaaatataatatagaaatagtaggaaaaagaggggaggtggcaacatggatttaatcaataagaaatttttacaagatatttccgaactgcttgatagtgcaagaaaacaagctaaaaccgcagttaacttgtctatggtttatgcatattacgagattggacgtcggatttacgaagaagaacagcaagggaaagaacgtgctgaatatggaaagtaccttctgaaagagttatcagattatttgctgaaaaaatttggaaagggtttttcggttacaaacctaaagcagatgcgaaagttttatctgacttatgtgaatgatcaaattggtcagacagtctctgaccaattcaaaaatttaccagcagtaagcaatggaagaaagtttttcctcagttggtcacactatttgaaattaatgcgtatttccgatgtaaatgaacgacatttttatgaaattgaagcagcaaagaatgactggagcctatcagaattaaagagacagttcaatagcgctttatatgaacgacttgtactaagtacgaacaaggacaaggttacttgtctggcaacggaaggtcagattattgaaaagccggaagatgctgtgaaagatccgtatgtattggagtttcttgggcttccagagttaccggaatattcagaaacagaactggaaacaagaattattgatcatttgcaaaaatttttgttggaacttggaacaggatttgcatatatcggacgtcaagtacgtttcacattcaacgaagaacatttccgagtagacttggttttttataatcgtttattgagatgttttgtgctttttgatttgaagattggagaattaaaacatcaagatattggtcagatgcagatgtacgtgaactattatgacagaaaagtaaaactggaggatgagaatccaacaatcggtattgtcttgtgtaaagataagaataatgctgttgtagaaatgacacttccagaaaataatacacagatttttgctagtaagtatcagacagttcttccaagtaaagaagaattgaagagattgcttgaggaacagaataatgagttagattaaaaaagaggagaaaacgctaaaattcggttgctcaatgaaaagacagtcgaaacggtgtgtcttttacaacgtaaataggcggttttataggctttaaggcgtgaggttcagcctatttgcaatccgcaaaataaaatgagtagaaaatgaagaaaagcggttgaacacactgaacaatcgtgttatattataaatgtaaagagaacaaccgcccactgggtgagttgaccggataaattgagaagcaaagccacccgaaccgaccaaagtatcagggtggtttttgctatgtattgctacttacaaaacgtaaaaacgaatgtaagcaatgcaagaatgaacattccgaaggctattaagtctttgaaatcaaaatgatttttgttgtccatcagcatcacccccattctttaagaatgaggtcaagccaccctgtaacacgattgttccctataagcattttaccatgtttaaataccgctgacaactcatgtaatcgtcatatacagggcaaccgcataaaaaatatccatatgggaaatgaaattctttggtggatatttttaaatgttctttgcaattttctgaaaaatcaattcctgtacatactcgaaatgacaggtatataacatgcttatctttttataagtcgcttttttatcaaatcgtgtatccaatttcatcaggttgtaacaaatctttcgaatcaaccattttcgattttccaatgtttgcaaattccggttaaactgagcaccattccgttcaatctgagcaacgtgttatagttctttcgtagtcataaataagattacgaaaggaggcatttttatgcaggactacaacactattattggttccattcagatgcgtctaaatggatgcactactcgttccgttatggattgatatcagattggatccggaacattatcatgctggaggtaaatttctaaaacaaaatagaaatatttatttgttgcccgttaaaaacggtattttgatgggcaataaaaacacgcccagatatatttcccttcaagctcagtttgagcaatgagggggatgtgttgggatactatgctgctgatttgaagcagcaccatttatcgaaacaggagatccgtatgatggtgatcactaaaaatcgtatcccaaaaacatgaattaagcgtctgtgcaggcgcttttttggtatgacgggcatgccgtgttctgtggtgaagaccacttaggcgtagttatcaatgaactttatagcaactctcaaggtttgtatcgtcaggtacaggtgataagaagggataaaaaacgggatacatgaagtgccttgtagttttaaaatggctacaaggggcttttttatgggggcatctcttgtgcttatcgaccagagagtttataattgtactgtgctgatggaggtggaaaatgacaacatcagatataatcagagaattatgcgacagaatgaatatccgtcttgcggaactttgcagatggattggacagactccacagaattttaacaaaaagctgcaacatggtaccgtttcctttgaggaaatgatgaagattgcagcagctttaggtgtaaggtatgagcaggcgtttgtgctgccggattgtaatgaaataaaaataggaagtaaataaggagctttttgtagaattcaaatataaggaattccaagaaagaaggttgagaaaaaatacctcagtgtaaaataagattatcctatcaggtaaagtctaaccaactgccggcactgagtccttggagtcgaaacagtaattacagcttctgcactgcatacaaatttgtagaaagtgaggccgcatatgggaagaaaaaataacaatgatttgttttttacatgtagtttgattgagtatatcggcagaagggtaaaaaggacaagacgggatgtagtagaaacacttggaaaggaacggttggagcgtatttatgagtatgcagatgtttttcattgcgaaccgatagaaaaagtggcagatgaatttatagaagaaagtagattggaacagggcacatttgataatgagaaagagtgcagatatttaattcctgactactgggatattggtgaggtgtatgaacgattgatagaggattcttatatggacgatgaaattgtaaaaggtatttgggaggtttatcattcatggattgacgaacacatctcagattacaatacagatttttattatcaatcgagagattatattgcagcatgttatgaagaaggcgaagttttattatgaaaacgaagggaacgcccagaataggggaatcagttgaagaattgtatcagagatgagggtgtaaaagatgagtcgaaagtcaaaagttgaactgacaaatatgtgtcttatatatgacgaaaaccgaattcttgttcaggaaaaggttggtacaaaatatgaaggaggtcttgtatttcctggaggtcatgtggaagcagaggaatctttgagagattctgttattcgtgagataaaagaggaaacaggtctgacgatatcgaatccgcagccatgtggttttaaggattggattgaggaggatggcacaagatatcttgtgattttgtataaaacaaaccagtttacaggaaacttaaaatcatcggatgagggaaaggtgttctgggtagagcgggaagaacttgagagcctgaatctgatatggaatatgagagagttactggaaatttttgatacggatacatacagtgagtttttctttaaactggagaatggagagtatcatggagaattgcttggataagcattctcgtgaaaaatcttttaagatgagactggcatatgacaaggagacatcatttgtgttaataaagtgctttaaaattcccatatcttctatttctacttgaaaaatcaatgttttgacgtataatagtattcggattgttgcgtacaaaagatgagggagattatcatgaaaagacgatactttttttctcgtgtagaccgacaggttgcattactgttgggtgcgatgttaatcttgttcagcgtttcgatatatttcgtaagcacccggatctattaccgggcgattctggaaagccttacgggtcggtgtagataatatacagaattacattgaacatcagctgactccggagtcgtttctggagattgacagcaaagaggatatgaataaagaatgttatcaggaattgaaagaacggatggaggaaattcgtgatatcggggatctgagatacctatatacagcaaaacgaaacgatgaaggaacgctggtatatgtggtgggcgggctgccggaagatgccgatgatttccggtatccgggagatgcgatcgaaccggaaatacaatcggagtgggaacgtgcattaagcggggaaacggtattgccggagaagattctggatacagactggggaaatatttttattgcttattatccgttgcataatgaatcaggagaagtcgtcggtgcacttggaatagaagttgcggcagatatagaagccgaggcggtacatgacaaatccattatacagagacatggcaaatactgattttatgacagaactaaagaacagaaattcttatgagacagaccggcagaacctggatgcaaagaagaaatggaatggcctgacagtggcagtgatcgatgtgaacaatctgaagctggtaaatgatcggctggggcatgctgtgggtgatgattgtattgtgaatgcagcacgggtcctgcagagtgttgaatctcaaaaagttacggcgtatcgatacggcggagatgaatttatactattattagaaaattatccggaaccggaaaagcttcttgtccgtgtaaaagaaaaatttgcaaaatacggggataaacaggaagtgcctgttgctctggcagcaggttatgcacagtttgacgaaaatctggatcaggagattgcagatacacagagacgtgcagatgagcagatgtatcaggataagatgaaaatcaagagatcgcaggaaaagcggggtaatgtggagaatggtcactgatgttaaaacatgagtggccgtttttttatcttttatgatacaataacagcatcaaaaaacagggaggtcacaatgacaattggaattatagaagatgatagtctgttgaatcaggcattggaaattgcgctgcaaaatgcaggatattacaccatatctgcacatacaagaaaagaagcgcttgacttattccggaaaaaggtggatgcgtttttcattgacattggtctgccagatggaaatggaatcgagttgtatcaggaattacaaatggagaaaagaattccggcaatttttttgacagcgcgggatgaagaaaaagaaatgctgctggcatttgatgctggtgcgcaggattacgtggtgaagccattttccatgaaggtattgatgaagcggctggaagtggtattaaaaagaaatcctgaagaaaggtatatggtaggggaattgacgctgtatccggatagaaaacaggtttttatggggaaaacagaactctctctgacagccaaagagtatcagcttctggaatatctcatgcggaatcaggggcaggtgctgacaaaagaaaatattctggagacaatctggggtgtggacggacaatttgtagtggacaatacagtcagtgtcaccatcaatcggctgcgcaggaaaatagaaccggatggagaacggcagggatatattcagaatgtattcggactggggtatcggattggagagaaagagcgatgagatgggaaactgtagcgctactggttttcggatttttatgtgggatgacggtgatgtatattctgaacagaagacagagaatacaggaattcaataagatcgcagaaattacagaagatattttaaatgaaagaaaggtgcaggcattttcaacaggagaagaaacgctgtactctaaattggagcatcagctggtgcgtgtgcaggaaatgcttcagggcaggagtgaggaagcggagagaagcagggatgaaatacagaaactgatctcacagattgcgcatcagatgcgcacaccactgatgaatatggaaacatatattggttttctggaggatgggaaggaacagatgtcagaggagttgttttttcaatccgttgacgcattgaagaacagtcagggaaaattagggtttcttgtggagagttttatccgaatggcgcggctggagcagcatatacttcagataaaaaaagaagagccggatcttttaaaaacagtaagaaatggatttggacagatacaaagaagggcggaggaaaaagagattcagtttcagattatgctgccggaacaggtgacttgtctgcatgatccgaactggttgggagaggcgttttataatatactggacaatgcagtaaaatacagtgagtacaaaggactgatcaaggtggatgtccaacagaaggaaaggtttgtgaagattcaggtgcgggattatgggattgaaccgggagaggaaaatgcagtttttcagcgattttatcggggaaaacgtgtaacgacccaggatggctttggaatcgggctgtatctggcaagagaaattgtcagcaggcatcagggctttcttatgatcagaagaaaagaaaaaggagtattgatagaaataaatcttccttccggattgttagaagtttgttagattttgtatgtatactaacagcgaaaaaggaggaggaaaatcatggaaatggtaaaagcgatcgggctgaaaaaatattatgttacagacagctatgaagtccatgcattggatggagtgacattttcggtggaagatggagaatttcttgcaattgtgggaacctcaggtagtggaaagacaacacttttgaatttgcttggaggtctggatgttccgacagaaggcggtgtctggatccgcggaaaaagcttgaaagatatggtagcagaagagcgaaccatattccgcagacgaaatatcggatttgtatttcagcagtacaacctggttcccatgctcagtgtgtatgaaaatattgtacttccactgtggctggatggaacagggatcgaccaggaactctttgaggaaatcgtgatgctgttgggaattcagaatcaactggagcggctgctcggaacgctttccggaggacagcagcagagagtggcgatcgccagggcattaatgacaaaacctgcagttgtactggcagatgtaaactgaaccccatgtgcttactgtacata

SEQ ID NO: 7107 - DNA, 3181 bp, Unknown
  gut microbiota DNA sequence
ctcgaattcatcccatgggattcggtcagccagtctgacccagcggttatccggattcatgtggagtcccataggttggttgaaatcgaggaatgaatgctgtaacttgtcgatcggtttgtacattgttttagcccctttatacttaaaatctgtaagaaaactgcaagaaaaacgatttgtttttgtcaaaatccttgcaatcattataccagaaaatggggcaaaagtcagtaaaatcaagtgttttcagtttgctcagcagacactatatagtctactggcgagaaaaagaacacgagaagtatttagagcaggtggacaggaaaaaccacttgctctttttttcagcattggatcatgacggacactttacagataatattgttgatgaaagtgttgatgtagaaaagattgttgaaacacagatgatgattgaagcagtaagaagtgctataacaaggctcaatgcagaagaaagagatattattgaacgcttgtatttcaatgatgaaactgttcgttcagtagcaaagctcaaaagtattacacatccggctttaatcaaaagaagaaacaaaattcttgaaaagctgaaaaaatttatcgaagaactttaaaacttcggtaaccaatatagtgggatgagcagacagaagcagaaaatatgcagagaaaacagtcgccggcattttgtctgagcggatatctggacaaccgggcagaaggatttccagatatccgtcagacgtggcatggaagcggaggaagtatttattttctgatcagtgagaaaggctttgcaaagattccgacagagaaaaagacgctttacatggaactgaatgtagaaaacaaaaaagaggcagaggttcggaaagaaattcaaaatattttggaggaagaaaacaaaaggcggggaaacgtgtccgcagcaggagtagaggatcagagtggagaagcgggaatcttctgtatcagcaagtcggaattactggaaaatgccaaagattatatccagggaaatcggattatttttggaagtatcagtattgtgctgctgatggcaggagtgacgaattacttaaatatcgtggttacaggaatcctttccagaaaaaaggaactggggatcatggaaagtgtgggaatgacgaaacggcagaagcgtatgcttttcatgatggaaggcggatactatttttgtgcggtgatagttctgcttgtgacaattggaagtgtcatgttacaatggatcaaaacgtatatggaaacaaaactttcgtattttgtatttcaatatccgttgatctggctggttgtcggcctgtgttgtctggcaggaatcagttttgcggttcccgcaggactgtatatgcttgaaaaaagtcactgtgaacaataacaaaaaaggaaggagaatttacatgtttgagagaattgattacagagtgatcagaatagacggagagtatgcgtatctgcaaaaactggaagatgaaaatgcagaagaaaagtgtgtggcaatggcactgctccctccggagattcaggagggctgccatattgcatatgagatgatggaatatcggatgataaaatgataaatcttgcaagattactttgacagaatctctgtctggtattatgataaacatcagaaagaccagaaaggagtgcacaggaccagtctggggcggctgtgcaaagaatgtgatgaaagtaataaaaaataagacaatctatacggggaatggagtcattgaggatggatttgtaagatatgaaaagacgatcgccgaggtaggctccatgcagaattttgtgtcaagagaagaggatgagattgtagaagtggaaggaatgtatctgattccgggattcattgatgtacacagccatggaggatatggtctggacagcatggatgcatcggcagatgagattgactggatggtcagacagatggctgcaaaagaaggaattacttcttatttctgcacgacgatgacgcagacttcagagaatattgaaagtgccatgaagaatatcaaagcagcggcagagaagaacccgatcattcagggaatccatctggaaggaccgtttatttccgtgaattacaagggtgcacaggatgcatcttatatccagaagccggatgcagcagtcttaaaacactggaatgaactgagcggaaaccggattaaaatcgtgacttatgctccggaagaagcggatacagaatttgaggattggtgtcttgccaatggaatcgtgccaagtgcggggcattctaacgcgacttatgatcagctttgtggctgtcgtgcatgtcatgtgacacatctttataatgcgcagagagggctcaaccacagagaaccgggtgtgacaggatatggacttttgacagatggtgtgaaagctgagatgatctgtgacggaatccatattaaaccaaagatggtatacatggcatacaaagtaaaaggcagtgacggaatcgaattgattacagattctatgcgtgcaaaaggaatgccggaaggaaagagtgagttgggcggtcagaccgtttatgtcaaagacggcacagcgagactggaagacggcacgattgcaggaagtgttcttacgtatattgatgcgttccgaaatatcatgaaatttacggatgcttctttaaaagaggcagtgcagatgagttccggaaaccaggcaaaagaattcggactgacacaaaaaggtgagatcacagtcggaaaagatgcagatttcgtgattttagaaaattctcaggatggaaattatgagttgaagaaaaccatcagtatgggagagattatagaagcataaaaaagaggaggaaccgtttgagacggtcctccatttttataactggaagattcttgtcgcaatattgaaatagatcaaaatggaacaggtatcgaccagtgttgtgatcagcggggatgccataatggccggatccatatgcagtttttttgcaaacaatggaagcagacagccgatcagtttcgagatgatgacagtagctacaagagaaagtccaattaccagcgcaagtccggcatttcgatacatgatcagaatacgaagtccattggcgagtgcaagtactacactataatggtatcgtaatttaagacacttcaag

SEQ ID NO: 7108 - DNA, 325 bp, Unknown
  gut microbiota DNA sequence
gattattattatgtctcgaacaagaagaaatttctctgccaaattcaaatcagaattagtgattgaactgctcaaaggagaaaaagacttaaatacaatcgcaaccgaaaacaatattcagccgaatcttctccgcaactggaagaaggagttcctcgataaagcatccgtggtttttaatgacacacgagaggataatctgaaagaaaaactcgctttagaacgcaaggaaaaagctgaatatgcgaaaaaagttggccagctcaccatgcaggtggattggttgaaaaaaaaatctgaagaaacacttggacctgactacgag

SEQ ID NO: 7109 - DNA, 840 bp, Unknown
  gut microbiota DNA sequence
tcacatcatggttcttcaaaaataagtatgtgaaatctgtgcaccatttttgattgattttatccgacataaaattctgctgaagtttgttttcaaacaccttgtgtggttttctctgttcataatctgttttttggggacgaacgatggatctcagtcccaactccgcattcatgtacttatgtatggttgcagggctgtagtgatatcccttacgtgccagatagactgtcatgctcctgtaaccatcgacaccattgtgttcatgatagatttcatgaatctgtgcctggacttctgctttatgggcgtgataatccgccttccggtgtttccggtagttatagtaagcgttcggataaattttcagccgtctaagcagccagcggataccgaatgtctcatgatattggtcaataaatcgataagcctctaatcgatttcctttgcgaagaatgccgctgctttttttaagaagagattctccttttttgcttcttccaattccttacggagacggaggttttctttcataagttccagatcattaggagcatctggattctgctgggcttttgtatggcattcttcgctaaattcagcacaccatttggagatactggcttttgatacaccatactctgcagtgatgcttttgtaagtacgtccctcttcgatatgaaggcgaacgattttctttttaaattcaggtgtgtaactttgtgacataatacttcctcttttctctgtaagatgattatatcttattagccacttctgttacaactttattatagcacttcagtgtttaccgcccgaaacagttgcagagaaagtgag

SEQ ID NO: 7110 - DNA, 404 bp, Unknown
  gut microbiota DNA sequence
aattcataaagtgaatgaaagcaagaaaaaaacaaaaagtaaaaaacagccggagcgctgataagaaaggatgatgcctatggaaaataccctgcagttagggaacttattgaaagaaggaacatacccggaggaatataccggagggaaaaactggacaattttacatggagatacgctgaaactggtgaaagcatttcagccggggatctttgatgcagtgattaccgatccgccttatgcgtctgggggaacaaaacagaatgagcgaaaccgcacgactaatcagaaatacagcagtatgaaggcagagaatgcactgccggattttgatggggataacaaggatcagcgttcctggacccattggatggcagagtggctctacgatgcgcggaaagcct

SEQ ID NO: 7111 - DNA, 278 bp, Unknown
  gut microbiota DNA sequence
acttcattattcaacacttcaatacttccgctgatatctccgtcttccttatctgtagctgttaccccttccaatacatcaaatgcgtctccttctgtcaatactcggtcggatgcatcgatcaccggcacttcattcagcacttcctgttttggattcacagttacataaatcgtctttgttgtacttgctccctgactgtctgttactttatacgtcacttcatagataccaacttttgttgtatccacttcattattcaacacttcaatacttcc

SEQ ID NO: 7112 - DNA, 757 bp, Unknown
  gut microbiota DNA sequence
tgggtggaaaaactggattgtatgagatgggtattcccatcaaggagaataccaagcagggatataagatggcgtatccgggagacagcattgacttaggatatgcaggcatgaataccagaagagggcgtgtggggcatcagatcgcccatacccttaccacaggaatccagcagggaacgcttcattttgtggatctgtctgtgccgcctcttgtcacagagcagtgcaggtgtctgaataccagacagtccggcatccataatcataaaggggaatgctccggtgtcttaaaagaggaaggtgccagggcagtgctgactccgggaagagaagaaacccggcagaatggccggaggatgaaggagccggaagagccgatgttcaccattactgccacggatcggcatggagttgcctatcggggtagaatccggaggctggtgccaagggagtgtctgcggctgcaaggcttttatgactggcagattgaccgcatagaacaggagacttcggacagccagctttataaacaggccggaaatggagtgaccgtcaacgtgatcgaagccatcggaacgcttcttcggcaggcagatgcagaaatccgggcagaggatgaaaagacaaagaggtaaggcagtatggcaattggaattcaggatcagtattttggtacagagattgagatgacagggatcaccaggcagagggctgcggagaaagtggcagagctgtttggaacaagggcggtttg

SEQ ID NO: 7113 - DNA, 904 bp, Unknown
  gut microbiota DNA sequence
gtttcgcaggatctaaaacgtgcattctggaatctggatgaggaagaacgtctgattgtttcattttcggtatttggaggttatcaaagcgatgagattggacagatgcttaagatgaatccgacaacggttcgttccagaaaaaagagagccctggagaagatgcgagtggttcttcaggaagtggaggtataaggatggaaaataaaagagacagacattttacagaagaggaaataaaagacaagatcatgcagtcagcagaggggatggaagtgcctgattctttaaaacctgagaatattgaaaagaaactggcacagaaaaagaaaaaacggacaccggtttatggaattgtggcagcagcggcatgttgttgtattgtagtcggagcagtggcattttccggacgtggaatgatgcaggacaaggaagcacaaaaggcagcggaaaagactgcggacgatacagtcgctgagtcgactgctgcgttggcaagtgcgaaggattatgatcagatttacgagtacgttcaggcagcggcagaagaggaagagatcatgtatggcacagggagagctgatggagcggctctttatacaggggagaaagcagtcgctgatcaggctgtatcacattccgatacgaatgtgcggacagagggggtcggtgaaggtgatatcgtcaagacagacggaaagtatctgtatatcatgagcatggataaggtgcagatcctgaatattgaatctgaagagatgaagcaagcaggaaccatttccatggatgcgaatgattatctgatcgagatttatttaaaagatgacaaactggtgtgtgtgtatgcaagaacaacggataagacagacagtcagggagtgattcgaagtgtgccatatacggt

SEQ ID NO: 7114 - DNA, 568 bp, Unknown
  gut microbiota DNA sequence
ttccctgttctgccagtctactttcatgttcttttattccttcaatgatcctccaccattcctctttggaacttttcaaaccgttttctttgctgctgtcttctggaatttcttccgaatcggcagctaccagctcacaattctcctgatcgagtacatcactgttttctatataattcatttctcctaatggaatttcatctaaatgatccttcgcgtattccagtgcctccgggaaggtttttattgcttctggcagcaataattccccatgataataagcattacagagaatggagcaggaaagtttttgtgggatattcgttttatccttgcaaaattcaatcgtccaaatcaggttttcaggtatatgctccatttctggcaaatacatactgcatgtctcttcctgaaattcccactgagttgctttcccaaaatcaatccagcttccttttccatgatttgcacaactgacttcatgctccggctgcccggatataacagagtaaaaaccattgctttgtacaatgttgggaactctcttctgtccaagaaatttctcatg

SEQ ID NO: 7115 - DNA, 310 bp, Unknown
  gut microbiota DNA sequence
ggtattacagcattccatagcagaaaagatatggatcagaccttccgtttttccggtttcggcaatgatgttctggatgcggtcatcttttcgaaaagcatggagttttcggataaactcaatttccattccattttcgtgagcaatcttttccgcattctgacggacctgttccgtaaggggctgggagaaactggtgggataatcaaaaatacggataccgttgagtttcatataggcagtcattgcttccgcatggctccagtttgggatatatccctgaatgatcatgcggtcataacaggtaatg

SEQ ID NO: 7116 - DNA, 681 bp, Unknown
  gut microbiota DNA sequence
gatcgtagctgataatgtagtggtgacttttgatatcttcacgtttcttatttttgtgaaaatgagcatttgtcagttcacattccttgtcaaaagacatcggatcacagttcagtccatccatataaaactcttttcgtaggatgcttcgtccggattcatctacaatctttttcccggttttttcatcatgttcaaacagaaggtaattgatagcagctgaataatttgcatttctgcttttaatgtgttttacgattgccattcataccacctgccagtttcagtacctcttttctcagtaggaataagtcagtgatgcactgatggatttcattttctatagcacgtgactgactgccaccgctgttaaaatgcttggcaatctgattgagattcgatccgatttttccatattcactgaccagttttctgagatcgttcatgtctgcaacaacttcaatttggtgattgatttgcttttcaagtagtagttttctcagatattctgatcggctaatggacaaacaagctgcaccttgatctaataaatcaagttcgacatctgtaagacgtaatcctataaaatgtctgtgattcagttctttatctttgttttctgttctcatattcctcctttcgctacgattattcctcccactgggagtccacgtatttcaa

SEQ ID NO: 7117 - DNA, 248 bp, Unknown
  gut microbiota DNA sequence
gtacagacagatcacgggaatcaaaaaagttgaatccgcgataggttcgttccttttccctccgggaatgactgacttcatccaatttcttcctgccgctgctgtgatcatcaaaggatgagataaattcaaggtatctgtaattcgcagatttcaggattgtgaataactgatataagctgtaaatactcttttttaaaggggctttccgaatatcggatgttccatccctatgctgaacttcccgc

SEQ ID NO: 7118 - DNA, 405 bp, Unknown
  gut microbiota DNA sequence
tgaaagaagcagtcagttgtaccttgaaaattgcatacaaagagaaatatcttatgaaaataagagagttgaattaattcaacaagacatccgaggtaatgttaacaacattataaaaaaacaaactattaccaacgcatgtaacgctatacatgtgtagatgagagaccaacccgtgtttcttgtcagttggttatgctaataagagcgtatggtggatgccttggcactaagagccgatgaaagacgtgataagctgcgaaaagcttcggggaggagcaaatatccattgatccggagatatctgaatggggaaacctacttgagaagacctcaagtatccacagcccaatccataagctgtggaagggaacccggtgaactgaaacatctaagtagccggag

SEQ ID NO: 7119 - DNA, 501 bp, Unknown
  gut microbiota DNA sequence
ccatcgctcaacggataaaagctaccctggggataacaggcttatcactcccaagagttcacatcgacggagtggtttggcacctcgatgtcggctcatcgcatcctggggctgtagtaggtcccaagggttgggctgttcgcccattaaagcggtacgcgagctgggttcagaacgtcgtgagacagttcggtccctatccggcgtgggcgtaggatatttgagaggagctgcccttagtacgagaggaccggggtggactggccgctggtggatctgttgtattaccaaatgcatagcagagtagccaagccgggacgggataaacgctgaaggcatctaagcgtgaagcccccctcaagatgagatatcccataacgtcaagttagtaagaccccttgaagacgacgaggtagatagggcagaggtggaagtgcggtaacgcatggagctgactgttactaataggtcgagggcataaccaagcaaggtgataggaaa

SEQ ID NO: 7120 - DNA, 221256 bp, Unknown
  gut microbiota DNA sequence
atacaagctataaattctgcgtcctctcttgagggaatgcaccagtattcatttttgtgaggtcgaagtttgttttttttaaggctctacggatagcatctttgctaaccggtgcatcaagcactactttggcttctttttccagcagacgcaaagtccatctggaatgaccttctggaacaggaccgcaggcaagttcaataatacgtgcttctgcacgtccatcaaggatacgccttgcattgtcggaattgatatttcttttgaactcggtaaccgcttcaatgccactggaaaaatatttggtcactgtattcgttacagttgtcaggcaaacaccatttgatcttgcggattgctcatgggttaatactttcccatgagcctcatccaaatcaataataatctggcatctgcttcgaatagttttagatgtattacttttgcgaattatagattttaatgtcttcaattcatcatctgtaagtttaatgacatattttcttggtcttgccatataaatcaccgccgttttcttttattttaacatgaagcgctataatagctaaaaatatttagttaaatatcaacaatacagtatactagctcttcttatggaaaataacacacagtacacaagtgtgcatacagttaaagcctctattttcaaggcataaggggataggggtacagtttacagatgaaccgacaggaaacctcgatgaagaaactgcaatgtccattatgcaaatactggaagacagtgtacaccagatgaacaaatgtgcagtcattgttactcattcaaatgaaattgcgaaaaaggcagatgttgtttttcaattaaaaaggggtacgctgcacatagtaaaaaataatgaaaaggtataaatggaaacatgggagatacgcaactattttgtgcaatctcccatgttcattttatgcaatcatttcttttctgtctctgactcccgaaacactttggatgccagaaatggaaggaagaagatactatagaaaataagatgtatcaaaaccgctttccattctatgacagctccggaaacagtgcctccactgatcagtcctgcaatattgttgttcataaaatgcaggatgacagggatccagatgttgtctgttttcatataagcaaaagcaaagaatacgctcagtgcaatacaggtgataagctgtgcggcaatactctgaagccttgtatcaggtgcatagtaaaacaggttcagcgggagatgccacaatccccagaatacaccaaggatgagaactccttttcgcattccaaaatgctcctgcaggatcggttgcaaaaagtaacgccatccatattcttctccgaaaaaggcggaaaagacgaggaaaaagctgacaaacaaagaaagcagtgacagccagaacatcggagaagcaaaaagagcgaggaaggaatctgcagtattgtctgtgaagctggaaatcagaagatttcctgtaaacagcatgaaaaacagaactacatacagaaagtgtcttctgctgtcaggcccggaccaggtcagtccccagataaagcggacttcacgtttgtcaagaagaaacaaaacccagagagccagattgccggcaattgtgagcatattgatgaccataacccacaggttggcatccggtataagtacactgagtacagagctgatggcaaacagtacagttagtacaaggtacccatagaaaaaccgccggggcatcggaaactctgtttttgtcagaagaaagacgacaatggctccggcagccggataatacatctgggcatttgcaaaaaaatccagagaagttccccgttgatatccgaacgccatcgggattcccatcagataaggaatgccaaaggcgatcaaagcaaagattagtaactgttttttctccagtctggtaaatggacgtttcataatgtaatctcctttttctatatcttcagcattggctgtttatattcatttcgaaaagcggtcttatatttatccgtgatcacagactgatacagattggatgccaaaatatcatgtcggagcattttctgaccgatttcggagatactgtcagtatcggaaaggcgggtgagcagcggcagagcactttttttggcaatgatagaaagcagatcttgtctgtcttttcgaaaacctaaaagtttggcatagaaatgtccgccgttttccatatattctctcacgttgttttttttcagaccaagcataatatgcaaaagtgcgcgattgattcttgtctgtgtcagctccctggtctttaataattcacagaactgcttatagttaaagaaatcattcagattgttctggatccggttggcaagtgtttcggaaacatccatatagcgaatgagactctgaggtgttttgttcaaaagcttatatttcatcagaagcgaaaaatcgttctgataaaccggatataacactttgtgataatcttttaaaagtgccaggcagcttttgggcacctgatcttccagttcatttaaaatactggaaaatggtgtattttcgaaagtctctccggtaacctgctgtgtctggagtacagaactcgagtatgcaaggagagaacggatagcagaagccgaactgtaagtagagcgcagcgtctgatcgtggtagtcggattccatgcgcttgatagtaaacggctgtatcctgcttttcacacgtcgcaatgcttttaaatattcgatacccagaatgttgttcggatcacttaataaaaaagaacagtctgaaatgcccatgtaggaagacaacgcatcctggcgggcagcaggaaacgacatacctgctcttaaattttctttgagaaacttcgtatattcgtcaggctcatcacagaggatatcagcaatttttgtcagtccgtcaagatcattgcattcactgccaaagcagaggtaatctacaacgccaagctgatccagaaaggagacagctcccaacgcaaataattctgcagtggcggtcgcatagcagacaggcagctcaaagactgcacaggcaccgcattttaatgccatttccgcacgaagatgctttggcataatggcgggagtccctctctgcacgtagtctccgctcatcacgacaatggctgcatcggcgcctgtgacttccagtgatttttggatatgatactggtgtccgttgtgaaaaggattgtattctgtgattaaaccgacaattttcataaaaatctccttgtatatcattttattacctattatactataaaaggacggcaagaacaaatcaaaaaaggtggatgtgattatggaatacgatgtattgttatcaatgctggaaaagcgggagtttaaagaattaaaagatgaactggaaaacatgcaccctgtagatattgtggaaatgctggaggatggactggaatatggaaagatcgataaacgccagatgatcctgctctttagactgcttgcaaaagaagaggcggcagaagtgtttacagacatgaccagtgatactcgagaggtactgatcaatgcgctgacggattccgagctggaagaagtcatggaagagatgtatgtggatgatacagtagatgttctggaagagatgcctgctaatgtggtggacagactgttgatggcgacagatgaagagacgcggcagaagatcaatgcgcttttgaattatccggaagacagtgccggaagtattatgaatatcgattatatcagtctgaacaaagagatgactgtggcagatgccattttgaagatccgtcaggttggtattaataaagagacaatctatacctgttatgtgacagaaaagaaaaagctgatcggtgttgtggatgtgaaggacattttaacatccggtgaatccagaaagattgaagagatcatggatgagaatgtcatttacgcaaagacgctggatgatcaggaggaagtggcagagacaatccggaagtacggactgatcgcgattccgatcattgaccatgagatgtgtatggtcgggattgtaacagtagacgacgctatgttcgttttgcaggatgaggcgacagaagatatcagtatcatggccggtgtcagtccgagtgaaggctcttatttcggaacctcggtatttcgacatgccaagaacagaagtctctggttaatgcttctgatgttatcagcgactgtgacaggagagatattggggcgatatgagagtgcgatggcagtaatgccggttctgatcacatttatcccgatgctgatgggaacaggaggaaactgcggatcccagagttctacactggtaattcggggaattgcagtaggtgaaattgagttcaaggacatttttcgggtgatcttcaaagaggtgcggattgcacttgtagtcagtttgattctggcgatggtcaatgggcttcgcatctatattatgtacgatcaggatgtgatgctggcagtggcgatcggaattacgatgattgctgttgttgttatggcaaagacgatcggttgcgttttgcctctggctgcaaagaagatcggtctggatccggcgatcatggcggcacctttgatcactacaattctggatacctgtacgattctggtatatttccggatcgtaactgcgtttttccatatctgagatatattgacagaaaaaagacgatgtataacggagctttttggagtggactctaaaaagctccgttttttcttgaaaaaacggaaaagtcctgaaaaaaataagtaaaatactcgttaaatgtttgacgatattactgaaaagcatagagaaatagagaaaattgtacttaaaaatgcacataagagctacttgtatacaaaatttatttgcgttataataaagcaagtgaaacaaatgaaaggggctttaaacaatggcgtttattgatgaaattaaagcaagagcaaaagctgacaaaaagacaatcgttcttcctgagacagaagacgtaagaacttaccaggctgcagaggcagttttaagagaggggactgccgacctgatccttgtaggaagcaaggaagagatcgaaaagaacggagccggatttgatctcacaggagctgtgatcgtagatcctgctacaagcgacaagacagagagctatattgcaaaactggtagaactcagacagaaaaaaggaatgacagaggagcaggcaagagagattcttctgacaaactatctgtactacggtgttatgatggtgaagatgggagatgctgacggtatggtatccggagcatgtcattctacagcagatacacttcgtccgtgtctgcagatcctgaagacaaaaccgggaacaaaattagtatccgcattctttgtaatggtagtgccggattgcgatatgggtgcagacggtacatttatttttggagattccggactggagcagaatccggatcctgaaaagcttgcaaatatcgcactttcttccgcagaatctttcagaactctgacaggaaaagagccggttgtggcaatgctttcacattctacaaaaggaagtgcaaaacatgccgatgttgataaagttgtagaggctacaagacttgcaaaagagatggcaccggaactgaaactggacggagaactgcagcttgacgcagcgatcgttccggcagtaggagagtccaaagcacctggaagcccggttgcaggacatgcaaatgttctgatcttccctgatctggatgcaggaaatatcggatacaagcttgtacagagacttgcaaaagcagaagcatatggtcctctgacacagggaattgcagcaccagtcaacgatctgtcccgcggatgcagcgcagaggatatcgaaggtgtagtagcgattacagcagtacaggctcaggcacagtaattgtttagaaaacttaaaatcagaatgaataaaatgacaaaattttcaggaggaaaaaaatgaacgtattagtaatcaactgtggaagttcttctttgaaattccagctgatcaatgcaaaatctgaggaggttctggcaaaaggaatttgtgaaagaatcggaattgacggacgtctgacttatcagccggaaggtggagaaaaagaaaaatcagaaaaagcaatgccgactcacacagaggcgatccagtttgtgatcgaggctctgacaaatcctgagacaggtgttgtaaacagcctggatgagatcggagcagtgggacatcgtatggtacacggtggagaaaaatttgcttcttctgtagtgatcacagatgaagtgaaaaaagcggtagaagagtgcaatgatcttgcaccacttcacaatcctgcaaacctgatcggagttgcagcatgtgaaaatctgatgccgaacacaccgatggtagcagtgtttgataccgcattccatcagacaatgcctccaaaagcatacatgtacggacttccatatgaatactatgagaaatacaaagtaagacgttacggtttccacggaacaagccacagctttgtttctaagagagcagctgagttgttaggaaaagcatatgatgagacaaaaacgatcgtatgccaccttggaaacggatctagcgtaacagctgttttaaacggtaaatccgtagatacatccatgggactgactccattggaaggacttgtaatgggaacacgctgcggagatatcgatcctgcaattatggaatttttggcacacaagctggatctggatgttgacggcgttatgaagatcttgaataaggattctggagtatacggactttccggcggactttccagcgatttccgtgatctgacagatgcctctctggcaggcgataagaaagcacagatcgcaatggaagtattctcatacagagttgcaaaatatatcggtgcatacgtagctgttatgaatggtgtagatgacattgtatttacagcaggaatcggtgaaaatgatgatatcgtaagagaacaggtatgcagctacctgggttaccttggaatcgaattcaatacagaattaaacaaaggactcagaggaaaagaaacagagctctcaatgccgggatccaaagtaaaagtgtttgtaattcctacaaatgaagagcttgcgattgcacgcgagacactggaactggtgcgcaaataagcttctgaaaattttaaaaagtcagtagggttgcccgcaaaagcggacagcccttttcagcggaggatactgtttacagcagccggtgaataaaatataaaaatcttgttgacaaataggattaacatgatataatagtttaggtatgaataggagtaatgattatgttaattaacctatcagacgttttgtcagaacagcataagacagttgatgagacggtgcagttggagatggatacgtttcagtccagaacaggtacatttccgattgtgagtaaagaaccggttcatgttgttgcagagcatgtgaaaggcagagagcttcttattcatgtggatacagagttatgtattctgattccatgtgacagatgtcttgaagatgtgaagcaggagtttgacctgaactttacgaagcatgttgatttgaatgtttcggatgctgatctgggagaaggattagatgaatcaaacttcataagcggatatcatcttgacgtggacaaaatgctctataatgagatattgataggatggccgacgaaagttctatgcagtgaagactgtaagggcatttgcaacgtttgtggtcagaacctaaatatgggtacctgtaactgtgaagatacagctcttgacccaagaatgtcagttgtccgtgatttgtttaagaattttaaggaggtgtaacctatgtctatctgtccaaagaacaaatcttctaaagcaagaagagataagagaagagcaaactggaagatgagtgctccaaacctggtaaaatgcagcaaatgtggcgagcttatgatgcctcacagagtatgtaaagcatgcggagcatacaacaaacgtgaaatcgtttcagttgactaattgaaaatgatattaaggaatggggactttgcaaaaaagtccccatttttcgtatcttaaaatcagccttttatattgatttttgggatgatgtttagtagaatgtatgcagtagcgttaggaggaagagaaatgtctgatattacaagagttgcactggatgccatgggaggcgatcatgctcccgcagagatggtaaaaggtgcgatagaagctgttaataaaagagatgatattaagattctgcttacagggcaggaagcactgctgaaaaaggcgttatcagaatatacttatcccaaagaccggattgagatcattccggcatcggaagtgatcgaaacggcagagccgccggtcatggcgattcggagaaaaaaagattcttctatcgtagtagcgatgaatctggtgaaaaagggcgaagcagatgcatttgtatctgcaggaagttccggggcgattcttgtcggcggacaggtgatcgtaggaaggattaagggcgtggagagacctccgcttgcaccgctgatcccaacgatgaagggagtatctctcctgattgactgcggagcgaatgtagatgcaagaccgtctcatctggtgcagtttgcgaagatgggatcgatttacatggaacatgtggtaggaaagaagaatcccacagttggaatcgtgaatatcggtgcggaagaggaaaagggaaacgcgcttgtaaaagagacatttccgcttttaaaaaactgcagggatattaactttatcggcagcgtagaagcgagagatattccgtacggagctgcggatgtgatcgtttcggaagcgtttgtagggaatgtgatcctgaagctgtatgaaggtgtcggcggagctctgacgaagaagatcaaagccggcatgatgacgtctctgcgcagtaagatcggtgcgcttcttgtgaagccggcactgaaagctacattaaaggattttgatgccagcgagtatggaggagctcctcttctggggttgaatgggctggtcgtcaagactcacggaagttctacttcaaaagaagtatgtaattcaatcatccagtgtgtgacatttaaaaatcagcagatcaacgagaagatccgcgaatcgatccagtccgcacaggaagaaaaaaaagaagattaatgggacaaagaaaggaaagaaaactatggaatttgaaaaattacaggatattatcgcagacgtgctgaacgtttctaaggatgacattcatccggagactacatttgtggatgatttaggagctgactcactggatattttccagattatcatgggaattgaagaagaattcgacattgagatcgacaacgatgaggctgaaaagatttcaacagtgcaggatgcagtagaccagattaaaaaagtagtagaataaaaggcaagaagagatttttgtctctggcgatcggtttgggtgcgtgattctgtcgcgcacccaaactgtattattcaggccggaacaaaaagttttagataaagggaaaaatatgaagaaaaatttaaaagagctggaaaaaaagataggatatgagtttcaggatttttcattgctggagcaggcgatgatgcacagttcttatacaaatgaaaagcatctggaaaaatatcattgcaatgagagactggaatttttaggggatgcagttttagagctggtgtccagtgaatttttatttcttgaatcaccgaaagtatcggaaggaaagctgacaaaaacaagagcgagtatggtgtgtgagccttctctggcattttgtgcacgggagatcgaactgggcagttatctgcttctcggaaagggagaagaagcgacaggaggacgtcagaggccgtctgtgacatcggatgcgatggaggctctgatcggcgcgatttatctggacggtggttttactaatgcaaaagagtttattcatcggtttatcctgacagatctggagaacaaaaaactcttttatgatagcaagactattttgcaggagatcgtacaggctgatatggaagagggaatctcttatcacctgattaaagaagaaggtccggaccacaacaaatctttcactgtggaagtgaagatcggggagactgtctatgggacaggaagcggacggacgaaaaaagcagcggaacaggaagccgcttacaaggcaattctgaagctgaaaaaacaaaactaaagcgggtgttttatgtatttaaaatgtattgaggtacagggatttaaatctttcgccaatcggattaaatttgagtttcacaatggaattacgggaatcgtgggcccaaacggaagtggaaagagcaatgtggcagatgcagtccgctgggtgctgggagagcagagagcaaagcagcttcgaggcggttccatgcaggatgtcattttttccggaacggaaaacagaaagccgttgagttatgcttcggtagccatcacactggacaactcggatcatcagctccctgtggattattcggaagtgacagtgacaagaaagctataccgctccggtgagagtgagtatctgatcaacggaaccggatgcagactcaaagatatcaatgagatgttttatgataccggaatcggaaaagaaggatattcgatcatcgggcagggacagatcgataagattctgagcggaaaaccggaagagagaagagaattgtttgatgaggcagccggaattgtaaaattcaagcgccgcaaaacgctttccctgaaaaagctggaagaagaacagaacaatctgacccgggtcagtgatattctctcagagcttgagaaacagatcggaccgttggaaaagcagtctgcagtggcaaaagaatacctgaagaagaaggaagagctgaaggtttatgatattcatatgtttcttttggagacagagcgtttaaaggatcagcttcagggtctggaagaaaaagtccggattacttctgatgagatggaagcggcaaagagtcgctatgaagaaacaaaagaacaatatcaggctgtggagacacaggtggaagagattgatgcagcgatcgaaaaatcgaagaaccagctgaatgagacaacgcttttgaagcagcagctggaaggacagatcaatgttttaaaagagcagatcaatacagccaggatcaatgaagaacattatgcgaatcgccgccgtacgatccagcaggagtgggatgccaagaaggagcagaaagccggatttgtaaaggacagcgaagcgatccacggacagttggagcggatatccaatcaggatacggatgcaaaagagcagctgatccaggtgcagtcacagattgcagaagagacgatggagatcgagcagagtaaagaagagattatgcggcttttgaataaccgggcatcgacgcaggcgaagatccagcattttgataccacacagcagcagatcacgaccagaagggctcagatccacagagagattctggaagtgtccagtgaggcagagcagtatggacgggaattagagcagcaaagacggggattcgaagagatcacagcggagattcaggcgtttcaggatctgatctctgtcaatgaacagaacatcgcagagtttcagcgccaattggatgagaagcaggaaaaattgcggatcggtcagactgcatatcacagagaatcctccagactggagtcgctgaaaaatattacagaacgatatgacggatacggaaacagcatccgtcgtgttatgagctgcaaggaccgggaaaaaggtctgatcggtgttgtggcggacatcatcaaggtagaaaaagaatatgaaattgcagtagagacagcgcttggaggcagtatccagaatattgtgacggacgatgaagagactgcaaagcggatgatcgcatatttgaagcagaataagtacggacgcgcgacatttctgcctctgacaagtatgcagggcggcgcagagctgtggcagatggatgcactaaaagaaacaggcgtgatcggacttgcccatacgctggtgcatgtggaagagcgttttctcggactggcgaaacagcttctcggccggactattgtggtggagaatattgactgtggaatccggatcgcaagaaaatataagcaatccctccgactggttactctggaaggagagctgatcaatccgggaggttccatgaccggaggtgcgtttaagaactccagtaatctgttaagcagacgccgcgagatcgaggagtttgaaaaaacagtaaagctgttaaagcgtgacatggaagagatggagcactcgatcagtgcgattaaggcacagagagcagaatgttatgccgggattgatgagatccagcagaagatcacagaagcatctgtccgtcagaatacggcacggatgaatgtggaacaggtgcaaaggcagcagacggaatccagacaacgttgtgaaagctatgcaaaagaacaggaagaactggaaataacgctgcgggagatccgtgaaaacggggagtcgattcaggttgaattggaagcgtcaaaagaactggaagctgcactgaatcagaaaatcgaagaattgcagaagcagttggaaattcaccgcgaggcagaagctgcacagctgaaacagtctgaagaggtacatttatcgctggcaggtttgcagcaacaggatctttttatcaaggagaatattgcacgtatcgatcaggagatgcttcgtttaaagaaagaagccggagagctggatcagaataaaggaaatacagcggaagaaatcagtcagagagaagagaagattcaggatctgaaaaaaacaatcgaagaatccacagagatattttctgaaattgagacagaaatcacgggacagaccgaaaacagagaagcgctgaatcagaagcataaggcgtttctggaacaaagagaagcgctgtccggtcatatggcagagctggacaaagagttattcagacttgaaagccagaaagaggattgcgaggaagcatccgaaaaacaaatgaactatatgtgggaagagtatgagattacctacaatggcgctttgaagctgcgggatgagacactgacagaccgtgcatttatgaaaaaacagattctgtttttaaaaggagagatccgtaagcttggaaacgtcaatgtcaatgcgattgaggattataagcaggttgccgagcgttatgaatttttaaaagaacagcatgaggatctggtcgaggcaaaagaaacgctgattcagattgttgcagagctggacgcggcaatgcgtgctcagtttgaggaacagtttgcaagaatatcaaaagagtttgatgcggtcttcaagcaactgttcggcggcggaaagggaacgctggaactgatggaggacgaggatatcctggaggcaggaattcggatcattgcgcagccgcctggaaaaaaactgcagaatatgatgcagctttccggtggagaaaaagcattgacagccatttcgctgttatttgcgatccagaatctgaaaccgtctccgttctgtcttctggatgagatcgaggcggcactggatgacagtaatgtagaccggtttgcgcagtatctgcacaagctgacaaaacatactcaatttatcgtcatcactcacagaagaggaacgatgacggcagcagacaggctctatggaatcaccatgcaggaaaaaggaatttccacactggtatctgtagatctgctggaggaagatctgacctgatgtcagaaaaaaggaaggagagcatatggaagagaagaaagggttttttagaagacttgtctcaggtctgacaaagacaagagataatatcgtatccggaatggacagtatttttcacggattttccaaaattgatgaggacttttatgaggagctggaagagactctgatcatgggagatcttggagtacatactacgacggagattatagaggatctgcgccggaaagtgaaagagcagcatatcaaagaacctgctgcctgcagacagcttctgattgacagcatcaaagagcagttggatgtgggagagactgcttacgaatttgaggagagacagtccgttgtatttgtgatcggagtcaacggagtgggaaagacgaccaccattggaaaactggcagggaaattcagagagcagcataaaagagtcattctggcagctgcagatacatttcgtgcagctgctggagagcagttaaaagaatgggccaaccgtgcagaagtagagatgatcggcggccaggaaggtgcagatccggcttctgttgtatttgatgcagtggcagcggcgcgcgcaagaaaagcggatattttattgtgcgatacagcaggacgccttcacaataaaaagaacttgatggaagaactgaaaaagatcaaccgcgtgattgaccgggaatatccggaagcgtacagagagacgctggttgttttggatgcgaccaccggacagaatgcactggctcaggcaagagagttcaatgaggttgcagatatcacaggggtgatcctgacgaagatggatggaacagccaaaggcggaatcgcagtggcaatccagtcagaacttggaattccggtcaaatatatcggggttggagaatctattgatgatctgcagaagtttgatgcagatgaatttgtcaatgcgttgttttacagtgattccaagacggaagaaacagaagaataaaaatatgtcaaaatgacagaaagagggatggaagatgttgactttggagaaatttgaagaagcaagtgaagtagtaaaacaggtgacgactccgacaaagctggtgtacagcgaatatctgagcgcccaaacaggtgccaggatttatctgaaaccggaaaatatgcagcatacaggagcgtataagctgcgcggagcctactacaagatcagcacattgtcagaagaagacagaagtaaaggactgatcacggcatctgcgggaaatcatgcgcagggcgttgcgtatgcggcaaaacgttatggctgcagggcaacgatcgtaatgccgatcggaactcctctgattaaggtaaaccgtaccaaaagctatggcgcggaagtgatcctctatggagacgtctacgatgatgcctgtgcgtatgcatacaagcttgcggaagaacatggttatacgtttgtccatccttttgatgatctggatgtggcgaccgggcagggatcgattgcaatggagatcattcaggagctcccgacggtggactatattctggttccgatcggcggtggcggactgatcacaggagtggcgacacttgccaagatgctcaatccaaagattcaggtgatcggtgtggagccgagagaagcggcgagcatgactgcggcgttaaaggccggagaagtggtggaacttccaagtgccaacacgattgcggacggtactgcggtaaaagcggtcggaaaacagaatctgccatatgtgcagaaatatgtagatcagattcttctggtggatgatgatgaattagtcggagcatttctggatatggtggagaaccataagatgatcgtagaaaattcaggactcctttctgtggcagcattaaaacagctggatttgaaaggcaaaaaagcggtctgcgtgttaagcggcggaaatatggatgtgatcaccatgtcttctatcgtacagcatggattgatccagagagaccgtattttctcggttgcagtgcttcttccggacaagccgggcgaactggtaagagtggcatcgatcattgcaaacgaaaaaggaaatgtcatcaaactggaacataatcagtttgtcagcaccaaccggaatgcggctgtggagctgcgtatcacgatggaggcattcggaaccgagcataagcagaagatcttgaatgcgttaaaagaagcggggtatgagccgaagaaagtcggagcgaagctgtactaaacaatatagaagaaaaaattaaagtgtccgaatgacctgtgtgggagcggacactttttatatgaaaaggatggaaaatcagaagagaggcagtgtaaatgtatttagtatcgatttattttgatgaaaaaacgaccagtcgaatgcagggatacatcactcaggttgcaaaaagaagcggaaatccatttatgatcgagaaaaatgtacctccgcatttgacgatttctgcatttgaaacgcgaagcgaagatcaggtaatctcactgtttgaagaaacgagagatatgtttcaaagcggggagattatctggtgttcagtgggagcgtttttcccgaatgtgctgtatctttcaccggttttaaatacttacctgcaagaactgtcagagaaggtttataaggagttattgaaaacagcggatgtcaaggtacacaaatgttatcgtccgatgcaatgggttccccacgcaacgattggaaagaaactttctaaagaagagatgcttgcagcgtttcaggtattgcaggagcagtttggagtgttcagcagccgggtcgtgcggatcggttttgcaaaaacaaatccatatgaagagttgtggaattttgaattatgaaaatagcaagaaacaatttacccgaattgtacagactgaagtataggattttcggcaaacatttgttataatatagttgtcaggaggtaggaagagaatgtgcagagagaaaagaaaactcccgataggaatagaaaattttgaacagatcatcaaagatgatttttattatgtagacaagacaggattgatctctgaactgctccgcaactggggaatggtaaatttatttaccagaccaagacgttttggtaaatctctgaatatgagtatgctggaacacttttttctgtagagggcgacaagagcatttttgatggattgaagatttcgaaagataaaaagttatgtgaagaatatatgggaaagcatccagttatttccatctcactaaaaggcatcaatgctgcttcttatgaggctgcatttgagttaactgtcaagaccataaagggagcagtgcaaaaggcaggattccttaaaatgagtgataaactgggcgaggacgagaagaaagaatatcgagcgattcttgatgaaaatatgagtgaggctacgcttttttggagcttaaaaaatttgtcagaacttttggagaaacactatgaaacaaaagtaatccttttgatcgatgaatatgatgttccattggcgaaagcgtttgaaaacggatattatgacaagatggtttttcttatccgtaatttactggaacagacgttgaagaccaataacagcctgaaatttgcagtaatgaccgggtgtatgcgaatatcgaaggaaagtatctttacgggattgaacaacctgaaagtgttgtcgattacagatgagcgttttgatgagtattttggatttacggatgaggatgtcaaagaaatgctgcggtattatgatcgggaagatcattatgaagaaatgagaaactggtatgatggatatcggtttggtagtacagatgtctattgtccatgagatgtattgaatcattgtgataaaataaaagagaatgctgcggcttttcctgaaaattattgggttcataccagtagtaatgaggcagtcaagaaaatcattcaaatgtcaggaaatattacaacaaagcgcgagattgaacgtttgctggcgggagaagaaattgtcaaagagattcggcaggaacttacttatcaggaaatgtatcagtctgtggaaaatatctggagtcttttatttatgaccggatatctaacacaaaggcagcgactggatgccagtcattacaaacttgcaattccgaatctggaagtacgggatatttttaaaacgcagatcatggaatattttaaggaaggtgttgcaaaagacggagatacgttaaaacagctctgtgatgcactgaaaggcggagatgcagaaaaagtagaacgtctttttgaagggtacttgaaaaagacaatcagtattcgagatacatttgtggagaaatcattaaaagagaatttctaccatggaattttgctcggcattttaggtgtcaaagaagactggggagtattctcaaacagggaaaccggggacgggtacagtgatattatgatagaaacagaggacagtgaaatggggatcatcattgaaatcaagtatgccggagacgggaatcttctgaatgcctgcgaaaaagccctgaaacaagtagaggaaacgaagtatgaggagacgcttttagaaaacggagtggagaaaatattaaaatatgggattgcttgttatatgaaacattgtaaagtcatgtgttcggagagataacaggcttgaaacattggtgaaatataaaatgggaacttcacagaatggattaaaatgaagtttttttgtgaaggttggtaaaaagaaacggagaggtggattatggcatcaagtaaagaatatttgcaatttattttagggcagttgtctgagttggaagaaatcaattacagggcaatgatgggagagtttattctctattatagagggaagatcgttggtggtatctacgacgacagactgctgatcaaacctgtaagctcagcgatttcctatatgccgacaatttcttatgaattgccttatgaaggagcaaaagaaatgctgttagtagatgaggttgatagtaaacaatttttgacaggtctatttaaggccatgtatgaggaattgcctgcgccaaagccgagaaagaggaaataaaaattgaaatcgatggaggtagttggatgacgttttatgaacagatggtttcccactttctgctttgctggaaaaagacgagaccttaaatgcaccaatttatggaacgctgctgcaaaagagggatcactcctttggatactttggcctgacagaaaatgcattgctggtatcttttggggtatatttatagtatttcagctaactatcttcatgtaaatattcgaatcctattttttcaagaacatgttggctacgagtatttcttaaaaccacatcagcataaatggccgataatcctaattctttaaatccgtactctaagacagttctttccaccgctgtgtcatagcctttttctttatagcaatcttgaataagcacaatggaaagggtgccactacctttttgtaagtctatgtttttaaggtatacatcaccaattacaatatcatctaataatatagcaaaccatactctgttgcaattatttgcttttctttcaaaatctttttgagcgatctctggcgtataaatgtaaggtgtttcgcacatcataggatctgctatataattttttctttctatatgatacaactgagacgtcataggtattaatacaattttatcgtcaacgattaattttttcatgtctatattactcccttaacttccattaatccaagatattttttatacggaaagatgccttaattatactgtgagattctttttttgtctattgacgctatttatgaattacaggaatgcgtctatctctttttagatttcaaattgttcgcttggtatcaaataaagttttcttgacttttatctattacagttgtaagatttaatagaaacttacaattgtaatatttgagaggatatgtgtatgaagcgaaaagtgattgcactactggttatatgtgtgatggttctatctgggtgtggtaagacaactccggaagaaaagagcgaggaaactgttcaagatattcagcagaaggagattgctgatgattttgaagagttgatggaaggaacgagagaattatatgaaaaggcagcagaaaacaagctgctggacagtctggagtttcaaaagcaagtaattgattatctgggacaaaagggatatgccgcagtagatatgaaagatcaagttgatatggttcattcagagcaggtggaaacatattgtgagaaggcaaaaaggggagaatcggcagatgtggtgatatattctgtcatagaacagggtggtgtagttcgttatgaactgcatacagatggtgatgatatggatgccattgtcagcacagttcgctggacggataacaaaccctgtatgatttattatcacaaatttaaggtacattcctggaaatatacagaaaaaggatattttttcatcgaagaatatcatcttccgggatttgacggaccgccgggagagaaaggatttcgtgtaaaaccgttggatcagaaacttagagaattaaatcaaaaatatgtacttccaattggatataggttgaataatatgctgatcacaaactggaaggaagaggattattcaaacctgaatttttatgatctatatgaattaaagtatccgagtatctatggaaaagagattccgtatgcgatgaaagagggggtggaatatcagataccgaaagaagagtttgaaagtgtattacaaacactttttccaatcacgagtgagcagattcagaaaaatgcagtttataatcccgatacgcagagatatcgttatcgtccgaggggactccatgattgtgagtttccttatgaaccgtattcggaagtgatttcttatgaagaactgggtgatggaaaattaaaacttgtggtagaagctgtttggaaaattgaaatgctggatcaggcatttcgaagcgaattagttgtggaaccacttgaaggtggaaaaattcattatgtgtcaaatacaattttgtcaccagaagaagatgagccgaggtggtatgtaccaagattgacagatgaacagtggagagaggcttatgaaaagggatatcatcttccgattaaaaaggaagagcgtgagaaggcagaaaaagacagtattgctgccttgaagttggttcaagatatttacgctgaagcggataagggagatgcatcgaatgtagttcttacagattctgttatggagcagatgaaaaagatactcggcagagggggagttccggtaattagttctgaggaatactctgttatggaaaattatcaggtgatggaaaacttcttacacagttcggagcagggagttgaaggaaatgtaattttatatgatattttacaagacggaagtattgagagaagaaaatatctttatgacgggaaagagatgtatctgttagcagtcagagcagtttggaatgaggaaggagatccggtgattgcatatcgctcttacacaagaatgaaagaatggagatacacagaaaagggatggtttgcttatgaattgtgtgtaccggaaccgccggaagtatcagaaattgtggatggaagttgtatgatcagggtaaaaccgttagatgcagaatgtattgaattgtcaaaaaaatgtgtgttgccattgggatatcaaggaaataatttactatgttctaattgggatcgtgaacatttagaggggctggattacaatgggctatatgaatacctctaccagatgaaatatcaaaaaagatttgttatggaagaaggaaaaaatggaatccccgcagaggaatttgaacaactgatgtcagaatatcttcctgttactgcagaacagttgcggaatatagctacatttgatgcagaaaaacaagagtatgtatgggcaaagcttggatgtggcaattacgcaccgactcattttggaacttctttaccagaagtaataaaagtagaggaacatcaagatggggcgcttactttgacagtggaggcggtttgtgatatggtcatttccaatgacgcagtgattacacatgaacttactgtgaaatttcgagaggatggaagttttcaatatttgggaaataaggttttagaagatggaatccatcagattccacaatatcagtatcgaattgcgaggtgacatccgattgaacaacaaaaagaaccgaacaggagttatttttgaaatctgtcggttctttcgctttttatttcccaatatttaattccgagagcacagaagttgtgatttcggttgctttacttccggtagtttcggtttctccctgaatatttgttgcaaaataatatacattgtctgcggtttccaaaaaaccgataaaccagccatttacatcttttccctcaatccgcccagttccggtttttccataaagagaacttttggaaccggaagagagaaggatggaatttttgacagcgtctatattttgtggagcaaattgaaactcgttgtcatggaatttttttaacaggttgacctgctcaatcggagagatttttaaagataaatctgtccagtataagtcgatgtctgaaccggtctgttgatttccgtattgaatcttctgtaaaaatgattttacagagtgaaatcctaattgtgaatcaatggattgaaagtaccagttcacagagtttttcatggcagaagataaggtctgattggcttcccatgcatcgaatggataatcttcgccattccaggtcatatctgaatcttcaggagtgatgataccggattctaaaccgagtaaggcatcgtatatcttgtaagtagagtttggggcgattcgttctttggcattttcgatgttaaaaatattccaggcgttttgatttgtatcatataaaacgaaactgccttgatagccattgaaatgattggaaagatcaatggtggaaatatttttcatatcgtttggcaatcggtattcattttgcggagaacctgcggcatccagtacaggtgcatagctcaatgatagaaatgcaatgaggatataaatgagaaatccccgcgcttttccccgttttgtttctttttgaaaggcagcgatattgagaatcctccgtttaatctgcttcatacttccactcatcccggttgcataaggaaaaggaatgtgagaaattttttcggcaaaattgatcagtgtgtttccataggcctgataatctgtttcgtcaagaagatgcagcacagccgaatcacaggaaagttcacgatcacatcgcatttcctttaaggcataccagacaaaaggattaaaccaatatagaataccagccaaattcataaggaaaacaatgcgcgtatctttttgacggcaatgctgtaattcatgcaaaagcatgaagcgcatatcctttgcattaaaatctgaaatcaaatgaatcggaaggtaaatgcgagggtgtatgagccccacagtaacaggtgatttcaaaaatgcggtactgtatatcgggattttctttttgcaatgcatctctttacaacagttttcatagagccgttttacttgttgattttgtaatggcagtgcagattgttccaaagtgcggagccttaaaaaagaacgtgcagctaaaacgaacattgtgacagcaccgacagcccataaactaaaaaggagtaagtgaacaggagaggatgttttactgctgattgagactgcaaaatcatttactttttcaatggcagaatgttcttttatgaaaacctgtccatcaggaacagagagaaaaagtcttttcggaaaatctgaaaggtgcaaggctggaaatttctgcaagatagagaaaatgtttgcaggtaaaaaagggacagccatgaaactgagcagaagaaaccaaaggcgatactgcacgcgggcagataaacatttccgcaataagtgttttatgcctgtcatgattccaatgaaaatggaaataaaaatattgcatattaaaaaatggattccaaaatcaaacaaataaattcctcctattcgtgagtatcagagagaagatgacgcaaggtatcaagttctgttttggataatttatcatcttctaagtaagaggtaagcatagaaacgatgtttccattgtaatatttgtttaaaaaagaattgctttcctgacggatatattcagtttccggaactaaaggggtatatacaaagactctgctttgtttttcataagtaagtgctttttttgttacaagccgcttcaacattgtttgtattgtctttggactccagtcggttgtctgagtcagtttttcagtcacttcatttgtactgatgggagcatacttccaaatgaccttcatcacttcaaattcagcttcagaaatttgtggcagtttactcatattcattcctccaagtcttacatatgtaataaaaatattataaggggattttataagaaagtcaaacaatgaaaaatattgacagaaaatcttacgtctgtaataatataaatgttatgaatgtcatttcccgattttgcagggcggtgtctgcagcttcatatccagctttatgatgtgtaagcccatcttacaaacagggacacaaagcgcgaaataagaaattcaggaggtgctgtgaagggatttgaacgaaaaagttgatagaaaatataaactccggaaagaagttaaaaattctctccggagtttatgcgttctgttttatctatacctgatgatatttctggagcaatttatggatcttatctgttggattcataacagcaccgatcgtcagatcgtgattcagggaatcaatgatcagagccaggaatttactcatgtctgccttgacaaagtattctctttcgtctacagcaggcggcagatatgtcaggttggttgttacgactttatcaagatatccctttttgtagtactcatcgaatttttcaaatccgtctgtgaacagtccgaatgtggtgcatacgaatacgcgggctgcgttgcggtcttttaatttctttgcaacatccagcatactttcaccggaggagatcatgtcatccacgatgatcacatctttgcctgccacatcatctccgaggaattcatgtgctacgatcggattctttccatttacgatagtagagtagtctcttcttttataaaacatacccatatccactccaagcacgttggagaagtatacggcacggtgcattgctccttcgtcagggctgacgatcatcagatggtctttgctgactttcagatccggaactgcacggaagagtgctttcataaactgatactgaggagtaaagttgtcgaatccgctcagaggaatcgcattctgtacacgcgggtcatgtgcatcaaatgtcagaatgtttgcaacgcccatatcttttaattcttccaatgccagagcacagtccagagattctcttttggttctcttatgctgacggctctcgtaaaggaatggcatgatgacattgacgcggtgtgcttttccggtagacgctgcaatgacacgcttgatatcctgaaaatgatcgtccggagacatgtggttgaggtgtccgttgacagagtaagtcagactgtagttgcatacatctgacataatgaagagatcagttccccggatggtctctttgatcacaccttttgcttctccgcttccgaaacgcgggcagttacattctaccagatagttatttgtgcggtaattcacatacaatggggactctgtcacctcattgatggtgttttcacggaaagatacgatatagtcgttgactttctgtgccagttctttacagctttccaatgctgcaagtttcaatggagcaactggaagggttttttccaataattcaatatttgccatgattttctcctgtgttttcgtttttccatatccgacctccggatatgcgatttcatatatcgttatatcattttttgcagggaaattcaagcatggctttgctatagaagaaaattatgctatactggtactgttaatatgccagaagtatgagcagacaggaactttgtttcggtaaaaagcaggagacaaagtctaaaaatagaagaagtacaaggagtttgaaaatgaaaaagcacgagcatattgtgaagtctctgatgcccggcgggattggagaagaactggggatcgagccgggagataagctgcttgccatcaacggaaatgagatacaggatgtatttgactattattactatgaagagagtgaacagcttctgcttctgatcgagaagccggacggggaagagtgggagctggaaattgagaaggatgaggatgaaagtctggggatcgagtttgaccagagtctgatggatgagtaccgttcctgcagaaataaatgtatgttctgtttcattgaccagatgccaaagggaatgcgggagacactatattttaaagacgatgattcccgtttgtcatttttgcagggcaattatattacgttgaccaatatgagtgatcatgatgtggagcgtattgtaaagtaccgtctggagccaatcaatatttcgttccagacgacaaatcccgaacttcgctgcaagatgctgcacaaccggtttgcgggagaggcgctgaaaaaagtagatattctttaccggggacagattgagatgaatgggcagatcgttctctgcaagggagtaaatgacggagaagagctggagcggacgatccgggatctgacaggatatctgccgtatttaaagagtgtttcgatcgttccggtaggactgacaaaatatcgggacggactgtatcctctggagccgtttacaaaagaagatgccagggaggtgctttctgtcatccaccgctggcaggagaagatctatcaggagcatgggatccacatgatccatgcgggagacgagtggtatgtgctggcagaggaggaggtgccggaggaagagcgatatgacggctacctgcagctggagaacggtgtgggaatgatgcgtctgttgttcaacgaagtacaggaggcgctctctgcagtgacaggcgatggaaggcagcgggagatttctctggctacgggacgtctgatgtatccttatatcggaaaaattctggaggagatcagaaagaaattcccgaatatcaccacacatttatatgcgatccgcaatgacttttttggagagcggatcacagtatcaggtctgatcacagggcaggatctgacgggacagctgaaaggacagcctctcggggagagacttctgcttccgtgtaatatgctgaagatcggagaaccggtctttctggatgattttacgctggaggaagtggagaattctttacaagtgaagacagatattgtaaaatcaagcgggcaggatctgctggatgcagtgatcggtgtttatgagaatgatgatttcagcacggacagaagaagaggcagatttcaggaaatgtaagattgaatggagagaaaggtagttgaaaatatgagtaaaccagtagtagcgattgtaggaagaccgaatgtgggaaagtctacactgtttaatacattagccggggagcggatttcgatcgtaaaagacactccgggtgtaacaagagaccgtatttatgcggatgtatcatggttggacaaagaatttacgatgatcgataccggcggaattgagccggacagcagtgatatcattctttcacagatgagagagcaggcgcagattgccattgatacggcagatgtcattgtgttcattaccgatgtgcgtcaggggctagtggatgcagattccaaagtggcagatatgctcagacgttctaaaaaaccggttgtgcttgttgtcaacaaggtggataattttgataaatttatgccggatgtgtatgagttctataatcttggaatcggggatccagttccgatctctgcggcgtccaggctgggaatcggtgatatgctggatgaagtggtttcgcattttccggaaggagcaggagagaccgaagaggacgagcgtccgaagatcgccattgtcggaaagccgaatgtgggaaaatcttcgatcgtcaataagcttctcggagaaaaccgggtgatcgtatcagatatcgcgggcaccacaagagatgccattgatacggcgatcaaacacgaggacagagaatatatttttatcgataccgcaggactgcgaagaaaaaataagatcaaggaagaactggagagattcagtattattcgtacggtgacggcagtagagagagctgatgtggtgctgatggtgatcgatgccacagaaggggttacagagcaggatgctaagattgccggaatcgcacatgagcgcggaaaaggtgtgatcatcgttgtaaacaaatgggatgccattgagaagaatgacaagaccatgaaacaatatgaaaatgatatccggacgacacttgcgtatatgccatacgcagagatcatgtatgtttctgcaaaaacaggacagcgtctgaataaactgtatgatatgatcgatatggtcattgacagccagacacttcggattcagaccggtgtgctcaatgagattatgatggaggccgttgccatgcagcagccgccgtcagacaagggaaaacgtctgaagctttactatatcacccaagtatcggtaaaaccaccgacctttgtaatttttgtaaatgacaaagaactgatgcatttttcttatacccgttatctggaaaacaagatccgggaagcgttcgggttcaggggaacgtctctgaaattctttatccgggagagaaaggaaaaggatcagtagatatggaacgaattatctgtcttatcataggatatgcgttcggcctgtttcagaccggatattttgtggggaaactcaatcatgtggacatcagaaaaacaggaagcggaaactcgggttctacgaatgcactgcgtgtgcttggagtaaaagccggactgatgacgtttgtgggagatgttttaaaatgtgtcctgtcaattcttctggtgcgccagatcttcagtggcagcgactgtctgccgctgcttgcgatgtatacaggagcaggtgctacacttgggcataattatccgttttatctgaaatttaaagggggcaaagggattgcggttctggccgggcttgtgctttccaccaagctctggatggttccgatcccacttgctgcatttatttttgtggtggcagtcacccgctatgtttccgcagggtcacttctggtaacaattatttttcttgcagaggtgatatgtttcgggcagatggggggatttgcgatggcgcagccttatgtgtacgaattatatctggtgacgtttttactgatggcactggcatggtggaggcatcgtgcaaatataaagagactgttgaatggaacagagaacaaaatcggttcttctaaaaaatagagacgattaaaaaggaggcagaatatggcaaatataggtgtgttgggagcgggaagctggggaacggcactctccgtcctgttgcatgataatggaaatcaggtaacgatctggtcgatcgatcccgccgaggtagagatgctgtcaaaagaaagagagcataagacaaagctgccgggagttcagatctctgaggaaattcagattaccggagagatacaagaggcaatcctggaaaaagactttctcgtcctggcagttccgtctccgtttacaagagcgactgcgaaaaagatgagtccatatgtggcagaagggcaaatgatcgtggatgtggcaaaagggatcgaagagaccacgttgatgacactttccgagcagattaaagaagagattccgcaggcggatgtggcagttctttccggaccgagccacgcggaagaggtcgggagaaagctgccgacaacctgtgtgatcggtgcgacgacaagaaagacggccgagtatctgcagtctgtatttatgagtaaggtgttccgtgtctatacaagtccggatattctggggatcgagctgggaggatcattgaaaaacgtgatcgctctggcagcgggaatcgcagacggacttggttatggagataacacaaaagcggcattgatcactcgaggaattgcggaaattgcgcgtttgggtgtaaaaatgggcggtaagctcgagacatttaccgggctgaccggaatcggagatctgatcgtgacctgtgcgagtgtgcatagccggaaccgcagagccggatacctcatgggacagggtaagaccatgcaggaggccatggatgaagtgcagatggtagtcgaaggtgtgtattctgcaaaggcagccagaaagctggcagagaaatatgaggtgtccatgccgatcgtggagcagattaatgaagtactgtttgaaaacaagagtgctgcacaggcagtggatgaactgatgcttcgagaatcaaaaagtgagcattccgtgctgccgtggccggatgagacggtatagtttttttaaattcaaaagaatagagccggaataatcccctttgtttctgcatagattggtatcagcagaacaagggggtattttttatggatgcatttcaggtatacaaggatatgaaagcaaggaccaacggggaaatctatattggagttgtaggtccggttcggacaggcaagtcaacatttatcaagcggttcatggatcttctcgtgctgccgaatatgacggatgaacacgcaaaagagcggacaaaagacgaacttccgcagtcagcttccggaacaacgatcatgacaacagagccgaaatttgttccgaaagatgcggcatctgtcaggctgtccgaagacgtggaagttaagatccgactgatcgactgtgtcggatatatggtagacggggcgagcggtcatatagaaaacgatgtagaacgtcaggtgaaaacgccatggtttgaacatgagatcccctttacaaaagcggcagcgatcgggacacagaaggtgattcatgaccatgcgacaattgggctggttatcacaacagatggaagtatcggagagctttcgagagaaaattatattttggcagaagaaaagaccattcaggaattgaaatccatcggaaagccgtttctgatccttttgaacacacagaagccatacagcgaagaaacaaaaagtcttcaggggaaaatggaggaaaagtacggagtatctgttcttgcggtcaactgtgcgcagcttcggacagaagatattaatcagatcatgcggcaggtgttgtatgagtttccaatttcagaagcagaattttatattccgaagtgggtggaaatgctgccaaaggatcacccggtaaaaagcgaggtgctctccagtgtaagaaatctgctggatggaatggatgacattcgaagtgtggcagaggcggtaccggtaagtgacagcgagtacatagagaagatcaggatctctcagattgaaatggatacgggaatcgtaaagatccagatggacttgaaggagaagtattattatgaggtgctcagtgaactgacagggacgaagattcagggagaatatgaactgattgcagcgatgaaagaacttgctgcaatgaaagaggaatatacacagattaaagatgcgtttgctgatgtgaaaatgaaaggatatggtgtagttagtccgaagaaagaggaaattctgttagatgagcctgcgatcatcaagcagggcagtaaatatggtgtgaagatcagatcagaggctccgtctgttcatatgatccgtgccaatattgagactgagatcgcaccgatcgtgggaagtgaaaagcaggcacaggatctggtggaatatatcaaagcagagagtgagactccagagggagtctggggaaccaacatatttggaaaatctgtagaagagctggtgctggatgggatgcgcaataagattaatatgatcaacgaggagagtcaggtgaagcttcaggatacgatgcagaagattgtcaacgacagcaacggaggtctggtctgcattattatctgattttttttgcttttttctgtcggatgcttggactcttattctcaaatgtggtacaataaagcggcagagtgttctctgcattacagaatttagttgagaccggagtacaagaaaggggtacgaatctatgaaagcggctatttttacgttggatacagaaagttataaagcgagaaaggcaagtgcggcagggatggttttaaagaaactgctggagcagtctggctttgagactgctgccgtgcgcgtgattccaaaagaccggaaagtggcggcatcggtattaaaaagagtggcagaggagcagaccgcagagttggttctgacaacaggagcagcaggacatctcgagagcgactgtgctccatatgcactgatggatgtggcagaacgccttcttccggggatcccggagacactgcgtgcattccgcaaccgggattctctgcaggcggttctggactgcagtgcggcaggtgtgtgcaaaaagacgctgatggtaaatcttccgggagatgccaaagaggcaaaggaagcactggaatttattcttccggaattaaaacgtgcgattgagatgttgaacgtatgatgcgggtgacatatctcggacacagtggatttcttctggagatggaggatgccctgtttttgtttgattattatcagggcagtctccccgaaatggatccggaaaaaacattgtttgtatttgtgagtcatgtacattatgatcattataatccggacattttgaaattgcgccgtcagagacagaacatctggtatcttttttctgatgatgtgccgatgccggatgaacagaaacaggtaatccggctgtcgcccgaagaagagaggcgtgtgaatggcatccgggtgcgtacactgccatctacagatgaaggagtcgcattctggatagaatatcatggaatcgtgatttatcacgcaggagatttgaactggtggcactgggaaggagaaccaaagtcgtataatgagcagatgagagcggattatcagaaggcgattagagagcttccggatcagccgatcgatgttgcatttgtgccggcggatctccgtctgggtgagcagtatgtctggggactggactattttatgcgtcatacagacacgaaaaatgtgttcccgatgcatttctggggatcctatgaagtgtttgacaggctttttcacgaaccgtgtacaacagaatatagaagcagaatccgagagattcagacagaaggacaggtgtttgacattcagagtcagacatagtataatgaagaacagtgttaagtaagacagacaatcgcggatgcatgcgccgaaaggccgcagacgaggaaagtccgggcttcgcagggcaggatgccggataacgtccggtggaggtgactccaaggccagtgcaacagaaataaaccgcctgtacaatgtacaggtaagggtggaaaggcagtgtaagagactaccgcccttctggtaacagaaggggcacatgtaaaccccatccgaagcaagaccgaataaaagctatgcggctgcccgtcgcgctttaggtaggttgcttgaacctgacggcaacgtcaggtctagatagatgattgtccaatgacataacccggcttatcgttttgcttaatttgatgctgtcgctttgcggcagcattttgcatatgaacagagattttatacaaggcaggaaaagagtatgggaatgagaatcaatacaacgctgccgcttccggcagaattgaaagcagagtatccgctttcaaaggaacttacagaaatcaagaaaaaaagggatgctgaaattcgggacatttttacaggaaagtcagacaagtttgtcgtcatcgtagggccatgttctgcagacaatgaagattccgtgtgtgaatatataagcaggctggcaaaagtgaatgaaaaagtatcggaccgcctgatgattattccgcggatctacacgaacaaaccaaggacaacaggtgagggatataaaggaatgcttcatcagccaaaaccggatcaggcgccggatttgctggctggaattattgcgatccgtaagatgcatatccgtgccatagaagaaagcggactgacaagcgcggatgagatgctgtatccggagaacagaagctatctggatgatatcttatcttatgaggcaatcggggcgcgttctgttgaaaaccagcaacacagactgacggccagcggtatggatattccggtggggatgaaaaatccgaccagtggtgatttttctgtgatgctcaactctgtgatcgcggcacagagttcccatacttttatttacagaggcatggatgtaacgacagatggaaacgatctggcacatgtgattctgcgcggcggagtggacaagtatggtacttgtaatccaaattatcactatgaggatctgatccgtcttcaggcgatgtatggagagaaacatctggccaatccggcagcgatcgtcgatgccaatcattcgaattccaacaagcagttcaaagagcagatccgtattgtcagtgaggtgcttcacagccggaattacaatacaaaattaaaagaactgatcaaaggtgtgatgattgaaagttatctggaagaaggatgtcagagtatcggggcagaccagatttacggaaagtccattacagacccgtgtcttggatgggaagatacagagcgattgatttataaaatagcagaagagtgctagaagggaggcacatgatgagaaggcagatgcttggaaaaagtatgctggaagttccggtagttgcagctggatgtatgcgtattcagggaatggatgagacagaggtggatgagtatatccatacctgtctggaactgggaattcagttttttgatcatgcggatatttatggaaaaggggcatgcgaatctctgttcggacgtgtattcgagcagacagaatttcgcagagaagatatcatcctgcagtctaaatgcgggattgtaccgggtgtgatgtatgacttttccaaagaacatattttgcagtcggtagaggaatctctccgcaggctgcgtactgattatctggatatcctgcttcttcacagaccggatgcactgatggagccggaagaagtggcagaagcatttgatctgttggagggatccggaaaggtgagacatttcggtgtttccaatcatacgccgatgcagatccagcttttgaaaaaatgtgtgagacaggatcttcttgtcaatcagcttcagttcagtattccgttttctaacatggttgcatcaggacttgaggcaaatatgctgacagatggtgccgtcaaccgagacaacagcgtgctggatttttgcagactgcatgatatgacgattcaggcatggtctccgttccagtatggatttttcgaaggggtatttgttgacagtgagaaatatccggaattaaatcaggtgctggcggatcttgcggaaaaatatgggacaacaaagactggtatcgcatctgcatggatattcagacatccggcaaagattcagatggtagcaggtacgaccaatctgaagcgattgcgggagatcgcgctggcggcagatatccggctgaccagagaagaatggtatcagttatatttaagtgcgggacatatactgccatagaattttgagataaataacgggaacgtgatctgtaaaaaccacgttcccgtttgtttttttgtttatcttccggagtatttttcttcgcagtatttgcagcggtacacctggttctcttcgtctgtcaggacaaagatgtgatccagttcctgctcgatggatgtgatacatcttgggtttttgcagcggatcacattggtgatctcttttggaagtcttaggatttttttgtcgacgacctgttcattggagataatattgactgtgatattgtggtcgataaatccgagaatatcaaggtccataaaatcgatcggacactcgatcttcatgatgtctttttttcccattttactgctgcgggcatttttgatgatcgcaacacagcagtccagtttatcgaggtgaagatatttgtaaatatccatactttttcctgcttcgatgtgatccagaacaaaaccttcagaaatacgtcctacgttcaatgtatttttcaaattagataccttctttctttatgcgaaacaaatttttgttactctacatgaatatcaagcagtgtcagaatcagtgccatacgtacataaacaccatactgtacctgtctgaaataagctgctcgcggatcatcgtctacttccacagaaatctcgttgacacgtggcagtggatgcagtacaaacatatcggaaggagccagctgcattttctttttgtccaggatatagaaatctttcatgcggacataatcttcttcgttgaagaaacgttctttttgtacacgtgtcatgtataggatatcaagttccggcatggcgtcttccagacggacaacttccttgtattcgatatggtttttatccagaacatcctgacggatatagcctggaagacgtaattcttctggtgagatcaaaacaaatctgattccctcatagcgcaccagagcgtggatcagagaatgtacggtacgtccgaattttaagtctccgcaaagtccgatcgtcatatgatcaaggcgtccctttacggaacggatagtcaaaaggtcagtcagtgtctgggttggatgctgatgtcctccgtctcctgcgttgatgacaggaatggaagcgtgcttacaggcaaccatcggcgctccttcctttggatggcgcatagcaacgatatctgcataacaagaaacggtgcggatcgtatctgaaacactctctccttttgaggcagagctggaatctgcggaagaaaatcccatgatgcttccgcccagattgagcatcgcagcctcatggcttaaacgtgtacgcgtacttggttcataaaataaagtagccagcttcttcccttcacatgcatgtgcatatttttccgggtgtttttcaatgtctcccgccagatttaacagtgtttccagttcctctacagaaaaatccagaggactcatcaaatgtctcatatgtaacctccttgtaaatcagatcttgtttgagagcagaatctgattatcgatattgtaataaatcttcaacagttttgcgttttggtgcagatggctcgatattaggatatccaagtgcaatcaatgcagccagttcccgttcctttggaatgtccagaagactggaaattccactctcatcaaatacgcccataatgacagtacccagtccgtattcgtgcgcagccagacagaacgtctgacaggccacaccggcatcaaacatctgccagcggtcttttttttcagtggtataagagccgtcgcgctcaaaaccgcaccgtcctttgatataagtgacagcaatcaaaaccggtgtctggcggatgatatctgaattgtaagatggggtaaagtcatcagcaatttttcccagaagggaaggatcctcaattgcgatataacgggtaatctgagtatttttccaggatggggaaaaagaagctgcggaaacgatctcttcaatcaatgaatgtttaacagaatccggtttgaatctgcggatacttctgcggcttttgatacaatcaactgtattcatttcgatgtacctccctatgcaaaatctcttcaatcatcatatactaaactgtgagttttttcaacagagaattcatacgaaaattaagaaagaagcagaaaaaatctggacagagattgtaaattgtaatttaaaatttgttaatggtttgtaaagaagcctaaaacaaaaaaatcaggtgttataataccaatgcaaaagtgaaaaaagaaggagaaatgtaaaatgaagaagagagtcattgcggtgttgatttccgccatactgctttaccagccattatcagtatctgcagcagcagctccagatggaatgacagatgcaagcaaaacaccagcggcacaaaacggagcatgggatgcatggtgtgaggaatgggaaacaataaaaacagactggacacaggtcgccatgtcacctggatccgatgaaacagaaatgaattttgcatggtatacgaaagaaggggaagaagcgtcctttgtatatggacagactccggatctaagtgatgggcaaagtgcagcagtatcagaaagtccggcacagacaggttataagagcagcaaagtggtaataaaggatttgaagcccggaactacgtactattatcaggtgggcggaaaagagatttgctcctttactacggatgcggatacaagttccttttcctttattttcgtaggagatccgcagattggttcttccaatccggaaaaagcaaagactccggaggatattttaaaaccatcctttgcggcagcacagtcagaagcagttagaaatgatacctttaactggaatgatacattgacaaaagcatatgaaaaaacaaacagattggcatcctttgttctttcttctggagatcagattcagacaaatgccaaaaaagtgcaggatacaacaatcagtgaggtggaatatgcaggatatttgagcccggatcttatgaaaagtgtacccgtcgcaacaacggtaggaaatcatgatgcagacaatgccaattatacgtatcattttaatccggcaaacagcagttctcttggcgacaatggaacagtaggcggagattattactacacatatggggacgccctgtttatgattttaaatacgcaggatacaaatgtggaggaacatcgtcagtttattgaatccacagtagcggcaaatacagattgcaaatggaaaatagtaacacttcatcaggatatttatggatctgcagaacattctaatgaaccggaaatcaccaatttgcgttatagtctggtgcctgtgtttgaacaaaatgatattgatctggtgctggcaggacatgatcacgcatattccagaacaaaaatgttaaaaggcggtcagttcaaaatggaatattcggatgatgaatttgaagaacagttggaaaaagatatggatgcgggagaaaatcctgatacactttatgaggcaccgggaaatatttcagaagatacacaggatgagggcgaacaaaaatatctgaaatatctgcatgcggtgatggatgaggaagcagtaatggaattgacagagaatcaggaaacggcggtaaattctgatggaatcatgtatctgacagcaggatcttcatcaggaagtaaatattatgatctggtacctcgccaacagacttatattgccaacagatggcagcaggatgttccgacttattcggtagtagacattacggaaacaacattgacagtgaatacatatcgcacagatacacaggaaccgatcgatacacagtttatgcttgtgaaatcagttgatcatggacagctttccgcgttaattgaagaagctgggagtaaaaatccagaagaatatacaaccgagagttatcaaacaatgcagcaggctctggaaggcgccagaactgtaaatgcagatccggcagcagatacggcaacactgacaaatgcatatactgcattgaaaacagcattggatcagttggagatgaaacatcaggaaaatttaaacccaccgtcatccagtgattcaccggacaatggacagtcacaaaacggaggtacaagtggttctatgagcgaccagactacgcatacagaaggtatcaataaaaaaccagtgacttcacaaacaacggtaaaaacaggagacgctgtaccgattgcaggggcagtaatcgtgatgttaacagcgttgctttgcggagtcggagtgctcgtggccaggagaaagcgtgaccaaaaatgaattggctgaaaaaagggagaaggcagtttatcattttcggaattacgattctgtttgctgcatttttgatacagttaaatcaagtggaacgggaagggctgtatgaaacagaaggaaaaacctttgaaaaagcaaaagtagtggagataaaaaaagataatacaacagagtcgggaaatcagattggaaatcaactggtttcccttcgattattaagtggcaagttccgtggaacagttgtggaggctgtcagttcttcaggttatctttacggaacacattgtgaaaagggcatgaaggtgatcgcggaagtgaatgaaggggaagattcgttgtatgttaccgtctacagttatgaccgtacggcaattttgtgtatgattgttttgctgtttttgctgaccttaagtctgatcggagggagaaaaggagtctattccgctgtcgctttgatttttacatttgtctgtattgtatttctatttttgccacttatctacagaggggtatctcctgtttgggcagcagtactggtcgcaattctgacgacggttgtgaccatgtatttactgggagggatttcaagtaaaagtgcgactgctgtggccggcacagtactgggggttggaatttcagggatactggcaattctgtttggaaaatggacacatatttccggatataatgttgcagatattgagcagttgacgtatgtaggtcagacaacgaatattaaaattggagaattgttgtatgcgggcattttgatttcggcactgggggctgttatggatgttgcgatgtcaatagcgtctactatcaatgaaatccactttcgcaatccactgctttctgcaagggaattatttttttcggggatacgggttggaaaagatatgatggggacaatgtcaaatacactgattttagcttttacaggtacgtcgattaatacgttagtatttttgtatgtgtataactattccacaacgcagatcatcaatatgtattccataggaatcgagttaattcagggaattgcttccacaatgggagtgatattgacgattccattggtttcattacttagtgcatggcatttaaaacggaaagaaattaaaattttttcaaaaatttttcaaagaacaggccggcggtaaaccaaagcggcgcataatcaagacggatgacccctttgatattgaattttgcacgactgtaatcccagggacagatccggtgtttctttaaaaacagaccggataaaaattccccggcaaaaataaaagcagtgtagatactaccccttaaaaaggtgctttttgttttcagtttttgggaaagcggagaaaagacgcacgccatcccgtagatcggaaacatccagatggatgtttttcccgcaagtgtataatcttttaccaaaagggaatgaagtcccgtaaacagtatttccatgcaccagccgatgatgccgcataaaataaattttttcttcataagaacaggatgtccgtttccgtgcagatttatgcagatgaaaatcaggtattgtacaatcggaaaaaaatgtattataatacagcttaagtttgaaatgacaaggagagaagaaaaatggcgacattggaagaactcagggagaagctggatgggatcgatgatcagatcgcaaagctgtacgaagaaagaatgaaagtctgcgaggatgttggaagatttaaagtcggcgcagggcgaaaagtgtttgaccgtcaaagagaacatgaaaaacttctggatgtggcatccaaggtgaacggtgagtttaacaagaaggggattcaggagctgtacgcacagctgatgagtatgagccggaaattgcagtatcagcagcttgtggaggcgggggcactgggaagacttccgtttattgagatggagtcgcttgataagcagaatgtccgtgtcgtatttcagggggtggaaggagcttatagtcaggctgccatgaagaaatattttccggacaatgagaacaattttcatgtgacgactttccgggaagccatggaggcaatcgaggagggggcggcagattttgcagttcttccgattgaaaattcttctgctggagcagtcaatgaagtatatgacctgttggtagagttcgaaaattatattgtgggagagacgttccttccaatcgaaaatacgctggcaggccttcctggaaccacactctctcagattgagcgtgtgtactctaaggcagaagctctgatgcagacaagccgtttcttggaaaagcatggagactggcagcagatcagtgtgtccaatacagcggcagcggcaaaaaaagtcctaaaagagcaggatcactcgcaggcggcagtgtgcagtgcatatgcagcacaggtatacggactttctgttctggcagaggatatcaatgatgagactaataatgtgacacggtttatcattgttacgaatcagaagatttttacgccggctgcatcgaaaatcagtatttgttttgaacttccgcaccagagtggatcactgtatcagattttgtcgcattttatttacaatgacctgaacatgacaaagattgaatcccgtccggtggaagggaaaagctgggagtatcgtttctttgtggatttcgaaggaaatctcgaacagccgggtgtgaaaaatgcgatccgggggctcagagaagaagcgcggaacttgaagattttaggaaattattgatgagtatgagggaggaacaggaagatgcgtaccaatgaactgatcttatataaaaatatggaatacgaagagttacttttggatatgacatttctgatggaacattatgataatgaatactataatcaggaggatttaaaaggactgcttttttcctgtatgaatgaattgctggaactctcagagtgtcacggatttttcggaaatctctggcataccttcctgactttcctgctggcaaatgatgaaaatgcttacagtacctcctgcgagatcacgggagagacaaaaggaagcctgaatctggcggcagagcatgatttttggatttttaaagaattattcgattatgatttcactgcattgatgcgggttttgaatgcaggctgtttttcccttcttctggactatgaaaatacacaggatgacaggattgtttttaataaacgaatccgtgacagaatctgtaatctgagcagggaactggagcaggcagaggacgtacagtcgtttaagcagtgcgtgacggagttttatcgggagtttggagtcggaaagctgggattgcacaaagcgtttcgtgtggaacataccaaagacggagcagcggaaatcgttccaatcacgaacattgctcatgtgcgtctggatgatctcgtaggatatgaggcagaaaagcaaaagctgattgataataccaaagcgtttgtagagggaaaaagagccaataactgtctgctctacggagatgcagggacaggaaaatcatcttccatcaaagcaattttaaatcagtattatgatcaggggcttcgcatgatcgaagtatataagcatcagtttcaggatctgaacgaggtgattgcccagattaaaaatagaaactacaaatttattatttacatggatgatctctcttttgaagaatttgaaatcgaatataagtatctgaaagccgtgatcgaaggaggtctggagaaaaaaccggacaatattctgatctatgcaacttccaacagaaggcatctggtgagggagactttccgtgacaaacaggatcgggatgaagaactgcatacaaacgatacggtgcaggaaaaactgtctcttgttgcaagattcggtgtcaagatttattttgcctctccggctaaaaaggcattccagaagatcgtgacagaactggcaaagcggaaccatatttccatgccggaagaagaacttttattggaagtcaataaatgggaattgagtcacgggggaatgtcgggaagaactgcacagcagtttattgattaccttcttgggaaggaataaccgtatcaggcggaaaaagaaaaggaatttggtatgacaggaaagaaacggatgtgccgtcttgcattgacaggcgcactgctgttgctgtgcacaaatacggcggcaggatgcagacagcaggaaaagcaggaagtaacaccagaagtattgatggatgcggtagacaaaaatatgaaagaagtcaattcggcatccagttcactggaaatcgaggtggagttggaggatgtgctggatcatactagaatccgaatggatatggacatggagaacacggtaagccccagagcaggacacgcaaaggggagggcggaagtgaagctaaatgataatctggtctctagtaatatggaaatctaccaggtggaagaaggcgataagtatgtgacgtacagtagtctttatgagcagtggtcgaggacagagagtgaaaacagcgcctcttccggtggtacagaaacagattttttccagagtgcaagagcggaaatcgaagcttttacgcttgcaaggcagccggtaaaggtccgggaaaagacgtgctatgaaatctacggggatatgcagggaaagaagctgatggattttcttggggaggagatgattcaggcctacggtcttgtggatctgccggatcaggatgcgctggatacactggagattccggttacggtggatatttacaaaaaagaaaagctgccggcaaggatcattgtggatatgacagaaattatggatgaattgtaccaaagctatgggaagaccaccaatgtgaatttttataatatcgaattggtctatcaagggtatgatgatgtaaaaccgattcaggttcctgagagtgtgaaacaagtagtcaatgggtaggaatgctctaataatcgtataaatcatatacaaaggagaaagaagtatgtttttattccgcaagaaagaaatggatattgctgcagcaaagcaattttggaaatggtttgttgaaaatgagcaatggatcatagataacgtgagcagcaatggggtagaagttgtttgggcaattgatgcacagataaaacctgtttttccatatttaaaaaaagaacttgaatttcaattgggattcaatcatggtattggcaaatttttcttcttccattttggaaacaaaaatctgatctctgatgcccaaaaattagatgaacttatgccggaatctctccgtcaaaggtggtctttcgtcatagaaaaatagttggatgcccttggtaacaaattttgtaccaagggcattttgcatacatcttaatcagaaaattcttttaagtggctgatgtcactgtcgatgatcagcgaataattcgtgtagtatacgacaaatccgggttttgctccctttggctttttgacatgttttttctcaatatagtcgatctctaccttttctccgtcgcgggctttggaataataagcggcaagttttccggcttcttcaaaggtacggtccggaagctcctctccgttggtgcggacaacaacatgagatccgggcgtgttttttgcgtggaaccaccagtcattgccgacggcaaattcgaaggtcagccagtcattctgcaaattgttttttccaacataaatatgatatccgtcactggaaagatagtgcagtggtttgtttttgatctttccctttttcttggtaaatttgcggcgcatatatccggattggatcagctcctctttgatctctgcaagatcctcctcactgagtgcaatatccagagcagtgctgacggattccaggtatgtgatgtcttcttttgtttcttcggttaatttggataatgcttcaaaggtacgtttttgtttattgtatttctcaaaatagcgctgtgcattttccaatggagtttttgtggcatctaaagggatttttaccatttcattgttgtagtaattcaaagcttccagtacttttgcacctggttccaggttgtagccgtaagtatggatcagttcgccgtatactttgtatttgtcccgatcctcggtatcggataactgccgcatctgcagagcgtatttttttcgagcgcgttccagagcagtctgtacgatatggcgcagatcagcagatttctggcggatacgtgtgatctggtttttggttgcataataagtctccaacacgtgcgagatggaagaaaaagtttcccggtggtatgtgtgcaaatgctccagtgcaagagaagaaaactcctttggttcttttccgtcatagtaaacggacggggagaaatccccttccctgactgcggagagataaatacaaaactgattgtaaaagtgtacacagacatctgcggaaagctctgaggccggaagccttgaatctataccggaaagaaaacagatctcctcagcggtgacgggactgatcccggtaaagctggtgtagatcgccttggataccggcattggctttgcacgaagcagggtatgaaactcggcttctgaaattgtgagcggatctgctttttccatggtgtccgggatgaaatagtcccgtccgggcagcacttcccggacagaactcatctgggcggagacatgtttgatgctgtcaatgatcgttccgtctgaagtacagaaaataatattgctgtgtttgcccatgatctccacgatcagatccttgcggcaaagatcgccaagctcatccagatgctcgattgtaaaatgaatgatccgttctagtttgggctgccagatatccacgatcctgccgtttgcaatgtgctttctcaaaagcatacagaaattgggagcagtcatgggacttggtttattcgcgtcagtgagatatatgagcggaagagatgcacttgcagaaatggaaagccgtctctgtcccttaggggatttgatcgtcagcagaagctcgtctgcctccggctgtgcgatctttgcaattcttccgtttaaaagctgttcttttaattcgtggaccagattggccacgacaattccgtcaaaagccataaaaaaatcctttcttttggttggtttcgtttaacttgattattgtatcacagaattcggacaagtggtacctgaaatcgggaatttctggagtgaaagcttgaccaaacagcataaataagagtatactggtaacagaatttcaagaaatgacagaggacaaagacatgataaaaagtatgacaggttttggacgatgtgaaattcaaaaagagtccagaaaatttacggtagagttaaaaagtgtgaaccacagatatctggatgtaaatatccggatgccgaaaaagctgaatttttttgagacggcgatccgtacgcttttaaagcagtatgccaaccgtgggaaggtagacatttttatttcctgtgaggatttgtcacagcagcagatgatgctgaagtataatgctgcactggcagcggaatatatgcgttatttccgtcagatgagcgaggagtttcacattgcaaatgatgtgaaagtatctgcattgtcccactatccggaggtacttacaatggaagagcagacagaggatgaagagattctctggagcgggctcaaagaggcgctggagggagcgtttggacagtttgtggaaaccagagttttggaaggttctcacttaaaagaagatatccttcagaagctctccggtatggaatcacttgtggaacaggtggaagcacgttctcctcagattgtggcagagtatcgtgcaaagctggaagaaaaagtaaaagaattacttgcggacgcgcaggttgaagagagccggattgcagcggaagtgattctgtttgcggacaagatctgtacggatgaagaagttgttcgtttgaaaagtcatatcgcacatatgagaaatacactggaagagtcggagggaatcgggcgtaagctggatttcatcgcacaggagatgaaccgggaggcgaatacgattttatccaaggcgaatgatctggaagtttcgaattatgccatcggactaaagacagagattgaaaagatcagagaacagatacaaaatattgaataaccaggagataaaggagaaattttaaagagatgaatcagagagggattttgatcgttgtatccggattttcaggggcaggaaaaggaacactgatgaaagaattgatgaagcgttatgaggaaacttatgcactttctgtttctgccaccacacgaaatccaagagaaggagaagtggacggaagggaatattttttcaaaacaaccgaagaatttgaaaaaatgattgcgaaagaagagctgatagagtatgctagatacgtggaaaattattatggaacaccgcgtacctatgtagaacagcagttggaagcgggaaaagatgtgattctggagattgagattcagggagcgctcaaggtaaaggaacgctttccggacacattgcttttgtttgtgacgccgccgtctgccaaagagctgcgcagacgtctggtcggaagagggacagagaccatggaggtgatcgagtccagactggcaagggcagtggaggagtcagagtacatggatcagtatgattatctggtgattaatgatgatctggatgtctgtgtatccgagatgcataagatcatccagggagagcatcaaagaagtttccgtaatgagagctttattcagagtatgaaacaggatttaaaagggaatgtgaaaggagacagatagaatatgttacatccatcttatacagatttgatgaaggtcgtaaatcaggacgttgaggaaggggaatcaaaggttgtaaacagccggtattccattgttatggcaacgtccaaaagagcgagacagttgattgacggagatcttccgatggtacatgcaaaggcaggagagaaacctctgtcaattgcaattgaagagatgaatgcaggcgaactcaagattctggcagaaaacgcagaagaggaataggcatagaaagagaagataaggggcagatgccatatggtatctgcctttctgactgttgaaaaaaggagaaaaatgaaatatgaatatactttttatttccctcgggtgtgataaaaatctggtggacacagaagtgatgctggggatgctggcatccagaggatatcagatggtagaggaagagacacaggcagatgtgatcgtgatcaatacctgctgttttgtccacgatgccaaagaggagagtattcagaacattctggagatggcagaatataaaaaagagggcagattaaaagccctgattgttacaggatgtctggcacagcgctatcgtcaggagattttagatgagatcccggaagtggatgcagtgcttggaacgactgcatacgacaagattttagatgcgattgacgaggcactaaaggggcaccatacactgacattggccgatacagatctccttccagaagtggagacaaaacgtctggtgactacgggcggtcattttgcgtatctgaaaatcgcagaagggtgcgacaagcattgtacgtattgtattattccaaagatccgtggaaatttccggagtgtgccgatggagcagctcctgtcagaagcagaatatctggcagaacaaggggtaaaggaactgattctggttgcacaggagacaaccttgtacggaaaagatctttatggtgaaaaatctttgcacaaactcttgagagagctgtgtaaaatttcaggaatccgctggattcgaattttatattgttatccggaagaaatttatgatgaactgattcagacgattaaggaagaaccaaaaatctgtcattatctggatcttccaatccagcatgccaatgatgagattctcaaacgtatgggaagaagaacgacaaaacaggaactgatagatatcatcagtaagctcaggagagaaattccggatatcgcgcttcgcaccacattgatcacgggattcccgggagaaacgaaagagcagcatgaggaactgatggagtttgtggatgagatggaatttgacagactcggtgtgtttacttattctccggaggaggatactgcagctgcgaggatggaagggcagatcgaggaagaagtcaaggaagaacgccaggctgaactgatggaactgcagcaggaaattgcgtttgatactgcggaaaatatggtcggaaaagaagtgcttgtgatgatcgaaggaaaagtagcagatgaaaatgcatatgtgggaagaacatacagagatgcgccgaatgtggacggtttgatttttgttaacacagaggaagaactgatgtccggtgattttgcaaaggtaaaagtatcgggagcagtggattatgatttgataggaggtcttatctgatgaatttaccgaataaactgacggttctgcgagtgctgatggtaccgttttttgtgctgtttatgctgacagatcttggtggagcggcgaacaaatggattgcactggcgatttttgtggtggccagtctgaccgatctgctagatggaaaaattgccagaaaatataatctggtcacaaattttggaaagtttatggatccgcttgcggataaactgctggtatgttcagcaatgatctgtctgatcgaaaaaggaagtctggcggcatggatcgtgatcgtgatcattgccagagagtttattatcagtggattccgtctggtggcgtctgacaatggaattgtgatcgcggcaagctactggggtaaattcaagacagtctttcagatggcgatggtcattgtactgatcatggatctgggtggtgcttttgatgtgatcgggcaggcactgatctggatttcactggcacttacgatcatttcactgattgattatgtggcaaaaaatattcaggtactgaccaacggaggcatgtaagatgtatacagactggcttttaaaaatgaaggaaaatgaagcgcagacgacattggaagagcgtgtggtggaattgcttgctgaacacaaaatgacagtcactacagcggaatcctgcacaggcggcctgatcgcagcaacactggtgaatgttccaggggcatctgacgtattgaatgaagggtatatcacatattccaatgaagcgaagatacgtcttgtaaacgtttccccagagacattagagcgttatggagcagtcagttcccagacagcaaaagaaatggcgaatggagcagcaaaggcggcaaaagcagaggctgctctaagcgctacgggaattgcgggaccgggaggaggaacagaggaaaagccggtaggtctggtttatatcggctgttctgtgaacggaaagacaactgcgaaaagatgtgtttttgatggaaaccgtatggaaaacaggcagcatacagtggaaactgcattggaaatgcttgtggaagcactggaaaatctggaaaaatagaaagtgataattgacgaatgtcggaatttgtgagagaatgtaaacgaatacggcgttaagaatttatcaaagccgcagagggaaacctcaaataatacacaattacatatgttgaaaggagttttaacatgatttattcacacgaagtagaaatgatgtgtccggtagctcagggagcaaatcacggaccagctccaatcccagaagaagcaaaatgggtgcaggcaaaagaagttaaagatatctcaggactgacacacggtgtaggctggtgtgctccacagcagggaacatgtaagctgacactgaacgtaaaagaaggtatcatccaggaagcactggttgagacaatcggatgttcaggaatgactcattctgcagctatggcatctgaaattcttccgggaaaaacaattctcgaagctctgaacacagaccttgtctgtgatgcaatcaacacagctatgagagaattattcctgcagatcgtatacggacgtacacagagtgcattctctgaagatggacttccgattggtgcaggactggaggatcttggaaaaggacttcgttctcaggttggtacaatgtacggaactcttgcaaaaggacctcgttacctggaaatggctgaaggttatgtaacaggtatcgctctggatgagaataatgaaattatcggatacaaattcgtaagccttggtaaattcacagacttcattaaaaaaggtgatacaccaaacgaagcatgggaaaaagcacagggacagtatggacgcgtggatgatgcagttaagatcatcgacccaagacaggaataggcgataggaggacttaaaatggctttatttgaatcatatgaaagacgaattgataaaatcaatgctgtattaaacagctacggaattgcttctatcgaagaagctgaaaaaatcacaaaagatgctggactggatgtttacaatcaggtaaaaggaatccagccgatctgttttgaaaatgcatgctgggcttacattgtaggtgctgctatcgcaatcaaaaaagactgcagaagagctgctgacgctgctgctgcaatcggagaaggtcttcaggcattctgtatccctggatctgttgcagaccagagaaaagtaggtcttggacatggtaacttaggaaaaatgcttctggaagaagagacagactgtttcgcattccttgcaggacatgagtctttcgcagccgcagaaggtgcaatcggtattgctgaaaaagcgaacaaggttcgtaaaaaaccacttcgtgttatcttaaatggtcttggaaaagatgcagcaaagatcatttccagaatcaacggatttacatatgttcagacagagtatgactactacacaggagaattaaaagaggtttcccgtacagcatattctgacggacttcgttctaaagtaaactgctacggagcaaatgatgttcgtgaaggtgttgcaatcatgtggaaagagggagtagacgtatctatcacaggtaactctacaaacccgacacgtttccagcatccagttgcaggaacatacaaaaaagaatgcatcgaagcaggaaagaaatacttctcagttgcttcaggtggtggtacaggacgtacacttcacccagacaacatggcagcaggaccggcttcttacggtatgacagatacattaggacgtatgcactctgatgctcagtttgcaggatcttcttctgtaccggctcacgtagagatgatgggactgatcggcgctggtaacaatccgatggttggaatgactgttgctgttgcagtagcgattgaggaatcagcaaaagaaggaaaattctaagaaacggcggaaaatcgcgggttttgaagagtataaggacgtgtaagggtgtatagataagtggtacattagtacattattagtacactattagtacaagtcgattagtacaagtaaaataataaaaaacagagacattttttaatgtctctgttttttataagatcctatgaatatttattatgagaaaatcgaatcttgcaaaatagttctttgcagtgttatactaaaaccagagattcatagacgggatggaaatggagtattaatgtgaagagtacaaaagcagatgttatatttaaagatttctggcgtgtaaacgaacattttgcagatttgtttaatacagtagtgtttcatggaaaagaaatcttaaaaccggagatactggaagagatggatacggatgtttccggtgtgatcgagatgaaagattataaggaaacattatcaagaacaagagacgtgatcaagaagactgcttatggggtagaatttgttgtgttagggattgagaatcaacagcatatccattatgcaatgccgctgagacacatgatatatgatgccatgggctacttgaaagaatatcaggagattacacgcaattataaagggtcaaatataaaattgtcagattccgatgaatttttatcgagaatgcgaaaagaagacaggatgcatccgattattacactaaccatttatactggtgaaaaagtatgggatggaccgtgttcgttgaaagatatgatcgtggaaatgccagaagagattgcagccgttttttcagattataaaatgaatctcctggaggtaagagattcggcaggatatgtctttcggaatgaagatgtgcagagcgcatttgagatcacacgagaagtgttcgcgggaaattttgatgggatccgggaaaaatacagtgataagagaattagttcagaagctctgtctttgattggtcagatggcaggttccacagaactgattgagatgggaaaatcgatggaggtgacgaatatgtgtaccgcattggaacgtttgaaagcagaaggtgttgaacagggtatcgaacagggtatcgaacagggtatcgagcagggcatggaaaaaggggtagaaaaaacagtcatttctatgctgaagaaaaattatccgatttctgaaatttgtgagattacaggaaaaacagaagaagagattttgaaaataaaagagacaatgtagtgtatgggagatatcagaagatatctcctatgtttttgtgccgaaattcggcataatatgagttttatgaaatgttatagaggtgaagatgtgtagtatatatgataatttaagaaaaggtttaggaaatgtatcaaaagatagatgtatatttatatttcttacattgcttagtatttttgcagggggctattgctgtaatatatcggcattgccaggatttgaatggtttattcatcatagtgaatttctaaaaaatatttcctatagcgttgtgacagggtacattttttatctggtacagtatgtaatatccaattatattcttggtaaaaaggcattaaaattactaatacctgtgcggggatggtttgctgcaaaagagggaggatctatagacttgaaggggcaagatgtcgtcctttatgaaactgccataaaggggacattggaacaggaaaaattgtattacagaaaaaaagcggcaccgttcaatcgtaaccgcaaaatagaaagtatcttttcaaaatcatcatatatgagataataggctcatcattataaaggtaaaaaggtttagtactcaacttttttgactagagtgtgtttgaaaaataaaatttgcacaaaacatgtgtttttattccctttttcatgataaaataaagaaaaaaaggggggatccaaccgaaattggacacagtcgagaaggagcaagcactaaagcttatgttattataaatcaaaaagtgaagggaaaactaaaatggggaagctatattttcgatacggagctatgggcagcagcaagacggcaaatttgctgatggttcactacaattttctggagagggggagacgtccggttattttgaagccaaaactggatacaagagacggagaatatattgtgaagtcacgcattggcttacaggcgaagtgcgaattgattgaagagtttacgatgaagccggacacgtatgatgcaatcctggtggatgaagcaaatttcctatcatctgaacaggtggaatggctggccgagatctgtgatcagtatgatattccggtcttatgctatgggctgaagacagatttcagaggtgtcttatttgaaggatcaaaacggctgatggagctggctgatgcgatcgaggagcttccgatcatttgctggtgcggaaagaaagcacatttcaatgccagagttattgatggaaaaatggtaagggacggagcgcagatcgcgcttggagccaatgatatgtatgtaccgctctgcaggagacattttatgagtggagagattaaaccatatcagacggtagaggagaaatgagtatgattattcagagacattatgaaaatttgaatataatgtatgaaaatacaatgccatatcggtcctattatattccggcctcttgcaacatgggaccgttggtggagaacagagaaaaatcagatcggatgactttgcttaatggaaaatggaaattttgttattttgacagtatttacgatctgcaggatgcgttttacgaggaaggatattcacttgacgggtttgaagaagtgactgtccccggaatgtggcagaattatgggtatgatacgtatcagtataccaacgtgagatatccgattccgttggatcctccgtatgttccacaggaaaatccgtgcggggcatatgtgcggacatttgagtatcagaagaaggaagatgcaccaaatgtatatttaaatttcgaaggggtggattcctgtctttatgtctgggtgaatggaacatatgtaggatacagtcaggtgtcccatgcttccagagagtttgacattacagatctggtgaaaaacggaagcaatacgctggcagtactggtcttaaaatggtgtgatggcacctacctggaagaccaggataaatttcggatgagtgggatttttcgggatgtgtatctgctgcagcggcctgataatgccatatatgactatttcacaacaaccaggattgtggatggaaacgcagaaattactgtgcgggcaaagtacttaaaagaagcagcgcctgtgaagattgcaatttatgacaaagaaggagtgttgtgcgtatccgggagactgcaggaaatatcggatggggaatatacgcatcaggcggtattgaaaatagaagcccctaaattatggaatccggagcaaccatacttgtatacaatggtcctggaaaacacaggagaagtgattgttgaccgaattggaatacgggaaatctctatcagagatgcagtagtttatgcaaatgaggtttcggtcaaattcaaaggggtaaatcgtcatgattccgatccggtaaccggatttgtaatcggaatggaacagatgaaaaaagatctgcagatgatgaaagagcataacttcaatgcgattcgaaccagccattatccgaacgcgccttatttttatcagttgtgtgatgaatatggattttacgtgatcgcagaagcagacaatgaaagtcatggaacacagtcacaatatctggaagattccagttgggaaaatatcagcaaacgatggaatgaacggattgcggatcatcctgcgtttattccggcgacgatggaccgcaccaggctttgcgtgtacagagagaaaaatcgtccctgtgttgtaatctggtccatgggcaatgaatgtggatacggatgtacatttgaagaagcgttgaagtggacaaaggaatttgatccgtcccggttgacttgttatgaaagtgctctttataaaagtgacaggagaagatatgattactccaatattgatctttacagcagaatgtatcctgagttggaagagattgaggaatatatggagaaaggaccggataagccgtttcttttgatcgaatactgtcatgcgatggggaatggtcccggggatttggaagactattttcagatgatttacaagtatccgtctctttgcggtggatttgtatgggaatggtgtgatcatgcaatttataaagggcaggcggaaaacggaaaagcaatgtatttttatggcggcgatcataaggaagaagttcatgacggaaatttctgcatggacggtctggtatatccggatcgaacgccgcacacagggcttttagaatatcaaaatgtgtaccgtccggcgagagttgtttcttttgagcaggaaagcggctgtttggtgttgaaaaattatatgaacgaagaggatctgaaatcctatatttacatcagttacgaagtcagctgtgatggggatgtttttggaagggggcaggttgaaattatgcaatccatcttaccacgtcagtgcaaagaggtgtatgtggatgtttctgtcccggagactggaaagtgttatttgaagatcttttatcatcaacgccaggatacggagctgatctcgcatggaacgatcttggggtttgatgagattcttctgaaaaatgaggatggaagaaatcagaaagctgtgacactgcttaagacgttcaaaacatccaaaggaaaaatgaagctgtcagaaacggatagatatatacagattaagtcagatgattttacatatgtttacaataaactggccggaatgtttgaagaactgaacgtaggcggaaagaagattctggatgctcctatggagctgaatatatggagagctcctacagataatgacagaatattaaaacgaaaatggattgcagccgggtatgacagaagtctgggaagagcgtacaatacacagtggaaacgagaaaaatcaaaactggttcttcacagtattctgtctgttgcggcagtttcactgcagaaagtgttggatgtagatgcagtgtgggaggtttttgatacgggtgaaatctgtgtaacaatgcgtgtaaaaaaggaaatggagtttccggagctcccaagattcggaatccggctttttttgaagcaggaatttaatcaggtggaatattatggaatggggccccaggagagttatgtggataaatgcagggcaagcagtcatgggatttatcgatcatcagtagatgagatgcacgaagattacatcagaccacaggaaaatgggagccatgcagattgtgactatgtgaagctgacaagcaaagaacagagcgtaacagtcgtttctccgcattcgttttctttttcagtatcaccatatacacaggaagaactgacaagaaaagcacatcattttgaactggaaaagagcggaagcacgattgtttgcctggattacgcccagaatggaatcggatcaaacagctgtggaccgaaacttagaaaacagtattgctttcagaaagagcagtttgtatgcgagtggaagctgatgtttgaggaaaagagcgagaaattatccggaaatgattgtttctgtaaggaagacagggtataatggacacagaaatgaccgaaggataaggaggcagtaacgtgtcagaagaaacgaaagatatagaagaaaccaaagtagcggaagaaaaaaagatggaaacagagcagaccatactttctcagccgacagagaaaaaggctgcagagacagtgacacagattcaacaatcggtggagatacaggagcagaaagaaaaaactgagccggaaccgaagagaagttttatccgatcaaggaaaaaagcggcagcgtccagagaagaacagattctttccaggattaaagatgaggacttgatgaagtatctggagatggagcatgaaagactggagatgatgcagagcatcaaagaggcaagggaaaagagagtttttacaatgcttcagcttttaatttctctggcagctattgtgatcgttgtatttttgctgagagataatccgacagttcttgtaaatattttgtatatcgtggggattatcattgtactctggatcctgaaaggaccacatgagaagaatccatttaaagaggaataggaaaatgccgaaagttcgaaatgagctttcggcatttttttattccttgagaagaagagcacggtaaatgcaaaaagcggatgcaccgatagctcctgtataaggtgaatatgatttgacgatcatctgctggttggaaggtagtgtgaataaatttggttcaaaatcaagtcggctttttaaaagggcagtggcctgttggctttcgaacagttctccgtgaatgaaaactctgtcagagtcgataatcatatttaggttggtgatagcgatagcaatactttggattgcggcagagattagctttacgatgatgtcatcacctagttcatatgcattcagtatggtttgcagagtaatctcgttttcgttttttacaagctggtggaggtaagtggagggagtgctttggtagagtagccttgctttgcggatgagccaggactcactggcataggtctgcaggcagcctcgtttcccacactcacataactcgccgtcaggctgaacagtcatgtgtcctacctcaccaattttaaaattctgttttccgtataaatcatcgtgatacatatgggtacagtgaatgcctcttcctatatggaaaaacaggaaattgctattgtcggtatttggtttggtatagaaaagagattctgctcttgccatacagtggacgttattggaaaagtagacgggaactgggacacggttttcaatttctgtgaggttgaaatctttccaatacgcattgtttgttaaaatcacatggttgtttgatttggtataatgtcccggaattgcgattccaatcgcatgaatctgctgtttgtgtgagactttttttataaaaacggaaagatgttgcataaaaaaatctgcatttattggtttgtgtcggttgtgaaaaaaagtatcctgttggtatacggttccgatattgtctgtcagaacaaaagaaaagaatttttcggatatttcggcaccgatataataggagtgttcaggtgcgatggaaagtaggatttttttgcgtccaactttatcctgcagatctatctcctcaccgacttcctgaatcaggtgatcggaaagcatttctgcagtgatcagactaacagttgcaggggtaatcccggtctcacgcgcgatatcaattctggaaatggtatggcgggtgtagattttgttaagaatggtagaatacaacaattgttgttttttggttgatttcataatttggtgtatctccttgaaattaaagaatctttgttagattatatcatgaattcttaaattagtcacaaaaagataaaaaatgggatattgattataaaataaaattaaaaaggaaaatatgaaaagaaaaagctaaaaatataagtgaaaatgcacaaaaatgaagtgcaaaaattatataaaaagacggaattaattataaaataaaactaattatatacaaaaagaagaaattctgttattgtataaatatcaaagaaacgttatactatcgcgaaagtaatggatcttgaaacatatttgttattatttataacgaatagaatcaaagaaaggaagaaaaggagaaaattatgaacaaatttttgaatgaaaaattgatgcctgtcgctgcaaagataggaagcaataagggaatgattgctattcgtgacggaattactctggcaatgccgttgattattatcggatctcttctgatgattattgcgactggatttgcaattccatctctggaggcatggctgaatgatgcagggattgcagcatacctctggaaagggtctgacagtagtttcgggctgattggactggtagcaagctttggaattgcatacagtatgacaaaacagtacggagttgatggggttccgtcaggaattgtctctttgtccacatttattgttgtcacaccatttgtgacaggagaggcaggaaacggtatgccgactacttatatggctgcacaggggctgtttgttgcaatcatccttggtctgatcaatggatgggtatatcagtggtttattaatcacaatattcagattaagatgccggagagtgtgccgcctgcagtttcaaagagttttagtgcaattcttccgggagcggcactgatcgttggatggctgatcgtatatggaattctggacgcatttaaactgccgaatatgcatatgcttgcaaagacaattcttggaacaccacttggacttcttggaaacaacctgataggtgttgtaattctggtaatgtgctgtagcggactctggttcgtaggtcttcatggaggtaatattgtaaacaagatcatggaaccgatctggcttgccaatctgggagaaaatacagaagcattcaaggcaggggaacctttaaaacatatttttacaacaccatttatggataactttgtatatatcggtggtgcaggagcaaccattggtcttgtcattgcattggcatggatggcacgcagaaaaaaggcaagtcagcaggcaaaaacactggctcccatcacactggttccgggatttttcaacatcaatgaaccgactatgtttgggattccggttgtattgaatattctgttgttacttccgtttgtgctggctccgatcgtgaatctgattctggcttatggagcgatggcaattggtctggtaccgcttacttatacagcgcctggatggacaacaccaccggtgatcagtggatttcttgcaacaggaagcttaagagcatctttgcttcagattgtactgattgtagtagatgtgttgctgtatcttccatttgttgcaaatgtagagaaacgttttaaagcgcaagaagaaaattgaaattgaattggagaggatcacagagatatgaaacgattgattagtgcaaatacttcagaaatgttagcaatgaatgctgaagaactaaagcagagtattaaagcaagtgaggggcgtgttattctttctgagaatgtggctacaagagaaacttacataggggatatcaccaatgcagaaatcgcacgtgctttcggggcagatttgattctattgaactgtgtggatgttctgaatccggatatttacggattagaacatgacagagataattttgtttcagagcttcaccgtctggtaggacgtccaatcggagtgaaccttgagccagtagatctagaagcagagatgttagaagaccgcctggatattccaaaagggcgtcagttgaatctggacacagtaaagcgtttggaagaagtaggatttgattttgtgtgtctgacaggaaatccgggaactggagtgacaaatgaacagattgaaaaagcaatccgcctcactaaggaacatttttccggtttggttattgcaggtaagatgcacggggccggatcggatgagccggttgcagatcttacaatcgcaaaacaatttatagaggcaggtgcggatgtgattctggttccggcagtgggaactgttccgggatttgatatggaagaattgaaagcagttgtaagagaggttcatcgttgtggaggactggtactgtctgcgattggaacaagtcaggaaagttcggatgaagatacgattaaggagattgcaatcatgaataaaatctgcggagtggatatccagcatatcggagatgcaggatatggcggagtggctccagtagaaaatcttcttgcaatcagtaaagcagttcgtggagtacgtcacacagtgtctatgatcgcccgttcgatcaatcgataggaaaggatattttaatatggaaaagaaagtgattatgttggcatgtgcagcgggaatgagtacaagtctactggtatcaaaaatgcagaaagcagctacagagaagggctttgatgcagaaatttttgcagtggcagcagcggaggctcaggattatgtagaaaaacagcatgtggatgttgtacttctcggacctcaggtgagattcatggaggcggattttaagaaaaaaatggagccaaaaggaattccagtcggtgttattccaatggctgattacggaatgatgaatggagcaaaagtgttggaatttgcagatactctgatgaaaggataagagcatggacgagaaaaaggtacaggcgatcatgaatctgatcatatatggaggagatggaaaaagttcctcggtggaggcgattcaagcggcaaaagaagggaattttgaactggcagatgaaaagatcaaggcagcagaagaatcactgcttcaggcacatcatacgcagacagagatgttaacacaagaagcaaatggagattcggtagaagtatcacttttgatggtacatggacaggatcacctgatgacggggatgatgtttaaagatcttgcgaaagagatcgtggacgtatatcgtacgattcgaaaagagcagtaaaatattctgtacgaaaaagaaaagataggatataataggaaagagatgcggtgaatgctgcatctctttttggcgaaacatcacaatttgacagaggaagagaatgatgagtacagaactggaaaaatattataataaattttgcgaagagaagaggctgaccagaaggcacgggtatgtggagtatgtgacatctatgaagtacatccatgagtatctgcctcaggggaagaaggaaacgatcaaaattctggatgtgggagccggtacagggcgttattcggtacagcttgccggggaaggctatgatgtgacggcagtggaactggtaaaatacaatctggggattttaaaatccaaaaagagcagtgtaaaagcttatcagggaaatgccttaaatctgtcccggtttgaagcggatcagtttgacatggtactggtatttggtccgatgtatcatctgtatacaaaggaagataaagtaaaagcgttaaaagaggcaaaacgtgtggtaaagccgggtgggatcattttagtggcatattgtatgaatgagtacagtattttgacgtatggattcaaagaaggacatatgaaagagagcatccggaatcaaaaagtggatgatagttttcatgtgcgatcgaaagaggaggatttgtacgattatgttcgaatcgaggatattgacgccattgaccaggcggctggcgtaaagcgggaaaaactgatcgcggcggacgggccggcgaactatatgcgaaccgttttaaacgccatggatgaggagacgtatcagttgtttatccagtatcatttgtccacctgtgagcggaaagatctgctgggggcaagtgcgcatacactggatattgtcagaaagtaacaagatcataaaaagcaggagaaagtatgagtcagacagaagaattgagcagaagagaagagcagtttttagaaaacgtgctggagaatttaaggcagaggatcaggaagatcgcgcaggaactggaagaaggacaaaaagatattgagagtatgcatgaatattactgggaaaattatacagagatggatcagtacggatatgaggattatgacaaccagcaggctctgctgcaccggatcaatgcgaatcaggaaaagctggatttaaaacaccgctttcagaagatgttagattctccgtttttcgggagagtggattttatctatgagggagaggaggaagcggagccattttatataggaatcggaaattttgcacagaggacaggagctacacctctgatctatgactggagagcgcctgtgagcagtctgttttatgattatgacagcggttcggcatcttacgaggcaccggcgggtgtcctgacgggagaaatcgcttccaaatggcagtataagatcaaaaacgggaaaatgatctatgcatttgagagtgatacgaaaatcgatgatgagatcctgaagcaggagttaggaagcagcggtgacgtacagctgaaaaatattgtgcgcacgattcaaaaggaacaaaatgagattatcaggaataccggagataaaatactggtcattcagggagcggcaggaagcggaaaaacatctgttgccctgcaccggatcgcctatcttttataccatgacagggagcatttaaaatcctcgaacattctgatcctgtcgccgaacagcgtgttttctgattacatttcccatattcttccagagcttggggaagaaaatatccgggagatgagttttgatctgtttgcgtataaggaattgaaagacgtggtttcagattgtgaagaccggtatcatcacatggaacggcagatgaaatttccggataaaaagaggcagaagcgcttccgcgacaagcagtcctttgcaatgacagggcagatggaaagctttctggcggttttggaagaccggctattggattttacttctgtggagtttaaaggaatgcagcttacggaagaagaactgatcgagctgtgttattttaaatttcaggagatccctcttttggccaggatggatgcggtgaaagagtattttaaagaccagtatgaaactctccataacagagacctttcagaggaagaagaggaaatcctgcagagaaaattcgatcgtatgtatgtaacaaaggatctctatgtgatttataactggcttatggaagaatgcgggtatgagaaacttccggatgttccttatgagcggcggattctggaatatgaagatgtatttccgatgttgtatctgaaatatcgtctgaaagggaaaaatgaacaccgcaacatcaaacatctggtgattgatgagatgcaggactattcctatctccagtacgtgatcctgcacacactgttttcgtgccggatgacgattttgggagataaggcacagacactggacgagacgatgcgggatgtcctgttgtttcttccaaagattttcggaaaaaagatgcgcacgatcgtgctgaataagagctaccgaaatacggtggaaatcgcgacgtatgcaggagcaatcaaccagacaacggatttggaattgctggataggcatggaaaagcagtggaagaagtgtatttttcggaggaagagagtatgctcaaagccattggagaaaatctgagtgtgggagagaacggctatgagacagcggcagtgattgcaatgacagaagaaaaagccagagaactctatgaacttttaaaacgaagaggaattcaggcgtcttatattgacagagatacctctgtttttgaacgcgggcttacagttacaacattttatctggcgaaaggactggaatttgatcaggttttcggcgtgtttgaagaggaagaaaatcctttgatgacacaggcgaaatacatctgcgcaacaagagcacttcatgaattgtatatgtatacagtgagtttataaaaatttaagaaattagacgtgattgacaagaggaaagacggatgatataatgcctccccggtaagtttacaacaagggaggcagaagatatgactctatatcaggagttacagttgaatcaggcaggatccaagcagctgattcgaaacacacaggataaaaaagaaaaagcacgtcatattgcggtttatctatttaaaattttactgacactggctttttgtgttgcatttgtcacagtatacacaaaggtattcggcagtgataacagcattgtaggagtggtagtgctgttgagcgtgatgacatttcggtttgcagattttgggattcatgcaccccatgcacttagttctctgatggtgatctggggaatcatgacatttggtccccggcttgcaaatgcaggaaatctggtgacggagctgatcgtcaatatggtatgtattttcacgctgatgattctgggatgtcataatgtagtgatgttcaatcagtctacgctgctgcttggatatctgcttttgtatgggtatgatgtttcaggcacacagtatctgcagagaattgcagggatggcggtcggcggcatcctgacagggattgtgttttaccgcaatcacagacatcagaaatacaaacggacgttgcgtcatatttttgaggaatttgaccttcattcctccagaaccagatggcagatttgcgtgaccctgggggtatccagcgtgatcttttttgccggactgtttggattgccgagagcgatgtgggcaggaattgcggcgatgtcggtactggtaccgtttcatgcagatatgaaaggaaggatcaagggaagaattccgggaaatatcttaggaggcctgacatttattgtgttatatctggtacttccggaatctatgtattctctgatcggtattctgggagggatcggagtcgggctctcagctacttatggatggcaggcagtatttaattcctggggtgcaatgtccattgccatgacatttctgggagtgggcggcgctattttttaccgtatctttaataatgcatttggagctttctatgcactggttttttatcagctgttttctatcggtatggactggattgcagaagtaaagaaaaagcgtgtttccgtttaaaatggaaacgcgctttttctttcatattaataagctttgagatcctgacggtaaaagcagattcctacgatcatagtaagaaattcagcggcaggaaatgccagccagattccggtgcttccaaagaataccggaagaatataaacaaatgccaccaccagaatacatcctcttaacaggcagagtgaaagggactggacggattttgccacggactgaaaataacagataaagaccatgttgatgcccagaaacaaaaatccggtaaaataaatccggatggccggagctgccagagtcaggatttcgctcgttggttccagaaaaatataagtaaacagattcggaacaaacaatcccagaaggactggcagggtacagatgatcacagatgtttttaatgaaagtgactgtacctttaagatccggcttgaaagccctgctccgtggttgatcgacagaatcggctgagcagcctgttcgattcctttacagaggcagatgactaccagagcagtattacagatgatgccatatacactgactccggtatttccgagatagcggatcagctgcaggttgaaaataaaaatcgtaaatccggatgcagcttcgatgacaaaactggtgaaaccgtttgcaatgatcttctgtaaaaaggaaggatgaaatccttttaatgtaaatttcagctggttctttttcgtaaaaaagtgcgtgcataaaataaccacggtaaggcttgaaccaagaacagtggcaagtgcagcccctttcattcccatattcataggatacacaaaaagatagtccagtacaatgttggtcactccgccggcaatgactccgttcatggcaagttttggtgcaccgtcattgcggatgaaagtctgaagaaaagaagaaaagaaataagttcccattccccagataatataaggaagatagtccatgatgtaaggcagggtttcttctgtgccgccaagcagccatgcgatgtcttccataaacagaacgcagactgtcatggagatgagaagaagtgcaaaattcagcagcagggcagttgtgaaataggtgtttccttcttccttttgtgattttccacggcagatggacatcagtacagagccgccgacaccggataaaagtcccagaccgaaaaagatattgtagatcggcagggagatattcaaggcggcaagtgctgtggctccaagccgctttccgataaagattgtatctgcaagtacatagatggatgtgaccatcgttccgcagatagccggtatcagataatgaaagaataactgacggaccggtttttgaataaattcattcgtattcatagcataactccattcctaaaaaattctccgcatgatagtgtaccatagaatgacttttaagaaaagctatttcaaaagaaatcaatctcgtgtataatgaacagtaacctgaacaggtgattggtgaataaaaaggagaaaaaagatgataggaattatcggagcaatggaagaagaggtacaggcattgagacatgccatgaagattcaggaggagaaggaaatcgcctccatggtatttcatagaggaattttatatggaaaagaagcagttgtcgtgcgaagcggaatcggaaaggtcaatgcagcgatttgcacgcagattttagcggatcattttgatgtagatcttgtgatcaataccgggattgccggttctctggatgcagcgatcgatattggagatatggtgatctctacggatgcggtgcagcatgatatggatacgagtattttcggggatccgatcggacaggttccgcgtatggatacatttgcattccccgcagatgcccagttggtcgaaaaggctgtgcgtgcgaaccaggaggccaatccggatatccatacatttaccggacggatcgccagtggagaccagtttatttcctcacaggaagtaaaagaacgaatcgtaacacttttcggagcaaaatgtgcggagatggaaggtgcagcgattgcacatggggcatatctgaatcagattccatgcgtgatcgtgcgtgcaatttccgataaagcagacaacagtgcatctatggattatccggcatttgagaagaaagcaatcgaacattccatcaggttgttagagaaacttttgcctgagttatagagaaaaagacctgggagatcaggtctttttctctataataacatttttttggttactgttcccacaccaacactctttcagacacaaattctgtacttcagacaaaagctcttgtagaaggagaaaggctgttttatactaaaactacgccagaaaaatgatgggcaaaggaatgaaaagaaaatgaaaaaaattgcgatatgtgatgatgagccggcagtgagaaaacagatggaggcatatttcaaagagctggaatcggttttttgcatctcttattttgaaagcggagaggcactcctggaatcggatgttctttatgatgtgatctttctggacattgacatgaaaggaatttcggggattgatactgccagaaaaatcagagttcgggataaaaaggcaaagatcatttatgtgacagcttatgaagattttcgagagtatgcgtttggtgtccatgcgttcggatatctggtcaaaccagtggaaaaagaaaaaattctggaaatccttcaggaagcttttgactatgaacaggaggagcaaagaggtcccaggatccgtcttcatacagaggcagggtatcaggaattttatatgcaggacatttgctattttgaatatagagaccggaaaatccggattgtgacgcagaatggagaagcatggatgcgaggaagtatcagtaaaatggcagagtcttttcaaaacatgggctttgcagttcctcataaaagctttgtagtaaatctgcgtcatatcaaagatataaagggctgtgatctgctcatgacgacaggagagatagttcccctttctcaaaagaaagcggcagattttcgggcattgctgacgcgatggctggcgcagcaggtatgaaaggagaaggcgtatggcacttgagatggggatgaatctggtctgttctgttttggaagaggtggtcatgtgtgtctgtcagtatctgtttatgagcgccaatgcacagacgatccaccggaaaaaaatctggtatttctttggatttactgcgcttggcgcaagtgtttacggtgcggcatttctgacagggctgaccggaaatctgtggatcggtatacagatccagctgacaggggtgctgcttcttggaattttattgtttcacagaaaaatcggaagtctgctcctggatctttttgtaaacatccttttgattctttccatagaagtggggatttttctggggaattacctgcttgcacagggggcgtttgagaatcttgtgtggtacgggaatgttaccatgctcttcaaaatgtttttcatgattcctgtgacagcggccgctgttatgtggagaaagagacaaaaggaaacagaaatgggaaacttgcagatactgctccttttattacttccgctttttagcgtactgtttctctattcactgatagaaatgggacatatctatatggagctgtatggagttcgtctgatggtcgtcaatctgggagcgctggtgcttttgaatttttgttttttgtacctgtttggatattggttccgttctcataagctggagcggcagcttgcagagtttcagatgcagaatgagctgcagtacagatattatgcggaattggagcaaaaatacagagagtccagaaagatcatgcatgatatgaagaatcaccttcaggctgtagaacatttatatcaggcaaaagatgggcaggagcaaggcggagcgtatgtgaaggatctgtatcatatgttgaatctgttgggtgagaaatattacagttctaatcgtatgctgaatattatctgtaatgataagctctcattggcgcggcatcctgcagtcgctatatccgtggaaatcggagatgttgatttttcggatctgcgggatattgatattacgacgattttcgccaatttgctggataatgcattggaagcggtggaggcttttggagagggagcctatctgaatctgaaaatacaggaggtgcatcatttcagggtgatcagtattgtaaatgcaagcagacccggaatgaaaaaggaaggacatatgggagtgggactggaaaatgtgagacggacagtagaagcgtatcagggaacaatgcagtgtgaaattgtgggagaagaatatcgggtcagcgtgatgctgccgggaaaggaggactcatgaatttgctgtttgaagtgatcagtttattgatctgtatcgggataccggttttgggaggaatttattttgcggtgaaaggaaagggatattttcttacgtttcttacaggaattctgtcttttgtggtgacgcagatgattctgcggatcccacttcttggttatctgaagacaaactgggagtggtttatgatactgccatacagtcattattatatatatatggcgattgcggcattctctgcaggtgtgtttgaggagacaggaagagttgtgggacttggtgtcttgaggaaaggaaaaaccagctggatggatgcagtggcatttggacttgggcacggcgggatcgaagcggtgtggatcggtgtgattggagtcttgccgaatgttctgaatgaagatagcagcataagtgtggcagtgttgctttccggagcagagcgtttttgtgcgatggcctttcacattttgctgacactggtcatcatggaaggaatccggagacacaaaaaattgttttattggctgatcgcagtagttctgcatggattatacgacttttcaattgcatttcagaatacaatcctgatctggggtgttctgatttttggggtcgtggctgcgatgatagctttgatttttacaaaacgaaagtggaaagaagaaaggggaacaagacaatgaaaaagaatatgaaaaaactggcagtgggattcggcgttttcgtgatggcagtgggaagtctgatgggatgcagctctctgggaagcggaggaaatgaacaaggagagatcctgaaagaactgccggaagggtttgacaaggagacggtaagagagcaggcaatggaagatattgagatcgcgcagtctaaagattatgagagctggaaaagcaggtttgccaaggatctgcagagcagtctgacagaagaatcgtacgattcctatttgaaaatcctggagaaacagggagaattcaaagagtttggaaaatgtacgtatttagggcagataaaagataataaaaagtacggcggagtcattattgtggtaaaatatgaagaaggcaatgtcaattacagtcttgcgtatgacgaggatatgaatctggtcagctttacgatgtaagagaattgccaaaaagggaaaggaggcgacagtatggtacatcatattgtaatgtggaagttcaaaccggaaatcgaagaggagagaaaagcagacctcaaaaaagatatggaagcgaatctgagcagtctgattggaaaggtaccgggacttttaagtgtatcgtttgtaagtgaaccatttgcatcaagtactcatgatatggcgcttgtgacaacgtttgaaaaagcggaagatatcaaagcgtattctgcacatccggagcatgtcaaagtagcggatacatatgtgcgtccgtttgtgacagagcgtgcatgtctggattatcaggactagaagaaaagtatcggagcggacagtgctccgatacttttttaaaagggatattccagtaattctggaaaacgcgtgattttgtgagcataatgagtgggagaaccgaatccgtattctgcaaaaataaacggaattccggcaaaggtgcaggcatcggcatcccccttcgtatcccccacataaacagcatctgtgatctgagcgcgttccatcagaagacgaatgttttcgcctttggaaagtccggtatttccgaaacattcgaagtcggtgatggcgttctccagtccggtctttttcagaaagagttcaatatatcctttctgacagttggagacaatgcagacagcataattctgtgacagtgttaagatcgtctctttcacgccgtcgaacagaagcggttctctggcattttccagataaaattcttcgtattcacagcaggactccatcacaagagcgcgctgagattctgacagagtcggaaagaggtttgcggcgatctcatccatcggctttccgaattcctgtttcagacagtccgcggtaatgggagtatccagagggatcatcagctcactggcagcctgcatccatgcttcggctacaacaccggttgtgtcccagagtgttccgtctacgtcaagtatcattgctttcataatattagattcctcttctttcatttaaaatcttcagaaaatcaaaaaagatttcaagtacagtatagcatagattctgcttgggaggaagaaaaagagacgttggaaagcatttggtatctgtgctataatgaacaaagtttttaactgctttagacaggaataaaaagtagaaagaggtacataagatgatacgttttgcaacagaagaggatgcacaggcattgcttgcgatttatgcatattatattgatacagaaatcacatttgagtatgaattaccgacagaggctgaatttcggaaaaggattcggactgtcttggaagaatatccatatctcatttatgaagatgcgggaaatatccttggatatgcctatgcgcaccgccatttggaacgggctgcatatcagtggaatgtggagctgaccgtgtatctgcatccggatgttgtttccagagggatcgggagaagattgtatgaagagttacttcggattcttacagagcagggaatctgcaatgcatacagtctgatcacccgtcccaatgaaaaaagtgaaaagctgcatgaagcgatgggatttaccctgatgggagttttgaaaaatacaggctataaaaacggcaaatggcgggatgtcagctggtatgaaaagcagttaaacccatatccggaacatccggttccatttcgaaaaattgatgaattatatagaaaagaagaaaattttggatgatccagatgatcttcctgtattttagtttgataaagttcaccgtctattttatataggatacgatctcgtctggtaacacagatgcagtcgatactgtgatccatacagaagtgctcaatactgtggcagatttcttcttttgtaggtttttgatccttaaaaatgataatttcttttttcataaacagtcctcctgattacagatattctggaattattccgaaagaagatgataaagtttcagacagttttttagctgttgtgcagcaaaatcatccattggacacagtgggagacggcagggaccgaccgaaagtcccatcatgttcatggcagtcttaactggaaccggattgatgtcagaggtcagcgattccaggagtgcttcaatattcgaaagaacggagattacaccctttgctccaagagcaagggcagatacagcctggtcgtcatttccgcagtagatatcaaggcgatcacgataacgggaagtgatttttgcaagctgcgaaaaatttccactggcctccttgacagctgtcacatttggaatttccaacagttcctcattttgcgcgtttttacataaaagttgtgcgtggcttgtgttattagaaccagcacctgcaattacagggattcttccattgacaattcggcaggtgaactgaatcagacgcagatgttcttcatcgcttaaacaggcagattctccggttgttccagcgactacgatggcattcgtatgatgtgaaatctgatattctaaaagttcttccatttttttataagaaatagaaccatccatgttcatagggggtaataattgctgttgcagaacctttaaagacagaagtattcatttgttgttcctcctctaaatactgttttattaggcttttctctatggtaaactgtcttttgtaaaaaaggtattaagaaatagaaagagtatatgaataaaatatgaaattgacaaaatggaaacaaattgacacaatgtattaatgcaataatacaaatgaggtgagagaaatgaatgaggatctcgttcttgcgattacaatgttgattattttggcggttgtagtgctgtttatccagatttcacagcagatcaaggtgaaacggattcaaaaaatgaagatccagaggcggtttggagagattcctgatatggaggaaatacttccgatcgagaggatcagtgtctatcataaacaccagggaagggaagatgtggatcaggtaacctggtcggatctttctatggatcaggtatttcagcggattgatcagtgtgacagtgcagcaggagaggctgtactttacaacatgctgcactgtacagataacgggcaggcgcagtggaaagaattgctgaagtactatgaggagcaggcggaaccgcgtaaaaaagcagaagcaatcctgatttcccttgggaaaagagaagggctgtattatcttccggaatacgtggatacacttcaggcaagtcacgtgggctctgtgttcttttatcgcctgcttcagatcctccttctgggaagtgttgtgggcggactgtggaatgttcagatcctgccgctggcaggcgtgatggcaattgtcaatattgcggtttatattatgacgcggatgaaatatgagcagcagatgagcatgatggaattgatcgtacttgtgattgataccggaaagcagcttacaaaagaaaaatgtgccggccctgtacagaaagaactggaagagaagttaaaagaactgggaaaactggataagctgatcggaaagatgtctgctatgaggcgaaacagctattccagcgatcagggggtgtttctggattacctgttcgggattacactctggcagcttatatcttatgaaaagagtgtgaaatggctggagaacaaacgagagagttatctgcagctgtttgaagagatcgggcgcctggatgcggcaatcagtattgcatcttttcggaaaagtcttccgttttatactgagccggagtttcattctgaaagatctgtacacatggaagagatgtatcatcctctgatcgaagaaccggtgagcaattccatggactggagtcgaaactgtattatcacaggcagcaatgcatccggaaaatcgacatggattaaggcagtggcgatcaatctcattcttgcccagacaatctgtacctgcacggcaaagcggtttcagatgcatccgggacagattatgacttccatggcagtgagggatgacatcatgaagggggagagttattttctgaaagaaatgaaatatctcagaagaatgctggagagcttttcagaagagaagctgacgatctgcattattgatgagatcctgaaaggaactaacacgaaagagcgaattgcggcatccaaagcgattctggattatatgcagagacagaattgtcttgtgatggttgcgtcccatgattatgaattgacagtattgctggaaggtacttatgaaaactatcattttacagagcggatcggagaggatgatatttattttgattacaggctgtatccgggagctgtgacatccggcaatgcaatcaagctgttgaaattcatgaaattcccggaagagattgtgacagaagcaaagcaacaggttacaatagaattgtaagatttgcagtaaaaatacatagaaaacagaaaaaatatatataaaactaacaacaataataaagaaagtgttaaaattttgtaaaaaatgaattgacacccggcatgatataacgtatagttgacttgtgtacataattctgtgtcaaaaataaaaaagggagggaaaatttatgaatcttgacaaaatttttcacttgaaagaaaacaacacaaatgtcaaaaccgagattcttgcgggtgtcacaacatttatgacaatggcctatattctggctgtaaacccgaatattctggcagaggcaggaatggatcacggagcggtcttcacagcgacagctctggcagcgttcatcggtacgttatgtatggcaatctttgcaaactatccgtttgcactggcgccgggaatgggactgaatgcgtactttgcatacacggttgtactccagatggggtattcctggaaggtcgcgctggcagcagtactggtagagggtattatctttattctgttatcactgctgagtgtgcgcgaggcaatctttgatgcaatcccgtataatctgaaaaaggcggtgtcggtcggaatcggcctgtttatcgcatttatcggattgcaaaatgcgaaggttgtgatcggaggctctacgcttttaagtctgttctctttagatggatacaataagaatctggctgcggcagcagggggcaaagatttcgtagcggcaagcatgaatgatgtggggatcacagtgctgctggcaatcatcggaattatcattaccggaatcatggtagtcaaaaatgtaaaaggaaatattttatggggaattctgattacatgggtattaggaattatctgtcagtttgccggactgtatgttccgaatccggagcttggattttattcactgcttcctgatttcagtgcaggaatcagcattccaagtctttctccgatctttgcaaaattcagtttagaaggcgtgccgattctggaatttgttgtgatcgtatttgcattcttgtttgtagatttgtttgatacactgggaactttgatcggagtttcttctaaggcaaatatgctggataaagacggaaagcttccaaggatcaaaggagcgctcctggcggatgcagttggaacaacagcaggagcagtactcggaacctctacaacaacgacatttgtagaaagctcttccggtgttgcagaaggaggacgcacaggattgactgcagtaacgactgctgttttatttggtctgtccttgttcttgtcaccgatctttctggcaattccatccttcgccacagcgccggcgcttgtgattgtaggattttacatgctgagtgcagtgacagatattaattttgcagatgcagccgagggaatcccggcatttatctgtatcgcagcaatgccgtttttctacagcatttctgaaggaatctctatgggagttctctcctatgtattcctgaatctgctgacaggaaaagcgaaaaagatcagtccggttatgtatgtactggcagtcttgtttgtattgaaatatctgttgatttagcatcagagagaattttaaatgtccgaataaccttgttgaaaggttgttcggacattttattttcgaatcatataatatgtttgatggttctggcggatttcagatatcagatgctgccggagcatataaggcagcagagaatctaaaaattgttttggatcggtgatctggatacgttcactggaaaatggctgttttgcgtacagatctttgactgcttcttctaattcctgacgtgacagttgtttttgttttttcagagctttctgaattctggagacaccctttgaaaagagcaggttggataagtcctgctgctgtctctgactgcgccagagtccccagccgtaaataagagcggtggcagcggcgaataacagaacaaagggaatatattgaagaaaagacatatcaataaacctcctttagctcgatcagatgatgatcctttaaaatctccagaaaccggatcagacgggcaagtggtttttccatttttggaaactgtgactgcagatccagtgagagctgatgtacggttttctgatcattgattgactgccagagaaagctgccgtagtcatccagcttgatcgcgcttacctttggacgtttgaaaaagcgctgtgcgatccggtgataaaatcctctccattcgatcatgaccgtaacctgacctttgtcgtttgtttcatactcgatctcaggatttttgacgacaataaaatccatataattctgatttgaaatcttctttttctttgacataatgtctcctttttaaaataataaagaataagtacagcctgtctttcgacaggccgtatcttctgttttctgctgtttcagtgaatggaataaaaattattcgcttttctttccgcctttgatacatactcttgcgagatataataaaagcaggataaatacaattaagcttccgatttctccgattgagaattttttggagagatcgatgatcttatctaattttgcaacggcaaagattgcgaggatgacacccatcaatccttctccggcgatcagaccggatgtgaagaggattccgtgatccacgcttgcctttttctctttttcagagacgtttcgtttgtccatgaacagacggacaagtccgccggccataattccggcatttaagctgaatggaaggtacataccgactgcaaacggcattaccggaactttcaggatttccatgacgattgctacacagacaccaatcaggatcagtgaccatggaagttctgcgctcatgataccttctaccagcattttcatcatcgttgcctgtggagcagggatcgcttcagatccatatccccatgcattgtccagaagctgcaatacaaatccgatcgcagcagcagaaacaacgacaccgatcatctcaccgatctgctgtttctttggagttgcaccgacaataaatccggtcttcaaatcctgtgaacagtctccggcaatcgctgcgatgacacagataataccaccaattgcgatggcaccagtcatacctttcactccggttgtaccggtagctttcagaagtaatgtggcgatcagaagtgttgcgatcgccataccggataccgggttgttggaagatccgatgagtcctaccatacgggaagaaacggttgcaaagaagaatccaaatacaataacgatcagagcgccgattggattaaccgggaatgccggcaccagccagatggcaattccgatcaccaggatcataacaagtaagaatggcatcggaatgtcctgctctgtacgcagtgctgaagcactgcttttctttttcatactctgcattgcctgtttaaaggtcttcgcaatgagcggaaggctcttgatcagactgatcacaccaccggtcgcaacagcacctgcaccgatatatttgatgtaagttccccagagatcacttggagccatctgggcaatcggatcggtcccagggaaaattgcctgtgcatctgcaccgaacagtgcgatggcaggcatcagtacaaaccagctcaatgtacttccggccagcatatagctggaaatcttcggtccgcagatgtaaccgacacctgccagtgcagggagtacctggactccaacagaagaaccggcataggctttgatgtcatatccaatctcacttgggaagactttcagtccgtctgcgataaatttgtaagcggcagcgattcccagaccggagaataccgtacctgctttgcttccgccttcttctccggcaagaagaacttctgcacaggcagtaccttccggaaacggaagtgtgccgtgttcttctacgatcagtgcctgacgcagaggaaccataaaagcaacaccgagaagaccacctactaatgcaacaagaaagattgtgatcatactcggagaatcgatcgttccttcttttgcccacaggaaaagagcagggagcgtaaagattgctccggctgcaacggattcaccggcagaaccgatcgtctggacaaggttattttccagaatggagtctctgcgaaggatgacgcggatgattcccatggaaataaccgccgccggaatagaggcggagatcgtcataccgacacgcagacccagatatgcattcgccgcaccgaaaacgatggcgagcagaataccaatcaggagagaggttaccgtaaactccggtacgacacggtcggccgggatatacggcttgaaattatttttgttatcagacatgtataaatttttcctttcttttctcaaaatctctttcccaatccatctgaaattacagcaaaatctattatatcagagcatccctgcattccccagagaacgcggggatgtcataatatcaaaaataaggatatgttactggttacagtaacaagtctatgcaagtttttttaagacatctgtcaagagctcatagaaccgttcgaaagaatccagcggcagatgttcatccggtgtgtggcatccgcggatcgtagggccgactgcaatggcatctagtccagggatcgcatcagagaaaagtccacattccagacctgcatggatggcttcgatcttcagatcatcgtggaacagttctttgtagctttgcacaaaaacatcgcggatcggagaaacttctgcaaaactccagcccggatactcgccgtgcatgctgacttcgaaaccgaaggtttctgccagaagacagagcttttctttgagtgcgctcatcagtgtggcaacagaagaacgtggtgcaaatacaagggatgcacttgtctcatcagttgctgcaattccgagatttaacgaagtgactgtaaaaccgtccaggttcatgttgcggaattgtacaccgtttggcgcaagacacattgccgtgataaaggcttttccatcctcggcagagatcacatctgcagttccgttttctgtgcttacaaggaactgaaatgccggctcatacggacagatctcggatgaaaagtcagcagagagtgccaaagccagattttccgcattttttgcagcaacttcatcagaatagaacagagttgcggatgtctcacgagggatggcattgtcctttgtaccgccgttaaaatcaactaaaagggcatcggtattgtggaacagatgattgatcatacgagccatcaacagattggcattctgatgttctttgttgatatctgttccggaatgtccgcccagaagtccggtcgcctccagatggagcagcatcccttcttttttactgcgggtgattggacgggtgagagcgaaacgaagtcctcctgcacagctgactgtggcaactccctcgtcctcggaatccagattgatcatggtacgagcggaaagaagggatttatccagtgcttctgctccgttcaatccgatctcttcctgtgtagtgaacacacattccagtgccggatgtgtcagtgtatcgtcatctaggatcgcaagcatgcatgcaacggcagctccgttgtccccgccaagggtagtgccgtttgcggagagtacgccgtcttttatgatcagatccagagggtctgttgtaaaatcatgtgcaacgcctgcgagtttttcacataccatgtccgtatgcccctgcagcataacggccggtttttctttagcccctgcgcttgcaggctttttgatgatcacattgaaaagtgcatcccggtgataccacagatttcgttcttcggcaaatgccacgagatagtcactgattgctttctcgttggcagagccacgaggaatggcactgatgtcttcgaaaaagtgaaataattttgctggtttgtatcctgtgattttataattcatagatcatacctcttttctaatataaatatcgttcgttctattctagcatttttagcgtggtaaagcaagaaaatcttagaaaatgaaagtggttcagcggaaaatcaaaaaatccgggaaagacaggaaacgaataggaagaggaggttctgcatacattttggataagaggcgtataacggcagtgcagaatatgaaaagagaagcagaaaaagaaaagttaagagaacggtttgcggcggctgcaaatatgccaaaggatgtggtgttaggggcatctgtcgtgactgtgatcggaaacggggaaatcagtattgaaaattaccgcggaattttagaatatacaggagagctgatccgggtacagacgaaaaaagggcagatccaggtacacggaaagggactgcagattgagtactatctgaatgatgagatgaaaataacagggaagatccatacccttgaatatgaaatgtgaggtaaacagcaatgcagagaatcctgcgttttttgagaggatatgtaaaaatcagaataaagggatactccccggagcgttttttaaatctgtgcagtcatcatcagatcgatatctggggacttcagccctgtaaaaattcttatgagatgtatgtaaagctgaaggattttcggaaaatccgtccgatcgtgagaaaaacgcgcacgaaggtcgttttagtggaacgcttcggcatgccattttttctaacaagatgtcagagcagaacatggtttctcgcaggagctgtgctctgtatactcctgttgatgttctacacttcgtttatctgggatatccattttgaaggaaatgaaaaatggacggatgaagtactgcttcaatttctggagcaggagaagatcacacctgccatgccaaaagggaaggtagactgcgcggatatcgtgcggaagattcggcagaaatatgatgatattgtgtgggtctcagcctccatcgatggaagcaggctgaaaatacagatcaaggagaatgaagatacgtttcaggaggtgcaaaaggaagaaaaaccctgtgatctgatcgcagaacaggacggggtgatcacaaagatggtgacacgttccggagttcccatggtgcatgtcggggatcaggtgaaaaagggggatatccttgtgtcaggcagaatcgaggtgtgcaatgatgcaaaagaggtggtagaatatcagtatgagcaggcagatgcggatattagggcagacacgcagacagaatatgaggatgaaatcagcacatactatgaagaaaagaggtatcagaaccaaaaacggatgcaggtttttgtggaatttaaaaactgggaatgtcatcttggaagtgtgaaaaattcttttccgaaaagtgaacaatatgtgatgaaacgtcaggtgaccctgggagaaaattttcatcttccactattttatggggtaaaagttgcaaaatcataccagataaaagaaaaaagatatacaaatgaagaaattcaaaagaaattgagcgaaaacttcaaacaattttcaaaggaattgaaggaaaaaggtattcaaatacagggaaatagtgttaaaatacacataggcaaaaaatctgcggttgcaaaagggagcttatacctgaatgaagacattgcaaaaaaagcagatacagaaatattagagattgaaaggaataagaaggatgagtctttcagaactgatgattgatataccggcggagcacgagagaaatgtgttcgggcagtttgatgcgtatgcaaaaaagctggagcggacgtttcatgtgacactgatcgccagagaaggcaaagtgaagatattaggtgaagataaaaatgcagagaaggcaaggcgggtattggatcagcttgctgctctgtcaaaaagaggaaatgagattacggaacagaatgtagattatgccatgtcactggtctatgaggatcaggaggaggcgatggtggagatggatcgggaattgatctgtcacacattgcagggaaaaccgatcaaaccgaagacgctgggacagaagcgttatgtagatgccattcgggaaggaatgatcacgtttgggctgggacctgcgggaaccggaaagacctatcttgccatggctatggcgatcacagcgtttcagagaaatgaagtgagccgtattatccttaccaggcctgcgatagaggcaggagaaaaactgggatttcttccgggagatcttcagagcaagatcgatccctatctgcgtcctctttatgatgcattgtatcagatcatgggagcggaaagttttgcaaaaaattcagaaaaaggtctgatcgaggttgcacctcttgcttatatgagaggaagaacactggacaatgcgtttatcattctggatgaggcacagaatacgacgccggcacagatgaaaatgtttctgacaaggatcggatttggttccaaagtcgtgatcaccggagatgccacccaaaaggaccttccggcaggaacggtttccggtctggatgtagcagtcaaggtggtaaaaaatctggaggggatcagcatctgcacactgacgagcaaggatgtggtgcggcacccgcttgtacagaagatcgtaaaggcatatgaagagtatgaaaagaagagcacccgtacaaagggcggtacaaaaaggagaaaatcatgagtttgtatttagaagaagaaggagaaatcacacttccgtttgaaacgaaagaagtggcagatctggtggtggaagccgcattggaatatgagggatgtccttatgaagcagagatcaatctgctgctgaccacagacgatgagatccaccggatgaacgaggagtttcgtcagatcgaccgggcaacggatgttttgtcgtttccgatgctggaatatgagactccgggagatttctcgtttgtggaagaggaggccgaagcatttaatccggaatctggagaactgatgcttggtgacattgttatttccaaggagaaggtacttgcacaggcagaggcctatggacactcaccgaaacgggaatttgcatttctgatcgcacacagtatgcttcatttgttcggatatgatcatatggaagaagaggagcgtctggtcatggaagaaagacagcgtgagatcatggaaaaagtccagattttaagggcgtgacggaggagacggatggcagatatacagaagaacaaaagaagaaaaaaacagtcgaaagagaatgaatttttgatacagggagcaatccttgcagcggcggcagtgattgtaaagatcatcggggcattgtaccggattccgctgaccaatattatcggagatgagggaaacggatttctcggatatgcatatgagatttatgcgatggcactgatgctgtcctccttcagtcttccgatcgcggtatccaagctggtctccacaaagatggcgatgcaccagccaagaaacgcctttcgaatttttaaatgtgcaatgatgtttgcggtttccgtgggggcagttgtggcactggcaatctttctgggggcagatatgatctccagacatctgatggaatcgccgcttagtgtctatacactcaaggtgctggctccggcgctgtttatcgtggcagtgctcggtgtaatgcgcggatattttcagggaatgggaactatggttccgactgcgatctcccaggttttggagcagatcatcaatgcaacagtcaatatcgtaggagccagcatcatgatcaaagtggggatggcagctgcgaaaaagcaggacaatcctttgcttgaaccggcctatggggcagcaggaggaacggtgggaacggctacgggagcactggtcgcactgttgtttttgatgtttgtgtttgtactgtttcaaaaagtgatgatgcggcagatgagaagagaccgcacgaaacatcaggatggatatgggcagattttgaaggttcttcttttgacgatcgccccgatcctgttcagtacggcaatctataatatcaatcagattattgacctgaccttgtttgcaaagatcatggcagcacagggagttaccttgaaagaatatatcattccacagggaatttacacaggaaaatacaatacgttgatcaacatcccacttgcgatggcgaacggacttgcagcatctgttattccggcactgacagcggcagttgcctccagaaaccggacgcagatgcagaataagatcaatcagacgatccgtcttaccatgctgatcgcgattccttgttttgtgggatttgtggtactggcatcgccgatcatgcagttcctttacggagattccagaacggagcctgcactgatgctggcatcaggggcgatcacagttgtgctgtatagttcctcaacagttacaaactcgattctgcagggactggaccggctgactgcaccggcaaagaatgcgttgatttcactgggaatccatcttatggccgttctcgtgatgctggttgttttcaaatgggggatttattctctcgtattcagcaatgtgatcttcagtttttgtatgtgtgtactgaatatgaaagatgtatataaggcaagtggattcagacaggatttcaagacctgttatatcaagccgtttctggcagctttgatcatgggagtggcggcgtttgtgtccaacaagcttcttagcaccctgatgccgggaagatttctggcaaatggactttctatcatcattgccatgctggtgtacgcagtggcggtgatccgggtaggaacgctttccgagtcagatatgctggcactgccaatgggcggacggattttaagagtctgcaaacgttttaagattttcccacaggagagagacctggacgatgatgatgacattgaatatctggattgacaaaatcaagtgaactgaataaaaccggtacaaagagccaatactgtatgaaaaaaggagtcggacttttatgaagaagaaatactgtattggcttttttgtggccttgtttgtgtttgtcagtctgctcggaatcggatatcaggtgagttaccagtatgtgatggacaggcagatggcgcggcagcaggataaacagcaaagaagtgttgctgtgaaaggagaagcagaaaaaaatgaaggatattatctggccgaactgcatggctatgtggtcgtctatctgtctgatcaatctacaatttatgaatttacagacattccgtttgaagaactgccgaaagaagtgcagacaagtgtaaagcaaaaaaaatatgttgaaacagaggaggaactttacgcatttctggaaaattattccagctaaaaaacagcggggtagacgaaaatcgagaaatagtgtaagatggagaaagaatttttgggaaaggataagattatggacgaacaaaaggtaaaaagaatcaatgaactgtatagaaaatcaaaagcagaaggactgactgatgcggaaaagaaagaacaaaagattctcaggcaggaatatattgatgcattcaaacgcaatttgagaagtcagctcaataatattgatgtggaagaaaaagacggtacaatcgtcaatctgggagagaaatttggaaacaaagcgggacattagaaaacagatgttatgcgccagagaccggctgacagacagagagtgggagacatacagtgacaggatcacagagcaggttgtctcccatcctttatttgtgcaggcgaaagaaatctggtgttatgtatctatgggaaaagaagtgtgtacagaacaaattctggtaagtgcgtggagagcgggaaaaagaaccgcagtgcctaaagtgaccggaaaacgggagatgaagttttactacatagaatcgttgaatgatctggaaacaggagcgtttggaattttggagccgaaagaagagaaaaaaggggcagactgctgcctggaaaaatcggatctcttgatgcttgttcccggcgtttcgttcgatccggcgggaagaaggatcggatatggaggaggattttacgacacgtatcttcagaaaatggaaggatgccatacgtttggacttgcgtttgaggtgcagatggcagatcagattcctgctgaggcacatgacattcggatggaatatgtgatgacagaaaagaggtgctggaaatgctgacaggattaccgaaagatccgatacttcttctgagcgtggtaaatacaaaactgagagattattatccaagcctggatgctctctgtgatgatatggacgtttcaagagaagtgctggaggaaaaactcggcatgatcgactacagatacgatgcagaaaaaaatcagtttgaatagtggatgaaaggtaaggcagggaaatatccctgtcttttgaaattttataaacttagaaggttttactggataaatgcaggaaattaatgctataatacttcggactgcatgcaatgtgcagacggcttcagtgttttggcttaataaggaacaatgtgcaattcattggcagcttatccctgaggtaaggcggacaaaatttcagataccattgcagagaattctgtgagaaggtgaaatggcgggagatgccaagccctaagacttgctgaagtcatcttacgatttcttgataagaagaaagagaaaggggacgaggtagatgaagacctgatcatgaccttttatcaatagagcaactgggataaaattgataaagaaaggtcaaagtttatgaaaaagaaaatagtaagctgcatcctgtgtgcagcagcgacgatatctcttgtttccggatgtggaagcaataaggatacagaaactgataaaaaagaagctcatgcagaaaaatcggtacaatcagaagatcgtaattatgaaccggttacaattcagctgaatctggagcgatccgggctgggaaaaaatgtagagtatacctttaagcaaaaaccggatcatgtggttgcttccggagatcagatggcagatttgttttttgatctgggcttagaggagcagatggccggatacacgaaagggagttgctggagtcttgtctcggaatatcctgcaagagattctgtaccacagatcgcagaacccggagtgaacctgtcatctgtttcaaaggaagaactgcttgctacaggctgtgattttctgatcggctgggattccgtattttcagataaaaatttcagtacagaattctgtgacgaaaatggaattgccatgtatttcccatatgtatgctcagacagtgccacatttgaagatttgtacaaagactatgagacactgggcaagatttttcaagtggaagaaactgcagagcagaaaatacaaaaaatgaaggatacacttcaggatgtgaaagaggcgcttggagaagatgcatacaagaacccgaaaaaagtgtttgtctatgattcgggagaagatgccccttttacagcatgccaggggatgccgggagatattttgaaatcggcaggcgccatctctatttttaatgacattgaagccgggtgggcaaccccttcctgggaagaagtggtagaacgtgatccggatgcaatcctccttttagactatgatggagatgtagaagaaaaggcagaatttcttcgcaccaatgctgcaacaaaagatttaagggcaatcaaagaaggaaaaatctattctgcatgctgtgcagacatgcagggctctgccggatcagcagcagcagttgaagaaattgcaaagcagttatatccagattgttttcaataggaaagggagttcttctattacatgaaagaattaaataaaagacagaaaagagtaaggcacctgtccctgttttgcgctgtatttgtgtgcagtgttttagcggtaggttgttccgtttcctttggagctgtcaagattcacccttttgaagtatttcgtattattatgaaccatctgtcagggcgggagatatttttcccgacatgggaaaccaatatggaaacaattatctggaatatccgacttccaagagttgtgcttgcgtggtttgtaggtgccggactttctgtgtgtggagtactgatgcaggcgttgacaaaaaatgctctggcagatccttatgtacttggtatttcttccggagcttcagcaggagcggtatgtgccatcatcacaggctgttttcattttgcaggcggatacggaaccatgtttggagcaatttgcggagcggccctggcaattgtattatccatggcgattgcaacatataagggaaccgttacttcgacacagctgatcctggcggggattgcgacttctgcgttgtttagcgggatcaccaatctgatcatttacgggtatcataccggatcggataagacaaagacagcacaatactggatggtaggttctttgagtggcgcaagctgggagaaagtcaaatatgttgcagctgcttttctgattacagtctgcatcattcttctttttacaagagaactggatatgctgcttttgggagatggcactgctgagaatctgggagtcaatgtaacaagaatcaaaatggttgtgatcatcatggctgccgtattgaccggaattgtggtctctgtcagtggagtgatcggctttatcgggcttgttgttccacatattgcgagaagaatggtaggatcacggcatacgatagtattaccgtttgtaattgttttgggcggattgtttactgtactggcagattttctctcgcgggtgatcgttgcaccggaggagctcccaatcggaattattgcggctttgtccggcgcaccgtttttcctgtatctgatccgcaggggaaggaggaagagcacatgaaccatagctttttgacagttcgcggattggactacagtattgatggaaccgagattctgcaggatgtttctctggaagtaccggaaggcacttttgtcgggctgattggtcccaatggctgcggaaaatcaacgttgctgaaaaacatatacaaaacgtacagaccacagaaagataccgtttatatcgacgggaaggatgttgtttcgctgtcagcgaaagagatggcaagacaagcagcagttgtcgcacaggaaaatcagaccgaatttgatctggaagtgcttgatatggttatgtatggacgctatgcacatcgtaggtttttagaaaaggaaacagaagaggatcttgcaatctgcaggcgttttttagaagaagtgggactgaaaggatacgaaaaccgctcttttttcagcttgtccggaggagaaaaacaaagggtgctcatggcaagaacgcttgctcaggagagcagactgattctcctggatgagccgacgaatcatctggatatccggtttcaatatctgttgatggagatcttaaagaaacaggatgcgacgattttttcttccgttcatgatctgaatattgcagccatgtactgcgacagaattttacttatggatcgggggaggatcatcaaagcgggaacacccgaagagattcttaccgaggaaaatattttacaaatttttggaatccatgcgcagatcacgaaaaatccgattacgcaaaagatacaagtgtattatattccgaaaggataacagaggattgttttatcttgaaaaaccaaatggattcgattataatgaaagctcatatggaatgctaagatatacgaagagatagagaggaagacaattcatgttggagaagaaacaaacgaagaagatagaagagattttaactgaaatcgatctggaacagccggctccggcagaggaacctatgcgccagtattattttatggaaaaagcacgccgtcttgtcaagacccaggcggaaaccctgggacgtccgctgacctttcatgtaacaacatttggctgccagatgaacgcaagggattcggagaagctgaccggaattctggagcagattggatatgtggaagaggaagaagagaatcaggcagatttcgtaatctacaatacctgtacggtgcgtgaaaatgccaatcagaaggtatatggacatttgggacagctcaaccgtgtgaaaaagaaaaatccgcatatgctgatcggactctgcggatgtatgatgcaggagccggaagtagtcgagaagttaaagaaaagctatcggtttgtggatctgatcttcggaacgcacaatatttttaaattcgcagagctggttgccacaagactggaatctgatcggatggtgatcgatatttggaaggacacagacaagatcgtagaagatcttccgagtgagcggaagttctcattcaaatcaggggtcaatatcatgtttggatgcaacaatttctgcagctactgtatcgtgccgtatgtgcgcggacgggagcgcagccggaatccgaaagatattatccgggagatcgagagcctggttgcagacggagtggtggaagtgatgcttctgggacagaatgtcaattcttatggaaagacgctggaagaaccgatgacatttgcacagcttttacaggaaatcgagaaaatcgaaggactggagcgtatccgttttatgacctcccatccgaaggatctctccgatgaattgatcgaggtgatggcgcagtcccaaaaaatctgcaagcatctgcatcttccggtgcagtccggaagcacgcggatcctggaaaagatgaaccggcgctatacaaaggaacactatcttggactggtggagaagatcaaagcagcagttccggatatttccctgacaacggatatcattgtcggatttccgggagagacagaagaagattttcaggagacgctggatgtggtgcgaaaggttcgctatgacagcgcatttacctttatttattcaaaacggaccggaactccggcagcagtgctggaggaacaggttccggaagagattgtcaaagaccgctttgaccgtctgttaaaagaagtacagagtatttccgccgaagtgtgcagtgtgcataccaaaacggtacagcgtgtgcttgtagagtcagtcaatgatcatgatgattcacttgtgacaggaagaatgagcaataatctcctggttcatttcccgggagagaaagatctggttggaaaactggtggatgtccgtcttgatacttgcaaaggattttattatctcggtgaaatggtagcatccatccgggtataatctggcaaaaaacgcccaaactatctgtatgagtcgaaaagacctgcagacagggagggcgctttttgtgaaaaaatggagcgaaaatttatttttatgggctttgggaggcagtctttattatggatttgaagttttcttccggggattttctcactggagtatgttcgtgcttggaggaatctgtcttttattttgtgccaaacagggactttggaccggatggagggagccgttatggaaacaggtgctctggtgtacaatctttgtgacagcagcggaatttatcacgggaatgatcgtgaatcagtggcttggatggaatgtatgggattatacaggaagaaaatggcagctgttcggtcagatctgtctgccgtttaccattattttttccgcactgtgcgtgatcggcattctgctctccgggtatcttctttattggttatacggggaagaaaaaccacattttcacgtgctttaggaagttggaaggcggacaaaattggatctggtacattgaactgaatttccaaagatgctataatggcaaaggaaaaaatacacaaaggagaaaaacgtgtggcagaattaacaccaatgatgcagcagtatatcgagacaaaaaaacagtatcaggactgcatcttattttatagattaggcgatttttatgaaatgttttttgaggatgccctgactgcatccagggaactggagattacactgaccggaaaaaactgcgggcaggaagaaaaagctcccatgtgcggagttccatatcatgcagtggaaggatatctgaacaagctggtgtctaaagggtataaagtggcgatctgcgaacaggtggaagatccaaaacaggcgaaaggaatcgtaaagcgtgaggttgtacggatcgtgacaccggggacaaatctggacacccaggcactggatgagacaaagaacaattatatcatgtgtattgtctacattgcagaccggtatgggctttccatcgcggatgtaacgaccggagattattttgtaacagagctggaggaaagtgcaaagcttttggatgagatctatcgttttatgccgtctgagatcatctgtaacgagtcttattatatgagcggcatggatctggatgatttaaaagaccgcctgggaattacaatctactctctggattcgtggtattttgatgatgcggtctgcagacagaaactgctggagcatttcaaagtagcatcttttgccgggcttgggctcgaagattatgactgtgggatcatcagtgccggggcgcttctgcagtatttatacgaaactcagaaaaattccctggctcagctgacacatattacggcatatacgacaggaaaatatatgatgctggacagttccacaagaagaaacctggaactgtgtgaaacgctgcgcgaaaagcagaagagaggctctcttctctgggtgcttgataagacaaaaacagcaatgggtgcgcgtatgctgcgaaagtacgtggagcagccgctgattgagaaaaaagaaatccttcggcggctggatgctgtggaggaattgaaagagcaggcgatctgcagagaagagatccgggaatatctctcaccggtttacgatctggagcgtctggtgacgaagattacatatggttctgcgaacccgagggatctgactgcatttggaagctctctgacgatgcttccgccgatctgctgtattatggaggatctgcgtgcccctcttttggaggagataaaagaagaactggatccgctggaggatatttctgcgctgatcaaagaagcgattgcagaagagccgcctcttgcgatgaaagaaggcgggattatccgggatggctatagcgaagaggtggatactctgcgccgcgcaaaatcagaaggaaaggactggcttgcaaagctggaatcagaagaacgggaaaagaccgggatcaaaaatctgaagatcaagtacaacaaagtgtttggatattatctggaagtgacgaattcatttaaggatatggttccggattattatacgaggaaacagacacttgccaacgcagagcgttacattatcccggaattaaaagaactggaagataccattcttggtgcagaagacaaactgtatgcgctggaatatgagatttattgtgatgtccgcaatcagatcgctgcccaggtggagcgcatccagacgactgcgaaagcgatcgcaaaagtggatgtgtttgcatcgcttgctctggtggcagaacgcagcaattatgtgcgtccgaagatcaatgaacaaggtgtgatcgatatcaaggacggacggcatcctgtggtggaaaagatgatcccaaacgatatgtttatcagcaacgatacctatctggatgataaaaaacagcggatttccattatcacgggaccgaatatggctggaaagtctacgtatatgagacaggcggcgctgatcgttttaatggcacagcttggatcttttgttccggcatccagtgctaatatcggtctggtggatcgcattttcacccgtgtgggggcatccgatgatctggcatccggacagagtacctttatggtagagatgacagaggttgccaatattctcagaaatgccacatctaagagccttctgatcctggatgagatcggaagaggaaccagtacctttgacggattgtccattgcctgggcagtcgtggagtatatcagcgacaacaaactgcttggtgcgaagacactttttgcgacacactaccatgagctgacagagctggagggcaagattcacaatgtcaacaattactgtattgcggtaaaggaaaagggagacgatattgtgttccttcgcaagatcgtaaaaggcggagcggataagagctatggaatccaggtggcaaagctggcgggagttccggatgttgtgatcacacgcgcaaaagagatcgtggaagagctgagtgatgaggatattacgaccagagtcagtgagatcgcatccagagaaaaagagcagaagaaaaaacagaagacgaaaaaatatgacgaggtggatatggcgcagatgtcattgtttgatacggtaaaagacgatgacgttctggaagaattaaagagcattgatgtgggaaatctgacgcctgtcgatgcactcaataccatttatcgtctgcagaataaactaaagaaccgctggtagaaagtaaaggagaacacagatgccgcagattcaggttttagatcagattacaatagataagatcgccgcaggtgaagtgattgagcggccggcgtcgatcgtcaaagaactcgtagaaaattccattgatgcaaaagctgcctccgttaccgtggagattcaggatggagggatttctttgatccgcgtcacggacaatggaagcgggattgaacgggaagatatccgcaatgcatttttgcgtcattccacgagcaagatccgcaaagtggaagatctggcacatattgcatcactcggatttcggggagaagcactttccagtatctctgcggtgaccaggacggagctgatcaccaagacgaaggaggatacatttggaacccgctatgtgatcgaaggcggagtggagcagagtctggaggatgccggggcaccggacgggacgaccttccttgtgcggcagttgttttataatgtgcctgccagacggaagtttctaaaaacaccgatgacagaggccgggcatgtacaggatctgctcatgcgccttgcactttctcacccggaggttgcatttacttttatcaataacggacagacaaaaatgcggacatctggaaatggaaaattaaaggatgtaatctacagcatttacgggagagaggccgcggcaaatctgatcgaactggattattccatggatggtctggtgatgaaaggatatcttggaaaaccggtgatcaccagaggaaaccggaattttgaaaattattttgtaaacgggcggtatgtgaaaaatgcgatgctctccaaagcaatcgaagatgcatacaaggactttctcatgcagcacaagtttccgttcgtagtcatccactttcaggtggatggtgagaagatcgatgtaaatgtgcatccgaccaaaatggaaatgcggtttcagaggcagcaggatgtctataatattgtgtatgagggggttcacagaacccttctggagccggaactcattcctcaggtggaggcgccggctccaaaagtaatttcacagccaaagagtgaaagtccgtttttattaaagcccaaaacagcaccgcggccaatggagaaaaagccagaagaaaaagaagaaccccatgacgaagcatatttcatgaagaagatgaaggagagagtgctttcctatcatcagcgcaattcttcggcagaagtcgcaaaaaaagagcagatcttccggccgcaggctcaggcggagaggatcaaagatgcacttgcccgtgcaaaggaagtggagaagcagccgcaaaagcaggcagaagaacagccggaattgatccgggaaacacctgtctatgaaacgaaacctgtaacagaagaaaaagcagagcagttaaatttgtttgaggagcatcttctgaaacgggagaagaaagcagagtataagctgatcgggcaggtatttgagacatactggctggtggaatttgagaacagtctgtatatcattgatcaacatgctgctcatgagcgggtgttatatgaacgcacattaaaagagatgaagaacagagaatttaccgctcagtatttaagtccgccgatcatcctgagcctgtctatgcaggaggcgcaggtgctgaatgaaaatatggaccggtttacaaggatcggatttgagatcgaaccgtttggcggagaggaatatgcagtgcgcgccattccggacaatttgtttggaatcgccaaaaaagagctgctgttggaaatgctggacgatctggcagatgggatcagcacctccatgacaccggagcttattgatgagaaagtggcatctatgtcatgtaaagcagcggtgaaaggcaataaccggctttccgcgcaggaggcagacgcactgatcggggaactgttattgctggagaatccatatcactgcccgcatggacgtccgacgatcatcgcaatgacacagcgggaactggaaaagaaatttaagaggattgtatagatgaagaaaccattgattatattgaccggtcctacagcagttggaaaaaccgctgcttcaatcggacttgccaaagcgattggcggagaaatcatttccgcagattccatgcaggtctaccggcatatggatatcggatctgcgaagattcggccaaaagagatgcaagggatctcgcaccatctgatcgatgtgctggagccggaggaagagttccatgtggtgaaattccagcagatggcaaaagaagcgctggatgggatctatcagagaggacatatccctattgttgtaggtggaaccgggttttatatccaggctctgttgtacgacatttcgtttgaaaacaatgaggaggatcattcctaccggaaagagctggaagaactggcacaggaagaaggtgcagaaaagctgcatcagatgctgcggcaggtggatgaaaaggcggcgcttgaaattcatgccaacaatgtaaaacgtgtgatccgtgccctggaattctatcatcagaccggtgaaaagatttccgaacacaatgccaaagaacgggaaaaagaatctgcctataattctgcctattttgtgttgaatgatgaccgggtcaatctttatgagcgaatcaacaaaagagtggatgctatgtttgaggagggacttgtagaagaagttacggcgcttcaagaacgtggctatacaagagggatggtgtccatgcaggggctgggatacaaagagatttttgcttatctggacggggaatgtacgctggaagaggcaaaagaaattatcaaaagagataccagacattttgcaaaacgtcagatcacctggtttaaacgggaacgggatgtgatctggatcaacaagcaggaatatggatatcaggaagaaaagatactggagagaattctgaaagaattaaaggttcgggagatctttccacagaaagaagaggaaataaaatgagagagtgtatgacagagacgatgtatgagaagctggggatttcgaaggaagtttacgagtttggacagacaatagaggcgggattaaaggaacggttctcacagatggatgaagtggcagagtacaatcagttaaaggtgctccatgccatgcaggaaaataaggtcagtgaggggtgtttcaactacgccagcgggtatggctacaacgatatgggaagagacacactggagcaggtatacgccagtacattccatacagaagcggcattggttcgtccgcagattacctgtggaacgcacgcccttgcccttgcccttgcagcaaacttacgtccgggagacgaactgctctcgccggtgggaaaaccatatgatacgctggaggaagtgatcgggattcgcccgtcaaaaggttctctggcagagtatgggatcacataccgtcaggtggagcttttggaagacggttattttgattatcctgcaatcagggaggcaatcaatgagcggacgaaactggtgacgatccagcgatccaagggatatcagacaagaccaagctattccgtggagaagatcggagagctgatcgcctttatcaaggagatcaagccggatgtgatctgtatggtggacaactgttatggagaatttgtagaaaagattgaaccaagtgatgtgggagcggacatgatcgttggttccctgatcaaaaatcctggaggcggtctggcgccgatcgggggctatattgcgggaagagaagatctgatcgagaactgcggataccgtctgacttctccgggactcggaaaagaggtgggagcatctctcggtgtcatgcagtcgttctatcagggatttttcctggcgccgactgtagtcaacagtgcggtaaaaggtgcggtgtttgcggcaaatatttatgaaagactgggatatggagtgattccgaacggaacagagtccagacatgatattatccaggccgtggagcttggcagtgcagagggtgtgatcgcattctgtaagggaattcaggcggcggcgcctgtggacagctatgtcagtccggaaccgtgggcaatgccgggatatgacagtgatgtgatcatggcggcaggtgcgttcgtgcagggttcttctattgaattaagtgcagatggaccgattaaaccaccgtatgcagtttatttccagggcggactgacctggccgcatgcaaagcttggaattttaaaatcactgcagaatatgatcgatgcaggagtgattgaactggaacgattaaaataaaaccaaaaggagagaccatgagaaaagttgttgtgatcggcgcaggagcagccgggatgatggcggctatttcggcagcagagcacggcgcacatacagttgtgctggagcataaagaccgggtgggaaagaagatcctttccaccgggaacggaagatgcaattttacaaatcttgtacagacacctcagtgttatcgcagtgatgatcctaagtttccgtggcgggtcatcacacagtttgatgagaaaaagacagtggagtttttccagaacatcggtgtatatgcgaaaaacagaaacggatatctctatccaaactcggatcaggccggtgcggttttagattcccttcgcatggagatggagcggctttgtgtggaagtgcacacagagacagaagttctggaaatcattccgaaaaagaacctgtttgtcatccgaaccggaaatgggaatgtgaccgcagaccgggtgatcctggcagcaggatccaaggcggctcctgttacaggttctgatggttccggatatgcgatcgcaaaaaaaatgggacaccggatcgtcccggtacttccggcgttggtacagcttaaatgcaagggaaaattctttcagagtatcgccggagtgcgcatacagggatgtgtatctttatatgtggatggggactgtgtttgtcgggataccggagaaattcagctgacgcagtatggtatttccgggattccggtatttcaggtcagtcgttttgcagcaaaggcgctttacaacaaacaggaagtaacagcggtcttaaattttatgcctcagatgtctgaggaagagtttacagtatttctggcagagcgtgcgagacttcggccgcaaaagacggcagaagaattcttaaccgggctgtttcacaaaaaaatgattgctctgtgggtcaaatgtagtcgcatttccaaagaaaagccggtgggaacatattctgaggaagaactaagaacgcttgtccgtctgattcagcagtttgaggtgaatgtggaagggacaaattcgtttgaacaggctcaggtatgctgcggcggagtctctacagaagaagtgaaggaagataccctggagtcaagttatgtaccgggcgtttattttgccggagagatactggatgtggatgggatctgcggcggatataatctgcagtgggcatggtccagcggatggattgcaggaagagaggcagcagatgttacgaattaatcagttaaaattaaaagtaggacacagcgaagaacagctaaagaaaaaactggtacgggaattgaagatccgtccggaagagctgcagaaatttgaaatccgcagacagtccatagatgcgcggaaaaagccggaactgtactatgtatacagtatcgatgtacaggtgaaaaaagaaaaagaggtactcaaaaaacatccaaagaatgttcagaagacacaggatgtgtactatcagatgccaaaactggaaggagaaacaccgaaaaagcgtccggttgttgtaggaagcggccctgcaggtctgttttgtgcatggatccttgccttggcaggatgtagaccaatccttctggagcggggtgcctgtgtagaggaaagacagcgtgatgtagaggaattctggaaaagcgggattttaaatccaatgtcgaatgtacagttcggagagggaggcgccggaactttttcggatggaaagctcaacacattggtcaaagatacatccgggcgaaatcgttttgtgttggaaacctttgtaagattcggggcaccgccggagattttatacgaacagaagccccacatcggaacggatattctgatccgggtggtaaaaaatatgcggcttgcgatctgtggagccggaggagaagtacggtttcacagtcaggtgacggatattgttcttgatgagacatcacttgtcggagtgcaggtcaatcaggaggaagagctggagaccgataccgtgatctttgcagtgggacacagcgcaagagatacatttgagatgctctatgaaaagaatcttccaatgcaggcaaaatcatttgcggtaggtgtgcgcgccgagcatccgcagaaaatgatcaatgcctctcaatatggagcagagtctgtgccgggacttcctgcagcgccttataaagtgacagcaaaactggaaaatggaagaggcgtatactctttctgcatgtgtccgggaggatatgtagtcaatgcatcctccgaagaaggacgtctggctgtcaacggaatgagttatcatgcaagagcaggagaaaatgcgaacagcgccattatcgtgacggtgactccggaagattacggaagtgaacatccgcttgcaggaatggaatttcagcgaaagctcgaagaacgtgcctttcgagcgggaggcggaaaaatcccggttcagagactggaagatttctgcaaaaatcagatcagcacttcgtttggaaacgtagagcctcagatgaaaggggcatatgcgtttggagatgtgcgtggaattttcccgcaagtgctggcagaatccattgaggagggaatgcggcagtttgaacataagatcacaggattctcagatggagatacgcttttgtcaggtgtagaaagccgtacgtcttctccagtgaaaattccaagagatgagaatatggagagtgagatcaaggggattttcccatgcggagaaggcgcaggatttgcaggaggaatcacctcggctgccatggatggaatgaaagtggcagaggcggtgctgaaaaaatataacaagatcgggtcatagaatcttcataaaaatttaagaggtcagacctatacatgatttttaaattgtgctaaaataaatcactgtattgtgttatcattcatatttttatgaaaaaagcaaatatgaaagaaatggcatgtgaagagcgcccttatgaaagatgtgagcggttcggagcaagtaatttgacggacagcgaattacttgctgttttgctacgtacaggtaccagaggagagaatgcgcttcagctggcggataagatcttacatcctgtattttcgcagaagggtgtgctgaatcttcaccagtggacgtacgaacagctgatgcagatcaaaggaatcgggaaggtaaaggctatccagattttgtgtctggcggagcttagcagacgtcttgcaaaagcaaccgcacaggagggactgaatttttcaaacccggcgtccattgccagatattatatggaagatttaagacatgcaaatcaggaacagatgaaactgctgcttttgaatacaaaatccagactgatcggggagacggatatctcgaagggaaccgtgaattcagcagtgatttcaccgagggagctgtttgtggaggcactgcagaagaatgcagtgtccattgtgcttttgcataaccatccgagtggagatccgacaccgagtaaagaggatgtgctgatcaccagacggattcaggaggcggggcggctgatcggtgtggaactgttagatcatatcgtgatcggggataattgttatgtcagtctcagagaaaagggactggtacgataagaactgcaataaggggacaagacgcatgttcagaaatatatatggcctggatctgggcacatatgagatcaagatatatgataagagaagagaccggatccgcagtgccaaaaatgtgattgcaatccgggatgaaaaagatatttttgcggtcggaaatgcggcctatgcaatgtatgagaaggcacctgagaatattcaggtggtatttcccatgcatcacggcgtgattgcccgctttcatgagatgcagtatcttctgcgcgcattgctgaagcgggaagggagatacccaaacggagcagagtatgtgatcgcagcgccaacggatgtgacagaagtggaaaagaaagcgttttatgatctggtgcatcattcagctgcacgggcaaaaacagtccggattgtcgatcgtgcaattgcggatgcagtggggataggactggatgtcttttcggcaaaaggcatatttgtggtcaattttggcggtgagacaactgagctttcggttctttcgggcggaaaaacggtgctgagccgtctgctgcctgtgggaggtgcggctttagatgaagcaatcgtgggcagtgtgcggcacaataaggagtttctgatcggacggattacagcagaacagctcagatggcagtgcggtattttaaaaaacacaaaccgaaggaagctgacagtggcgggaagagatctggcaatgggagttccaggggacaggcagatctcggatggtctggttcgggctgcaatgaaagattctctttcggagattgtaagagcgatccagtccatgatcgagcgtacaccgccggatgtccggagtgagattttaaaatcagggatttatctgacaggaggtcttgcacgttcgcatggtctcccggcatatctgcgacagagtaccggccttcttgtgactgcacacaagaatcctgaattatgtgcagtgaagggactgcgcacgatcatttccgataaacattacagaaacctggcatacgagatgtcagatgaagattataggtggttgagataatatgaagaaaaaaaatcaaaaatccaggtcaaataagtactggcttctgggaacgagtctggtttgcgttttactgatgattttttctgtgtttgcagagaaggtagaagggcccttccggggagtggctgatatcacggtgattcccatgcagaaaggcatcagtcagatcggcacatggatcggagatgtcagtgaaaattttgagacattgaaacagctgaaaaaagaaaataaaaaacttcagaagcaggtggatcagctgaccacggaaaacagtaatcttcaggaggaaaaatacgaactggaccgtcttcaggatctgtacaagctggatcagacttatgcagaatatccgaaagtgggagcccgtgtgatcgggaaggactccggaaactggtttagtacatttacgattgataagggaagtaatgacggcatcaaagtagatcagaatgtgctggcaggaagtggactcgtcgggatcgtgactcagacaggtccgacctgggcaacggtacgtgcgattattgatgattccagcaacgtcagcggtatggcactttctacttctgacaaatgtatcgtaagaggagacctttctttgatcggagaagggaagatccggtttgaacagatggaaaataatgatcatgatgtagaggtaggggagcagatcgtcacttctcacatcagtgataaatatctgcagggacttttgatcggttatgtcagcgagatcaatgtagatgcaaacaatctgacccgttccggctatatcactcctgtggtagattttaaaaatctgcaggaggtgcttgtcattacaacgacaaaggcggaaatgacaggaacagatcagagtgagtagagaaaggagcctgccaagatgaaaaagatcaaattaaaacgatttgtgatcacggttgtgatcatgctggcatgttatcttcttcaatgtaccttatttccatctctggaactggcatctgtgaagccgaatctgctgttgattgtgacagctgcctatggttttatgcgcgggccgaaaacaggaatgtggatcggatttttttcgggacttctgatcgatattcagtttggaacggtgctggggctgtatgcactgatctatctgatgatcggctatgtgaatggcctgttcagtgaaacttattttgacgaagacatcaagcttccgttactgctgatcgcaggaagcgagtttgtatacgggctgttgatctactttttgatgttcatgctcagaggtgaatttgattttgtttattatctgatgcatgtaatcattccggaactgatctatacagttggggttacgctcattttgtatcagctgatcctgtggatcaaccagaaactggaagcagaagaaaaaaggagtgcaagtaaatttgtttgagaaaatcaaagaagtgtttcatcgtatcgtaaattcccggcggactgttctgatccttgcattctgcgtaatgtttgcgatcctggtgaacagactgttttatcttcagatcgtaaagggagactactatctgaacaactacaagctgcagatcaaaaagacaagagaactgtcaggaacaagaggcaatatttatgacaggaacggcaatcttctggcatataatgagcttgcctattccgtcacatttgaggacaatattaccaatgattccaagaaaaatgatacgatcaacggaattctggagaaagttatgcagattgtagaagcgcatggcgattctgtgatcagtgactttggcgttgttctggattctgcgggaaactatcagtttctgcagacggatgagacattaaaactgcggtttattgcagatgtttatggaaagaaaacaattgatgaactttcagacgcgcagaaacagcagtctgcggaagatgtgatccattatctttgtacagatgatacgtacgggtatgggatcgatgataaaaatctggacaagagtcatgttttaaagcttgtgaccatgcgttatgccatcggactcaacagtttccagaagtatattccgacagtgctcgcatccgatgtcagcgatgagacggtggcggcgatcatggaaaatctggatcagatggatggggtagatattgcagaggactccctgcgccggtatacggacagcaagtattttgcgtcgatcatcggctataccggaaagatttcccaggaggaatatgatgcgctgacaaaagagcagaagaaaaagtattcactttctgatattgtcggaaaatctggactggagcagaccatggatgaggtgcttcagggaacgaaaggtgagatcagctattatacggataatgtcgggaaagtaacggatacggtaagcaaaaaagatcccggagcaggaaatgatgtatatctgacaattgataaggatcttcaggagcagacctataaactgctggaggaaaagctggcaggaatcgtaaggtcaaaacttcgtaatgtaatgaattacgatccgagtacaacaaatgattcaagtgagattatcattccggtagatgatgcctacaatgcatttattgcgaacgagattctggatgagacgcatttcggtgcggcagatgcaaaagcagtggaaaaaacagtgtatgaaatttttaccaaccgtaaggcaagtgtgatccaggagattctggcagaattgaataatgcgggtgcaacagcctacaaggacttgtcaaaagaaatgcaggcctatatggattatgtatgtgataccgtgcttgctaagaacactgggattttaaatatggatctggtggatacaaaagatgagacgtatcttgcgtgggcaaaagaggaaacgatcaatctgaaccagtatttaaattatgccatttcgaagaattggatcgatacatccaagctgtcagaggaagtggcagagcagaaatattctgattccggagagatttatcagggaattttgaaatttttagaagaatatttgaattcagatgcagatttcgacaaacttctctataaatatcttataaaatcagagggtatcagtggggcacagatctgtgccatggtatatgagcagggggtacttccgatggatgaggctgcgtacaatggtctgaataacggaagtgtcaatccgtatacctggctgtgtcagaaaattgaaaatctggagattactccgggacagctggctctggagccttgtacgggatccgcggtagtcagtgatcccaataccggtgaggtgctggcatgtgtttcttatccgggctatgacaataaccgattgtccaataccatggactcgaaatactacaatcagctggttaccggtctgtccagaccattctataacaatgccacgcaggagcgtactgcgccgggatctacgtacaagatgctgacagcagcggcaggacttacagaagggattgtgacagcagatacgacattttattgtaccggagttttcgataaaatcacaccgaacccaaaatgctggatatatccgggtgctcatggctatgagaatgttgtgactgcacttcgtgattcctgtaacgattatttttataacatcggatacgagcttggcatgaacgggcaagaatacgacagcaataaaggcacagacacacttgcaaaatacgcaaaagaatttggactgggtgaaaaatccggagtagagattccggagagcgaaccgcagatatcggatgaatattcggtacagagtgcgatcggtcagggaacaaataactttacagtcagtcagctgaaccgctatgtggctgcagttgcaaacagaggaactgtatataagctgacattgcttgataagaccacagatgtgaacggtaaagtgatcaaagaatatgagccggaagtgacaaacacgatcgatgatatcagtgacaatacatggaatctgcttcatcagggaatgatcgccatggttcaggatatgtcccagttcaacggaatggagatttccatggcaggtaagacaggtactgcacagcagagtgagatccatccggaccatgtactttttgtcggatttgcaccggcagaaaaccctgagatcgcagttgccgtgcgaattgcaaatggatatagttccgcttatacagcagaaatcggaagagatattgtcaagagttattacaagatatcagattccgataaacttgttaccggaaaggcagcacagcttggcgctgttacagccggtgactaaaaaaggatgtgaggtgtatggacaagctggtaatgctcaaaagcagccggtacggtctggagatccatctgaatccacaggcggaattttccaaactgcttcgggagatggaacggaagctgaaggcttcgatcaaattttttgaaggagcaaagatggcggtcgaatttaaagaccgcctgctttcacaggcagaagaggatcagttattagagttgatctcgaaaacagccgggattgatgtggtctgtatcatagaccggaatcagacaaaagaaatggcatacaaaagcgtgatagaacacacaatgacgaatgttcggcaaaaggacgggcagttctatcggggaactctcagaaaaaggcagattctggaatcagataccagtgttcttatactcggagatgtggagtatggggcaaaagtgatcgcaaagggcagcgttgtgattcttggcagactggaaggatctgttcatgcaggagcctgcggggatgacaaagcctatgtggccgcgttatccatgaaacctgcatatatgcgtatcggagatgtcaaagcaggcagatcgctgcttgccatctgcagacagtcttttaagcacccgcagatagcagtcatgggtgaaaacagacttgttctggattcgctgtagacaaatatgaacttaagtgtgaaagggagaatagacatgggagaagtgattgtcattacatcgggaaaaggcggtgttggaaaaacgacgacaacagcaaatatagggattgggttatcgcagctgcagaaaaaagtagtggtgatcgataccgatctcgggcttcgcaatctggatgtggttatgggcctggaaaaccggatcgtatataatcttgtggatgtgatcgaaggcggatgccgtctgaaacaggcactgattaaggataagcgttttccggaactgtatctgctgccgtcggcacagacaaaggataagaccgcagtttctccggaacagatgaaaaaactgatcgaagagctgaaaacggagtttgattatattttgctggattgcccggcaggaatcgagcaggggttccaaaatgcgattgccggagctgacagagggattgtagtgacaacaccggaagtgtctgcgatccgggatgcagaccgcatcatcggtctgctggaagcgcacgggattaaaaacaatgatcttatcatcaatcgtctgcggatcgacatggtgaagcggggagacatgatgtccgtggaggatgtgacagagattctggcgattcatctgcttggtgtgatcccggatgatgagcaggttgtgatcgcgacaaaccagggtgagccgatcgtgggagaggactgcatgtcaggaaaagcatatgcaaatatctgccgcaggcttctcggggaggaaattccgattactgactttggaagatcagaaggactgttctcgaaattcagagatctgttcaaaaagaattaggaggggcagatatgagtgtaccatctgttcacattgcgaaagacagactccggaatctgctcattgcggatcggcttatgtgtacacccgatatgtctgagagaatgacttcagacatttactatacgatttcaaaatacatagaactaaaaccggaagcggttcagatagagataacacattcagatatacatattaaaataacaggagaaaataattgaaacttcaatttttaaatcttaaacagcgatacaatttgaaagattataaattcactctgatcttgctggtactggcagtttctgtgatcggcgtatttatggtggggagtgcaaatgcagagtatcagcccagacagatcatgggcgtgggattaggtctgcttgccatggttgtgatctcactgatcgattacaagtggatcctgaatttctactggctgatgtatgtggtaaatattgccttacttctggctgttatttttcttgggacagaggcaaatggtgcgacaagatggctggatcttggatttgtgcagtttcagccttcagatctgacaaaattgatcacgatcttgttttttgccagatttttggctgacagggaagaacagatcaataagaaaaagacgattctggaagcaatcggtctgatcataccatctttgctccttgtatataagcagccgagtctttcggcaacgatctgtattgcagcattgttctgtgtgatcatgtttatggccggtctgagctataaattcattggcacagtgctggcgatcacaattcctacgatcgctttggtgatcggaattgtggtgcagccgaatcaaccgtttttaaaggattaccagcagaagcgtattctggcatggctggaaccggaggcatatgccacggaggaagcatatcagcagctgaattccgtgatggcgatcggatccgggcagttgaacgggaaaggatacaacagcgatgctacaacatcagtaaaaaacggaaattttattttggaaccgcagacagactttatttttgcaattattggtgaagaattaggatttgtgggttgttgtgtggtcataattttgttattattgattgtgatagaatgtattgtgataggtttaagggcaaaagacaccggagggcgcatcatctgcgggggtgttggcgcactggtagggattcagacatttatcaatatcagtgtggcgacaggaatttttccgaatacaggaatatcccttccgtttgtaagttatggactgacatcccttgtctgcttttttgcaggaatcgggttggttctgaatgtcggcctgcagcctaaaaaatatcaatagaggagacgaaagtgtatgaacataggattagtggcacatgatgcaaaaaagaaactgatgcagaacttctgcattgcatacagaggaatattgtgtaagcataacctgtatgcgacagagacaactggaagactggtagaaagtgttaccaatctgagcattcataagtttctgccgggacatcttggtggaaatcagcagctgggagcacagatcgagcataatgaaatcgatcttctgatctttttcagggatccgcttgcaccaaagaagcatgaaccgaatgtaaatgatattgtaaaactgtgtgatatgtataacattccgatggctacgaacattgctacagcagaggcattggttctggccttggacagaggagatttggactggcgtgaaatctacaagtaaaaagcgaagcaggagtaaaaaagtacaaaaaagaaccggaattggaaaaggcgcaattgcaggaattgttgtggcagttttgctgtttctggcattgatcggtacgctgatgctgatcctgcatgacaacgcgaaggattttgtttcggaatatgagaagacacattatcgcaagagtctttacaaagcggaaacgtttgcttcccagctgtgtgtgacggatgcagatgtggcaatggaaggatacacacaggatgcatcccttcatgccgtgggtctgtttgatgtgcaggggaagaatgtgctctatgcagatcagatttttgaaccgttatatccggccagtacaacaaagatcatgacagcgtatgtggcattaaaatatgggaatctggatgatatagtcacggccagtgagcgtgcgactgattttgccgaagatgagcaggtatgcggacttcaggcaggagatcagctttctttgagagatttgctgaatggattgcttctttattcggggaatgactgtgccgttgcaatcgcagagcatgtatccggaagtgtggaggcattcgtggataagatgaatgaagaggcacgaaaccttggggcgaccgggacacattttgtaaatcctcacggactgcagaacgaagatcattacacaacggcatatgatttatatctgatgttcaatgcctgtctgcagaatccgcagtttgtagagatgatttcgcagacatcctatactgcgaatcttacatcggcatccggagtaccgtatacgatgacctgggagcctaccaattattatgcatccggagacgctgcagcgccggaaggagtcaaggtgattggcgggaagaccgggacaacggatgaagcagggtcttgtctggtgctgtatgagcaggatcagcaggggcgtccatatatttcgattgtgatgggagcgtctcagaaatcgattctctatgacaatatgacaagattaatgagttcgggaattaatggaaaataaagacttgaaacggcagttcgcatggaactgccgtttttatataaagtcgtaagagggtgaaacttacacatcacttgctgaattcccgattctgccaaaaaagctgatcagatagagtccgcacaagccgacaagagtgtaaatgattctggaaagccagcttaaatttccaaaaaggaacgccaccagatcaaattggaagattccgacaagcagccagttcactgctccgatgatgacaattacaagagctgtattatcgagccatttcatactgttccctccttttctatgggataattttattatttccgcaaaaactggaaatatacatacagaaatgttataattaacaagttatttaagaggggattaagactgatttcaaggaggtatcaagtttgccagaaaaacaaaaaaagaattcaatcagtattaataaatataaaacaaagagagaattgaatatcggaacgctgattttcgcactgatttttatttatctggtcgttgcggtggtggcgtatgccacagagaaacggatcacggtgtatgaagtacgggaaggcagtattttgaaggatcattcatatacggggttgattctcagagaggaaaccctggtaaatgcggaaagtgacgggtatgtcaattactatcagagtggacagagtaaaatcaggacaggcatgaacatttgcgcgatttcgccgcagaagttggatgtttcagagtctcaggagcagagtgagacgacattgagcgcagaggagcaggaaacgattgttctgaaagcacaggattttaatgaaaatttcacatcacagaaattctcttctgtctacagtctgaaaagagatgttgcagaaactcttcagaatgcatccgaccagacgaaaacagcacagcttgacgcagtgatcgctgcgagtgggcaggatgtaaaaacatatccggctgcaagggacggtgtgatggttctgacatatgacggcgaagaaggtctgacaaaagacaattttacggatgcagattttgataaaagcaattacaagagtacaaatctggaagacaacatggaaatagcaagcggagaaccgatttataagcttgtcaccagtgaagactggtcggttgtgattccattggaggatcaaacagcaaaagagctgtctgagacagattctgtgaaagtgcggcttgataatgagaatgacacggtatgggcagatttttcaattttgaaaaaaggaaaacaatattatgggtgtctcgattttgataaatccatgatccggtatgcagataagcgctacttgaatgtagagttgatactggaagatcagagcggactgaagattccgaaaagctcggtgatcaaaaaatcatgttatgcgatacctcaggattatattacaaccggaggcaacagctcggactccggagtgatgatacaggataaggacagcgcggtatttcagcagattgagatttattatgtatcagatgacgggacaaactatgtgaatccggagagtctgaaagcaggaactaccttaatcaaaccggagtcatcagagacaatgacagtagaaaaaacggcagagttgagtggcgtttataatatcaatcagggatacgcggtattcaatgcagttgagatcctgtgtgagagtgatgagtattatattattaaagaaggtaattcttacggcttgtcaaattatgatcatatcgtacaggatggagaagacgtaaaagaggatgaagtggtattttaaagtgggaaaggagcttgaaacatgttgaaagaacaactgaaagaggtggaacgccgtatacaggcggcatgtgaccgtgcagggagaaaacgggaggaagtgactctgatcgctgtaagcaaaacaaagcctgtatcaatgatcgaagagacatatcaacttggtatacatgtatacggtgagaataaagtgcaggaactgacagaaaaatatgagattctgccaaaggatatagagtggcacatgatcggccatcttcagacaaataaagtaaaatatattgtcggaaaaacggcactgatccattccgtggattctttgaagctggcagaaacaatcgaaaaagaggctgcaaagaagaattgtatccaggatattctggtagaagtaaatgttgcacaggaagaaagtaagtttgggctgaaagttgacgaagtcattcccttcattgaaaaaatttcacaatttcaacatatttgcgtaaaagggctgatgacaatcgcaccatttgtggaaaatccagatgacaatcgtcctgtttttgcaaatttacataaattatctgttgacattatgaataaaaacattgataatgttaacgtaagcatactttcaatggggatgaccaatgattacgaagttgcgatcgaagaaggcgcgactatggtgcgtgtaggcactggaatctttggtgccagaaattatcagatttaatttccggataagaaggtacgttttcaattttaaaataactttatgcaaaaagggtacggcataagataggagtgtaaacatgggtgtatttgataaattcttggatatcatgaaattgaatgatgacgaatacgatgatgatgatttttatgatgatgattttgaagatgatgatttcgatgaaaaaccgcatcgttcaattttcggaaacaagaagagcagaagtgatgattttgatgatttcgatatggacgaggacaagcatcttgccccatcctctggaaataaagtgacaccaatgcgtcagcctgcagccagaagaggtgtgaatatggaggtctgtgttgtaaaaccgacttctgtagatgattctcgtgagattaccgagacactgcttgcaggacgtactgtgatcctgaatctggaaggtatggatcttgagattgcacagcgtatcattgatttcatttcaggagcgacttttgcgatcagcggaaatctgcagaagatttctaattacatcttccttgtgacaccgacgaatgtagatatttccggagatctgcaggatcttctcggcggttccatggaaaaaccaagcatgagaggcagatactaggatttattcatatgcagaaggaagaacaacagttggagaagcggctgtcagagctgtcaaatctggcatatagtcgcgatatcgttacatattcggattttttgaatttgaatgaactgaatattttacattcgatgccaaaggacagactttacacaaagtttgtcacttttggcggatatggcttggcagagcgtcagatggcggcatttctccctgatgctctttctttgcgtggagaaatgtcatggtgcagcgaggaggaatggggtgactatccatttgatattctaaggatttctccgttgcatgcgaaatatgcagagcagctgactcacagagactatctggggacgatcttaggactgggtatcgaacgtgcaaagataggtgatatccttgtagatggaactgatgcggttgtttttgtacatcgcacattacagtcttttttgatggaggaattgaccagagtccggcatacacaggttctggtaaaagagatttcaagagaggattttcagtatgaacccaaatatgaggaaatccggggaacggtggcgtctgttcgtctggacagtctgctttcgcttgcattttctgcatcacggacaaagctttcgggtctcatagaaggggcgaaagtgtttgtgaacggaaaactgatcacaacgaacagttatcaattaaaagaaaatgatgtgatatccgtcagaggatatggcaaattccgttataatggaacgggagcaaagacgaaaaagaacagaatttatgtatctgtttataaatatatttaacaaagacagaggcaggagtaatacaatggaggaaagaaaaaaaacagggaaaagttatctgtgggcactatttgcatttcttctggcagtggccgcagatcaatttacaaaatggctggcggttacctatctgaaagatcaggatcctttgattataataccgggagtatttcagtttcggtatctggaaaaccgtggggctgcatttggaatcctgcagaatcggcagattgtatttgcagttggagcattgttgattttttttgcggtcgtcttcatttacgggagaattccgcagaaaagaagatttgttccgttaagagtatgtgcgatccttctggcatccggcgccatcggaaatctgatcgatcgtctggcaaggaattacgtagtggatttctgctatttcaacctgattgattttccgatttttaatgtggcagactgttatgtggtaattggctgcatcctttttggaatcctgattcttttctattataaagatcaggaatttgactgggtactgcaaaagaaaggctccagatcatgagagaagaacgtttttttacagcagaagagacagtgacaaatgagcggatcgacaaatttttgtctgcgcagatgccggacagatcccgttcctatattcagaaactgatcaaagatggattggttgaagtcaatggaaagcaggtaaaaacaaattataagctgggcagtgaggatgaggtgaagctgcagattccggaactggaagtgccggatattctgccagaggagattcctcttgacatcctttatgaggacactgatctgcttgtggtaaacaaacctaagggaatggtcgtacatccggcgccagggcattatacagggactctggtcaatgctttgatgtatcactgcagggaaaatctttccgggatcaatggtgtgatgcgtccagggatcgtacatcggatcgatatggatacgacaggctctcttttggtctgtaaaaatgacagggcacatcagattctggccgagcagctcaaagatcattcgatcacccgaagatatgaagcaatcgttcatggaaacttaaaggaggataccggcacggtcaatgcaccgattgggagacatccgacggaccgcaagaagatgagcgttcatgcaccacatggaagagaggcagtgacgcactatcgggtgctggagcgttttggaaactacacgcatatcgaatgtgaactggaaacaggaaggacacatcagatccgtgttcatatggcaagcatcggacatccgatattgggagacttggtttacggaccggcgaagtgtccgttcagactgcagggacagacgctgcatgcaaggatccttggctttgtacacccttctacgggagcgtatgtgcagtttgatgccccgttgccggagtattttgaagaactcttaaaaaaattgagaaagcagacagggaattaggaaaaaaggaaacggatatgtcagaaatgtgcacattcgattccttttttgatttttagggagacaaacacatgtttgtgttatataatagaaaaataaatacatatgaggtgaaaagagaatgaaacgattcagtaaaaaagaaattttttcgattccgaatttgatgggatattttcggattctgttaattccggtgttttgttacctgtatatcacggcagaaacggaacgcgaatatttgtatgcagcgctggttgttctgctctccagcctgacagatctgtttgacgggaagattgcaaggcgctttcatatggtgacagagctgggaaaggcattggatccgatcgctgataagcttacgcatgcagcactggcaatctgccttgcaacccgctatcctatgatgtgggcgctgattgcattgatgctggtcaaggaaggttacatgggggttatggggctcatattcctgaagaaaggaaagatgctggatggagcgatgtggtttggcaaggtctgtactgcagttctgtttgcaggacttcttgtcctgtttttgttttcacagcttgaggctgctgtagtcaatggaatcattatgataatgatgggcattatgatcgtgacactgtgcatgtatgtgccggtatttcaaaaaatgaaacataaggagaaaaaagatggcgaagaataagtattatgcagtaagaaaaggaaggataccgggaatttatcgtacctggagcgaatgtcagaaacaagtgacgggctatccgggggcggtctttaaagggtttgtgacagaagaggaggcacagtcttttcttcatccggggcagagcgcgaaggcaaaagagacacatatttctcatactgcctatccatatgcctatgtggatggatcttattttcagggggtttacgggtttgggggttttttaaaactgtctgacgaggaggaagttgttctgcaggggtcaggagatcatccggatcttgcgaaaatgcacaatgtggcaggagagcttctgggatgtatcaaagcagtaaaagaagcggaaaaaaggaaaattgcagagctttcgatattttacgattatcagggcattgaatcctgggtgaccggagattgggcggcaaaacaggcaggaacacagaaatatcgcgattttatgaatggcacatccgtgaagcttcattttatcaaagtaaaaggacataccggcgtagagggaaatgaacgtgcagacagtcttgccaaagaggctgtcagtgaaaagatttcattcaatcagcttgtgatcgaataggtatgaaaagagaaagaaaggaatttaagttatgcagataaagaaattgctgcttccgattcttgcgacagtgatgctcatatgtggatgtcagcaaaataatgctgtctccgggcaagatcaattggttacggcaagtgaaaataagacaacctatacggcacagaatattccggaatatacaggctcaccttatgtggagctaaacaataacatacctgattttcaggagtcagagtatacgacggaagtttttgaacaatacagcgatctggatgcactggggcgttgtcaggctgcttatgccaatatctgtcaggagatcatgccgactcaggaacgggggaaaataggcatgatcaagccttctggatggcatacagtgaaatatgactgtgtagatgggaaatatttgtataatcgtgcgcatctgatcggatttcagcttgccgaagagaatgcgaatgaaaaaaatcttatcacaggaacacgatattttaatgtggagggaatgctcccgtttgagaatcaggtggcagattatgtccatgagacgaatcatcatgtcctgtaccgtgtgacaccggtttatgaaggcgataacctggtagccagtggagtcattatggaggcagcttctgtggaagatgaagaaattcgttttcatgtgtttgtctacaatgtgcagccggggatttggattgattatgcaacaggagaaagcagggagagtgaaactgcagaaagcgaaaaaaaggatgaagaagttacctatgtagtcaacacaaatacaaaaaaattccataaaccagactgtagcagtatccgcgatacaaagcagcagaatcgaaaagaaacatcagaaacaagggaagaattgatcgatcaggggtactctccgtgtaatcgctgcaacccctgaaaatgaaagctctgtttgaaaattgtattgaatgacggataaatgcagtctttttattgttatttggtgcagattgttgtataatgagcgtatagaaacttcaagaatatgacaggcaaaaggagcgtggagtaatatgaagacgaacacgattattacaataggaagacaattcggaagtgcaggacgggagatcgggtatcagatcgcagattatttcggaatcaagctgtatgataaagagatgctcagcagagcagcgaaagaaagtggtatctgtgaggaaatttttgaaacacatgatgaaaagccgacgaacagctttttgtattctctcgtgatggatacgtattctatggggtattcgggcggatcctactccgatatgccaatcaaccataaagtatttcttgcacagtttgatgcgattaaaaagattgcggatgaaggaccttgtattctggtaggacgctgcgcagattatgctctggaatcttatgataatgtggtgaacgtatttatccatgctgatctggatgcacgtatccgcaggattgcaagaatttataatcttacggatgctaaggcaaaagatatgatcattaaaaccgataaaaagcgtgcaagttattataattattacacgaataaaaaatggtcagactctgaaagctatgaattgtgtctctcaagttcagaacttggaattgaagggacagcaaaagcaatcgagcagtatgtaatgctgaaagagcagattcaaagagatgacaaaattctttagaagttaaaaaacagttccccttgcagaaaagataaagacttttactgcagggggactttttatgctcttggatgaatgatccgttcgggccagccttcgatatttccatcaaggattgcatgaaacatcctttcgcggacacctggattttcgtgatttaactgacggagaagttctttgacatattgacgttttgtatatccgtcaacaggacacttgcttttcactaccggaagctgatacttgtttttaaaaccgatgacgtctttttcatctacaaacatcattggacgaataacagtcagatcagtacggtccagataggttttcggagaaaatgaataaaaacgtccttcgaagatcaaggagagcagcattgtctctataatgtcatctttatggtgggcataggcaattttattgcatcccatttctttaattgcctgatttaaggcgccttttctcattttggcacaaagagagcagggattggattctttacggacatgaaaaagaatctcataaatatcagaagattcgattcggtaggggatattcagttcctgacatagtgcctgaatcggagaaagatcaaaatcttcaaatcccagatctacggtgattgcactgagttcaaatttcttcggatagaagcgcttgagtccatgtagtgcatagagcagagtgaggctgtcttttccgccggaaattccgaccgcaatatgatcgccttcttcaatcattctgtattcatcaaccgcttttcgggtatagcttaataacttctgtagttccatggtaaaggtcctttctttgggtttatgttcctattataaggtgaaagagatggaattacaatgaaggagtatgatttgtcggcattttcctttaaaacagaatgtagtacgctgtactataaatagaaaaataaatagtactatgtactaattcgagaaatgagaaatttgcgttttccaaaggagtatgttatagtggctttgacaaaaaaggaatcaaccagagagggtagtagaatgaaagcacaggatcaaaaagagctaatgcgggaaagaatctgcgattgtgcaaagaggctatttgaaagagagggatatgaacaggtatctatgcggcagattgcagcggaggcaggaattgcagtgggaaatttgacatattacttttcgaaaaaggaagatctgctgaaggagcgtttaaacgatattcaggaaactttttcagagagcatccagctgtttgaaatcgatctggaaagaggagagatttcaggaaagccgttctgggaatatgagaatcgaacacttttggaattgctgcttcgatttttgaaagcagtggaacagtttcagaagaatgcagctattgtgtatgaaaattatagcagacttcaaaaaacagtacccgtatttcaagaaatgagcagagaatggacggagaagatcatgacgatatacaatggtcttataaagcagttgtgggaacgaagagttttcagaaaagaactggagtgggacgagtatgaaaatctgatctatcttataaagctgctgacttttttcgggcaggaaatgcatggagatcaggagtatgaaaaaaaacggtttacagaaagaatctgcagacttttgattccttatatatcatgggaatggaaagacacctatacagtcttgtgtaaagaaatctgcgaggtctctttccatcgtatgacattaaaatttatctgatagagtttcgaagctgttcaaataactgactcatttctgacaggtcagcttcttccagattcagggagagtgtttttacattgtcgatgatctgttccggtttccttgcgccgcagaggacatgcaagtccggaagagaagctgcagtcagatagatgatcaggttgctgagggaacaactatatttttcagtatacggggttaatttctgtaaaacgttcaatatgtgcagacgggacttttgtgcccagaatttatttttgttgcgcacatctgtcggagaaagcaccgtgtcttgtgtcacttttcctgtgagcagtccctgttccagaggcgagtacgcctggatggaaacatgatgtttctggcatacaggtaacaattcatccgcaatatgtgtatccagaaggctgtatttttcctgaattacatccagctgtccaagagagcagtacttttcgatgattttggcagtaacgttggaggctccgatggcacggatcttcccttcttttttcaactggagaagagtatccatcgtttcttccagcggatagagggaaaagtcaggagtctgccagtgtgtatagtaaatatcgatatagtctgtctgcagacgtcggaggctgtcttccagatttttacgaattgcagcggcggaaagatcacggtaaacattgcgtccttccatgactttatgaaagcaaggtgtctcatgatcccattccagcccgcatttggtggagagcaggatcctggaacgattttgctttatggctttgccaactacgttctcactgtgtccgatcccgtagaccggagcagtgtcgaaccatacgattccccgatcaattgcttcctcgatggtgcgaatggagagtgcatcatcattttctccccaccaggtgcctccgccaattgcccaggtacccattccgatatatggagtttttaaagttgttgttccgattgtacgttctttttgcataagatttatcctttcttttgtcaattctcttagggttcccgcaaagtgacagcttttgcagccatgcgtcggcggtcctcatctattgctgcatagtgttttttggttgtattgacatccttgtgtccgagtacgtctgcgacgagatagatgtcaccggtctctttgtaaagtgtagttccataagtactccgcagtttatgaggggtgatttttttatttggcgtcacctggcgggcatactttttcaccatattttcaactgcctggactcccatacggcggcgctgcgtggataaaaacagtgcgttttcatgtcccggaagaggagtggcagcttcccgcgttgtatacaagtattgtttcagggcatgttcgacttcctcgccaaaatagatgaccatttcatttccaccttttcggacgaccgtaatcccgttatttttaaaatcaacatcctggatatcaagtcccacacattctgatacacggattccggtaccaaggagcaatgtgataatcgccagatcccggtttttagtcttttcatagtaaacttttttctgtccggtgagctcatcgccaccgtgttctacaaagtccagaagagaagccacctcgtccgtatccagacggacgattgctttttcgtgcagctttggcatatcgacaaacagtgttggatttttctcgatgatctgatgcttgaaatagtagccgtaaaagctgcgtagggcagacatctttctggcaagtcctttttccgtgttggtaatttgtttttcctccggattttggtaaacctttaaatattcctgatattcttcgatatcgacaggagagagctgctccagatcctgcggggtaaactgatcgatggtataatccttgtatacaggattgttttccatcagaaagtgaaagaatactcggatatcatatgcataagaaattcttgtttttgcagaggtggtaggttctgcagcacggaaataatcttttgcaaaagccggaagtgtttttaagatttcccgcagacgcaacgtattgtcaatatatttttgttcatgataagtttttcgctcagttgtctgatttgattccataaaataaaacgcctcgttcttttttatttatgaagttattataacatattgaaagataggcaacaatgatatctttgaatggccattgcagaacccacaacaggttcaaaacaggatcattctggagtagttgttaaaaaaacgctaatcttttggaaaaatcagtatttgtcgtatagattgaaacgactgaaaacactgctgttttgagcagttaattgggaatttctactgtaagcggttcttttgcatatacatggcaacctaaccgataaccggcaagaagctgctcttctgagaaccatatttgatccattgtatttactgtggcgtgtccctttataatccggacaacgcattttgcacagtttccgcgaccgccgcaggccgtcaaaatgtggatatcgttttgtaagagataatcttgtaatcgtgtatttgccggacattctattaacatttgtttaccttctttctgttcctgttttgatcttttttgtttaatggatatattataaagtatgtgattcatactttcaatgcttttataaaaaaggaatgctgcagtacagataagctctatctgcctgacagcattcctttttggagtgaatttatatcaattacatggggtgtaaatgatatctgtatgatataaaaacaattattgtggaaattctgttgtgtaatacgggatgatcaaatgttctccggtttgtatggtttcagattccagctgattgatctgtttcaattctttgatgtattctttcacagctgtttcagattctgagtctatatggcgttctgcaaggctccacaaagagtctccctcctggattacaatgcttttgtagcatttgaattgcacaggctcttccgttcttgaattctgtgcaaaagacagaaagcttccaaataaaaagcacccgcaaaataaaataagtgtaataactgctgacatctttttcttttttctcattgtaaaatccccctgaacataatgaaacaagcaaaaagaacatacgttctgactacacaaagaagtatatcaccagaacgtatgtttgtcaactaggttattatctgtttttttggaaagactactcttctgctgttatggtttccaggtttgcaaattgggagtgatacagcttctgataggtaccgttttttcttaagagttcttcatgcgttccctgctcaatgatatttccgttatctacgaccaggatcaggtcggcattgcgtatcgttgaaagccggtgggcaatgacaaaagaggttcgccctgccatgactttctgcattgcgtcctggagcatccgttccagacgggtatcgactgctgatgtagcttcgtcgagaatcagaatcctcgggttttttaaaatagctcttgcgattgtgagaagctgtttttctccctgagaaatattgttggactcttcattgatcatagagtcatagccatggctcagcgtagaaatataatggtggatatttgccatttttgctgcgtcaactacttcgtcttttcgggcagtcaaagatccgtaacggatgttttcaaaaatactgccggaaaacagccaggtatcctgaagaacgagagaaaacaggctgcgaagatcacttcggtccatgtcccggatatcaattccgtcaattttgatggatccgccgttcacatcgtagaaacgaagcagcagattcatcagcgtggtctttccggcaccggtaggcccgacaatcgcaaccatttgtccggactgtacccagaagctgacatctttcatcaaaagttcatctgtgtaaccaaactgcacgtggtcaaatgttacgtttccctgaatttgggagacatcaatcttaacactgcctttttgtacctcttctgtttcatttaacagcgtaaaaatccggttcatggcagcataggcggactgtacctgggaagacagctgagatacctgggataacggatcattgatctgccagatataacggataaatgcctgcagattccctacggtgacagaaccgtttatgacaaaaaagcttcccatgacggcaatgcttccaatcgtcagataggtgacgagggatacaaacggcgaaatcaaggaagaaaggaactgagccttaaatgcggcatctgccatcttttgattgactgcagaaaatctgttgcaggaatctttctgtcggttgaaaaggagaatttcgttaaatccgccgtataattctgtaatcgttccgttcaactctcctaccatctcctgctgcagatcaaacagtttttgtgaacgttttacaaatccaaatgtgatcagtatggtcagaggaataatcaaaagtgctgtcagtgccatccagacattgatggaaaacatcatgaagatgacaaacaggaaggtgaggattgctgcaaatacgcgggaaagcgtttgctggagtgcattactcagtgtatcgacgtcgtttgtaacactgcttaaaatatctccaaatgcgtggtcatcaaaatatttgaccgggagacgctggatttttttctgcagtgcattgcggatgtcatgcatagttttctgaatggcgtctgtgaggaaaactgatgtaatcagctgtgagatcgtctttaggatgtacagacacaacagaatccccataaaacggaacaggattgaaaattgaacgtgcgctcccgggactccctgcaggattttcgcaccgtcactggcaagctgcgtggtgatctttccttccatcataggattcagggcaaatgtcagattggtcactatgatcataaacagtgcgatcgacaacctgatacggtatggacggacgaacccgagcagttcacggatacagtttcgaaaggtcagtttattctcaggcataagtcaattcctccttgctcagctgggaagctgcaatttcgtaataaatcggacaggatgcaagcagctccctgtgagttccgattccggcaattttgccttcatccagaactacgatcttatctgcgtccagaatcgtagaaacccgttgtgccacaagaaagacgatggcgtttttaatctccggtttcagagcttttctaagtcgggcatctgtcttaaaatccagagcagaaaaggaatcgtcatagatgtagatctccggctttcggatcaaagcacgggcgatcgacagacgctgtttctgaccgccggagacattggttgctccttcaacgatctgttcctggaactgatgtggtttttccataataaaatcatatgcctgggcaatctttgcggcatgaatgatttcatccattgtggcatccggttttccaaagcggatattttcttcgattgttccggaaaacaggtgtgctttctgcggaacaaatccgattttacttcgaagagcattgatatccagatcttcgattttttgaccgtcaatgtaaatatttccagaagcgcggtcataaaatcttggaattagctggatcagggagctttttccggaacctgtgcttccgataaaggcaacggtctctccgctttttgcggaaaaagaaatatctttcagtacagcttcctctccatccgggtaaacgaaatccacatgctcgaagatcacgctgtgttcaccggacccagaatctgtctgagcattcccgggatgattttcaattgaagtttctgtattcaatacggccataattcgctttgcagagatgctggctctcggatacagcataaaaaccatacagaaaagcatgacagaaaacatagcatgaaacagatattccatgaaagccaccagctttccgacctgcagagtctgtgcatcgatcatgtttgctgctgtcagatagatacacaaagcggccagattcatcaaaaggaaaaagaccggttctgtggaagacatcagcttgaacagattttgagactgttccatgaagtagctgttttcactgtcaaagcgttcggattcgtagccatcattgttaaaagagcgaatcacacggattccggtgagattttcacggaagatgcgattgatacgatccagagaattctgttgtctgtcactgagcggtcccgatatttttcctacgatcacaacgcccaggatgattacagggacggtggatgcaatgatcaaagagagattcaaagaggaacggatcgtcagagtgaagctgacaatgatcatgatcggtgtcaaaagtgcggtccgtaaaatcacattcaaaaacgtcatgatctgaaatgcatcattgtttgtccgggtgatcaaagaagcgataccaaactgattcatctcattgtgtgagaatgtctgtactttctgaaatacatcttctctgatatcccgtgttacagatgtggaaattttggcacagcagtatccaagcaggatcgttccggatacaccgatcaaagaaatcactgcgatcacgattcccatgcggattaaatactgtttgtcctgattcatgatcccattatcgatcatttcagatacgatcgtcggaatgccaagctctacaagtgcaaatccgaatacggaaataatatttaaaacaaacagcttcttgtatcgcttcaggtagtgaagaataagttgcataagtagattacctcctaaaaaaagtatgtctgttttagtcaccttatctacaataaactatagagtaagacgatggtcaagcagaaaacaaaaaatcataagaaaatatagaaatcgaacatagtttccaaacaaatgtttgatttttgcagtgtgctatgataaaatgaactaaataatgagtcggaaagaacttgcaggagggttattatgtcaaaaggaacgattacagataagcagagagagattttagaatatatcaaatcacagatattagagcgcgggtttccaccggcagtacgtgagatttgtgaggcagtgaatctgaagtccacgtcttccgtacattctcatctggagacactggagagaaacgggtatatccacagagatcctacgaagccaagagcgattgagattctggacgatgaatttaatcttctcagaagagaggttgtcaatgtccctctgatcgggcgtgtggctgccggggagccgcttctggcacaggagaatattgagaactacttcccgataccggtagagatgatgccaaataagcagacgtttcttctggaggtaaaaggagaaagcatggtcaatgccggcattctggatggagatatggttcttgttcaggaagaacatacggcagaaaatggagatatggtggttgcattgattgaggatggtgcgactgtgaagaccttctatcgggaagaaggaatcatccgccttcagccggagaatgattttatggatccaatcatcgtaaaagatgtttccattatcggaaaagtcattggagtatttcgcttcttccggtagacggatacattattataaaagcggaaatcagacgacgcttacatcagactgattcccgcttttttactgatcttctattctttttacaactcagaaaaatctacatgctttccgtctctccagatacgttccagatcataaaacagacggttttctttgtcgaaaacatggacgatgatctcgccgaaatccatcagcacccagtttccggagccatatccttctctctgtttcatttcatatccggcttttgaaagttcttcttccacgttgtctaccagtgcacgtacctggctttcactgtttccgtttgcaatgataaaataatctgcaaggacggaaacctgagagatatcaattacctggatatcctcgccttttttatcgtccagtgcctgataagcaagacgtgccataagttttgactgttccataatttgttctcctttccggattgtccgatatccctttacagggatattgcggctttatttttataatactgacaggttttttctgtcataggatctacttttcttccggctctttttaagaatgccagagttgattctgctgtcatgcagacagcggtgtcgatgtcatcaaatgcggcagttcgcacttcggccagccccggaatcttttttcttccgggttcgatataatctgccagatagacgattttttcaatcatggtcatggccggacgcccggttgtgtgataggtgatcgcatccaggatctccgaatctgtgatgccgtattcgtattctgcaaaataggcacccaatctggcatggatcagcgcaggaacctccagttcggcatctgacagtttaatgtgatgcttcctgcagagcaggatttgttcattgacgtcgcaatattttccacaatcatgcaaaagaccggcagtcatggctttttggacatccgctccatggcgcatagccatggaagcagcggtgtacatgacgccgagagtgtggatataacgttcttctttcagcttcttttcaagctttttgcggatggcagttaattcagttgtcatgacctctcctcttctcttttggtatataattgcagtttttgaatataatctgcaacagaatccggaaccatatagcggatcgaacgattttgggcagcacgatttcggatcgttgtcgatgaaatctccagaagcggtgcctgtaaaagttcgatctttgcctggtaattcgtttccagatactgaatctgacgctgcatatcaaaagaatctttatcatcccgcattgctgccagaatggtacaggatggaaaaatctctttgaaatatttccattgttcgatggaaaagagagaatccgctccaagaataaagaaatattcattctcaggatacagcgcatggaattcctgcagagttttatacgtgtaagaatgacagtctttttttgcctcgtgaagggaaagttgaaaatgcgggttttctctcacagcaagccgcaccatttcaacccggtgtgcaagcgcttcttctgtatcttccacttctttgtgaggcggatttccgttgggcagaaaccagacttcatccagatggaactgctcataggcaaattcaccaagcagcagatgtccgatatgaatcgggtcaaaggttccgcccataattccgattctcatagaaatctcctacggaagtacgatttttttcttatcgtcttttccttctttgtacaatacaatttttttgccgatgacctgtacgacctgagaacgggtgcgctcagccaccatttctgccaaagctctcggatcatccgcacagttctgcaatacactgatcttgatcagttcacgtgcatccaaagcctcgctgatcgcctgtgtaaggcttggagtcatgctggattttccaatctgaaagatcggatccatggtcatggcaagactttttaaataggctctctgttttgttgtcatgatattcaatctcctgttaaaatatatgaaatttatttatagtaatcaaactgcaggccgtacattttcacggtatcgccttcctgaatacctgcttcttccaatttgtccagaataccggtttcttttaagaatttctggaagaaagcgaatcccttttcggaatccagattggtgtaaccaagcatcttttcaattttcggaccttctaccacatagacatctttttctttttctactgtgtaaggaagctcttcataaatcagttcgtcctccgggaagaattcctgttcaaatacgatcggaggtacatccatagtctgaatctgttcacttacatagtagagcagttcttttaagccctgtccggatactccggagattgggaatactttgatgctctgtggctcaaactcctccttcaggcgctgaatcggatcgtcatcttcactgtagatcagatctgttttatttgctgcgatcacctgcgggcgctttgcaatttcaggattgtaggcctgaagttcagcgttgatcttatagatgtcatctaccggatcacgtccttctgttccggctgcgtctacgacatggatcatcatttttgtccgctcaatgtgacgtaaaaattcatgtccaagtccgacaccctcggaagctccttcgatcagtcccgggatatcggcaacgacaaatccctttgctccctccaggtctaccactccaagatttggattcagtgttgtgaagtggtagttggcaatcttcggctgtgcatttgtgactctggaaaggaaggtggattttccgacatttggaaatccgatcaatccgacgtcagcaatgactttcagttccagattgacttccagttccatggcaggctgtccaggctgcgcgtatttcggaacctgcatagtagcagttgcaaaatgctgatttccaagtccgccttttccgccttttaacacgatctgtctgcggttgtctcctgacatatctgcaatgacttttccggtcttggattctttgatcacggtcccttccggaacacgaagaaccagatctttgccgtcctttccgtggcattttctcttgccgccttcttctccatctccggcagcatattttcgtttgtgacggtaatcaatcagtgtgttgagtccttcatctacttcaaaaatcagatcaccgcctcttccgccgtctccgccgtccggacctccgtttggcacgtaaagttcccggcggaagctgcagtgtccgtccccgcctttgccggaacggatgaatattttcgctctgtctgcaaacattgttttttcctcttcaaaaattagaatcaattgttttggtaccaaaatgtgtgtggtgttttacgaaaaagaagcctcagactaagaagtctgaggctttctcacggtaattattcagctaccggatagatagaaacctgttttttgtctcttccttttctttcgaatctgacaacaccgtcaactaatgcgaacaatgtgtcatctcctccgcgtcctacgttcacacctgggtgaatctttgttccgcgctgtctgtaaaggatatttccggcttttacgaactgtccgtcagctctctttgcacctaatctcttagcttcagagtcacgtccgtttcgtgtggaaccaactccttttttatgagcaaaatactgaaggtttaatttcatcatggttgttacacctccttgaaaatgatatcaatgtatggttcatattcgctgtcttcttctatctcctgtaatccaagaaccatagatttgaacagcagcttggcatcatgagaaggttttcggatgaatcgaaattcaatcatcccggtctcttcatcagaaacaagagaaatcttatctgatgtgaaacgttcaatcgaattgagtgtgttgatgaccagtacagacactgccgcacagaccacatcacttcccgcttccgaataccccgcatgtccgagtacatccagacctgcatagtcatgatttactgtcttataaacggttaccttgatcatatgacagattaagcgttgattttttcaatcttaactgctgtgtactgctgtctgtgaccatttttcttatggtatccagtttttctcttatacttgtaaacgatcacttttttagcttttccgtcaccgattacagaagctgtaactgttgcacctgctactgtaggctctccaacaactaatttgtcattgcttactgccagcacctggtcaaatgtataagtctctccagcttctacaccaagtttttctactttaatgatatcgccttctgctactttgtactgtttaccacctgttgctataattgcgtacatatggcacctcctattatcattactcgccagcttcggtgtctgaatcagaacttgaaaacctcgctgtgcggcataccgtgttagtatagcacgcatattccatataagtcaataggaagcagaaaaatattttaaaaatatgtattatttgtcgcattcattcaatttgtcatagcaatattcgatgatgctgcgccttgtgataataccgataaatttgttctggtcatctacgaccggaacaaaattctggctcattgcccggctgatcaaatctttcatatcggaatctgcagccactgcgatataatctgcttttcgctcaaaatcatgaataaagatatgttctgcttctttcagattcagattggtatattttttcatcccccagagcagatcaccttctgtaatcgttccaacatactctccctgacggttcagcatggggattgaagcatatttgtgatgttccattgtctccagaacctgacggagtgtgcagtcatcatagacatatgcaacctcctgttttggatgtaaaaagaacaaaatgttcatcgtgtcacctctgtctttaaatctgtgtttctacaaaaatctggtacagtgcacggatggcgtttttgaagtcatcgtgtcttacaccgacaatgatattcagctcgctggatccctggtcgatcatcttgacattgatatgggcatgggcaagggcggagaaaattcttccggcagtgccgcgtgtggaacgcattcctcttccgacgatagcgatcagagcaagatcagactccagttcaatgtggtccggattcacagctttatggattccggccagtacctgctgttctttctcttcgaactcatctttatgtacaaaaattgtcattgtatcgatgccggaaggcatatgctcgatggaaataccgtttttatcaaactcttccagtaccttgcggcagaatccgatctcggagttcatcattgctttttcaatggtcacggcagcaaatccatctgtcccggcaattccggtaatggtatattttggctgtctgcaggtactctctacgatcagtgtgcccttgtcctgtggagcattggtgttgcggatattgatcgggatgccgactttacggacagggaagatcgcatcctcatgaagtacagttgcccccatataagaaagttcacgaagttcacggtaggtgatcgtctcgatggattttggatttgtaacaatgcgtggatctgcgatcagaaatccggatacatcggtccagttttcatacaggtcagccatagctgcacgggcaaccagagagcctgtgatatcagaaccgccgcgggaaaaagtgacaatggttccgtcttctttcgcaccgtagaatccagggatgacagcaaattcttccccttcaagacgaagggagagcaattcgtttgttttctcgtcatccagactgccgtcttcatgaaagcggatcacttcagctgcatcgataaaacaaaatcccagataatttgccataatgataccatttaaatattctccccgggatgcagcataatctcttccgatttttttgccaaaattttcacggatcatatcgaattcatgatccagtgaaagttccagattcagaccgtcgatgatctcgttatatcttgcatggatctcatccagaaggcttgtgaatttcttttcacggatcgcaagattgtagcagctgtaaagcatatctgtgacctttgtgtcgctggaactgcgttttcccggagcagaaggtactacatagcgtctggacttatctgcccggatgatatctcctacttttttgaattgttcggcactggcgagagaacttccaccgaattttactactttcttcatcttctttcctccaactgtatattatttcaaattagatgcatagatgtttgtaaaacgcacgctctatcatttcgctttcctattatacagggtattttcaggattgtaaatcatagattttaaaaaaaccgagtgtactccgaaatattaaaaagtaacatcagcatattgtgcctgtgtcacgttctttaagtcatccggagaaagcttcagctgcattccaagctttccgccgctgacatagatataatccagcgtttgggcgttctcctgaatggttgtcggaaatgcttttttcataccgatcgcggtacagccgccccgtacatacccggtcacagttgtgatctctctgacagggagcatttccacagacttttctcctactgcccgggctgcttttttcagatccagctctgcttcaatggggatgacaaacacataatgggaaccgctctttccggttgtgaccaaggttttatacacccgttcatgaggcagccccagtgtgtcggctgtactgatcccatcggtaaaattgtcacattcataagtctggtattcgtaggaaatcttgctgcggtccaaaatgcgcatggcgtttgtttttaattcttttttactcaacgtgttcacttctttctggtgatttttcggctttgtcacggacgcattcgtgaagcggacgccgtacttttttacgggttacttctactaactggagtgctgtgacatccacaacggacgtctgaatcgggtcttctccaagaaaacggcggaattgttttaatagctcctgcatcatgtccggatcatccatgttgataaagtcaatcaggataattccggaaatattgcgcaggcggatctgccgtgctgtttcctttgccgcttccagattgatctttaaatacgtttccgcacttttcttttttgtcttcgcagaatattttccggaattgacatctaccacggtcagtgcttctgtcggttgaatgacaagataagcgccgtttttcagccagacgtattctttgagtgcgcgttccacggcaatgtcggtactgtaaagtttggaaagcggcagaagctgttcctcataaaactgaagtttggagagatcttccggctgctctgcctgcaaaaatccgtgaatctgctgatacagcttgggatcatcggtaatgattgctgacaatccgtctgcgtatacatttttcaaatctgtaatataagacggaggggcctcctgcagacaggaaaagcaagtccgaaacggagcagtttcttttaacttgacacaggcattctccagtttctgaatctcctcaagtaccgtctcaaagggaacgtcctttgcattcgtacgaatgatcagcccgtagtcctcatttttgagatgactcagtttttctttgtacgtatcccgaagagaacggggaagcttcccggaagtaccgatcctggtatttccggttgtcagtactgcataccgcccggtaaaattgatattgctgctgacagtcggcgcttttgtcttgactgcttccctgctgatctgaacgaccagctcgtctccgatacaaagcggttttttcccgattttatgggtaaagatcgcctgaggcgcctgacttaggtcgtagtagcattcttttcccggagcgatctcgataaaagcggctccgatattcgccgcgatattttttacttttccgatgtaaatatctccgagtacaggttgtctgtgctgatcagagtccggaagactgcagtggatctctgcgattacatcattttcaagaagaaaagtccagatcttcccttcttttttcagcattaaaatttttcgtactgccatttattatgatacctctcttttttgtactgtccaaacacagcaggatttattcgatcactgtgccgagagattctaaggttaccagatttcgtgcgttctcatccccggaatcagcatacatttccagacggcacagtgcaaattttaactgtgtggcatctgcatctaaaaaccggcagaatgcttccatgacaagccccggttttaaattctccacacttccggcagcgagctgcataaagagcttgtgatcctgcacttccatccggtagatcaaaggtttgatgtccacttctttttcgctgcgttttgtctgttttaagatgcggatctcagactgcgcgagaaaggcatccatctgtgtttcccagtcgtccggcagtgttcccggcacaagatcaagaagatagtctgctgccgcgacaatcgccattccggtcatcttcttttcctctgcgatctggcggaaacttaaaacttcgattccctctaccataacggcatttaaacgggataccgcttcagcactggaaatggactctttcagttcgatatcaaaatattctccttcgcttgtaatcccgattcccagcggatttgcaaaggacatgatcatatgaggactgtagcccccggtataggcgatcggaatgtgcgccctgcggattgccttctggaagaagcgcataacatccagatgtccgataaagcgcagtgcaccgtactttttaaatttaattcttgccttcaaaacagacacctcctccaaattttgccgcaccacatccggaacactgcattctgcagtttggagtaacctgtgcgttcattgctctctcccattcttttttcaggaagtttttggtcacgccgatatcgatgaaatcccatggaaaaagctcatccatggagcgttcccgcatggtgtaaaactcaatatccactccggtatttgcaaatgcctgcatccatttttcattgtcaaagctttcgctccaggaatcatacagacatcccagacggtatgcttcttcgatcacctttccaaccttgcggtccccgcgggcaaatacaccctccagcactgtgacatctgcctcgtgccagttatatttcaaactttttttgttcaactgctgtaagaattcatgctttacaatcgttgcacggcgaatgtattcttcacttggaaacatctgtgcccactggaacggggtgaacggtttcggaatgaagaacgaagaactggccgtgatctgacattttccattgcgctgttctttcggaatttcataatatcttctggcaaccttttctgccagatgggcaatggctttcatgtcttcttctgtttctgtcggcagccccagcataaagtacagttttaccttgttccagccgccttcaaaggcctgtccggctccttctaaaataatctcttctgtcagtcctttgttgatcacatcacgcattctctgggagccggcttccggagcaaaggtaaggctgctttttttgatatcctgtactttactcataacatccagcgagaacgcgtcaattctgagcgacggaagggaaatattgattccctctcctttaaattcatcgatcaggaaggtgacgagctcttttaattcggaataatcactggagcttaaggagcttaaagaaatctcttcgtgtccggtgctttccagcattgctttggcgtattgcttcaagcgctccacattgcgctctctggtcggacgatacagcatgcctgcctgacagaaacggcatccgcggatacatcctctctgaatttccaaaacgacacggtcctgtgttgctttgatgaaaggaacgacaggggcctgtggatacggtgcttcggttacgtccagtaccatttgttttttgatcacagatggtgcatgctcgttgttcggtgcaaaggaagcaagcgttccgtcttcatggtatgtggcatcgtaaaacatcggcacatacaatccttcgatctgtgcggcgcgttccaaaaattcgatacggctctttcctgctgcccgatactctttataggcatccagcagttcgtcgtagacagtctccccttctccgatatagaaaatatcaaaaaattctgccagtggttccggattatacgtacatggacctcctccgataacgattggatctgcctcaccacggtcacgactgtggtgaggaatccggcttaaatccagaatctgcagaatgttggtgtagcacatttcgtactggatcgtgattccaagaaaatcaaaatcacggatcggatcctgagattccagtgcaaatagcggaatctgttcttctttcatgatcttgtgcagatccagccacggagaatagacccgttcacaccagacatcttctctttggttgaacatatcatataaaatctggattccgagatgtgacattccaatctcatagacgtccggaaagcacatagcgaaacggacatccacctcgttcttgtctttcatcacagagttcacttcgttcccgatataccgggccggcttctcgatttttagtaatatttcatcatttaaagctagttttctcatgtttctcctttcatttttgtttaatatatacaaaaaattaaccttcttttctcttccgattttcacgaaaaatagctgtttttttatgagtttcagtagcgtttttcacctcgtttttgcccttgcgtaacaaatttactttttctctactgtgcagcgctatgtataattatacaccattttcatggtcttgcataaaatacatagcactgcataacattattcaatactataatatgaagcagcagaatacattctgaaacagcacgttaacccgccatattatatactttttgcggaaggagttcaagcaaatctttctcagatataggaatgtcaaatataaactcgttactgttcacatcaattcccgcctatccatgccaaaaaaacgaaactgcattctcacagctccgtttttctgtcatctgattatgtttcgatgtaggattcctctgccagttttaccttacaccgtttcatataacacgcaatcccatatttcaaaattttgtccactccgttttccctaagttcctcatcatactttctttcctctacttgctttaaagctctttcacaggcaacatccaggtttccgtcacctgcatatttcacttcgatcaaaattgcagtttcactgttctctgtttctatcaggatatcgctgtagccttctccggtttcctgattggaaaagactccccattcttctttgatacccaaaattccaagcagaataccatgataaaagttttctttcatttcctttcttacaaaggtgtcccggatactgatggtctttttcaggtaactttcaaaaatatcttcaaccttcttttcctctccgtttttcagtgccttacaaaatctgccaagcatatccccgtcttttgcaacactttctttgaaatattccataatctgggttttaaaaatatcccgaatttccaaatttgggatccgtagcttaaactttctcgcatccacctgaccggactgcgttaaatacccggttgcaaacagtacactccagatattctcaatggactcatacatttccttataagtcagttccggatgaatggtttttgtgatactctccccggccatcaaacgctcaatctccctctttgtggtcagattttttgactgccggataaattccttcacttctgcattgctacttgtattgatccagtaattctgaggaattgcttctctgtttgtacgcagacttcgaagataggaaactacatcccatggacaatatacgtccacgtttccaaagcggtatccatcataccattctttgatactttcatacttatccgcacattcataatacgttaaaaggtcacgtacctcctgatctgtaaatccaaaatattcatcaaaatcgacatctgcgatcgtaaaggttgtaaaattattaagtcctgtaaagatactttctttcgagatacgcatacatccggtcagcactgcaagcttcagactgctatttgtttttaacgcctgttccaacagattgcggatcagaaataccatctggtcatagtatccatttgcaaaggcttttgccaacggaacgtcatattcatcaatcagcaggatcacttttgtgccgtaatgcttcgccagcaattccgacagccttcttagtccgctgcaaaaaacagcctcactcatgttactgtccaaaagctttttgtaagcctctttatcatgttcgctcaagcattcactatcgcaaagaaactgaaacgcttctgccgctctctgcataatctgcacagcaaaatcaaaagcgccctcataagcagctgcattgattcctttcagggaaacagagatcacaggatattttcccatatattcgtcgcacagcttcggatcttttaaaatttccaaaccatcaaaaatacttttatctccctctatggaaaaaaagtactccagcatactcatatttaaagtttttccaaagcgccttggtctggtaaagagatttaccattccaccattacggatcagttcagaaatcaatcctgttttatctacataataatagttatcttttataatctgctcaaaattttccaatcctaccggaaggcgtttcttttcttcacccatgttattcacaccccttctctgttgattatattgtaacaaagatccgcacaaaagcctatacctaacttttctcatcattctcagtcagttcttctatgattccgccaggattgatgatccgatactcctgcattccgtacgttgcaaaagtatactctgaacgataggctgtttcactggccagcttgtaaaattcatcgaaagtgatcgaatcatctgcctgacatgccagagcgtacatacctgcaacataaggtacgatggaactcattccgccccaacagctataggtataattctcttttccgcaattagatgcatgtgtacttttagcggttggaacatacacgcttccaaaaggtgttatggcagaatcatagggcatataattattgaagtcggttacatctgtataggagattcttgtcagactctggaatttgtttattttatttttgggaatcagacataatacttcgatattgttttctcttgcttttcgaatagcgttgtttaattccacgtcaccttttactcttttgccgttgccacaccgtgtatacgggcaatctggttttcatcggagtaagattgatagaatttcaggttatctttgatttctgtatggtcaacaagcaatggactatcaatgacagcaataccaatacctgttcctcctagataaaaaatgcttccaagctttattcaaaatatttctaccacacaagactttaattttaatcattcttttttgccataatacagtaccagtcaaccagttcgaattctggcattttgaaatatgatgggaaacaatacacagaaatattcgtataacccatcatcttcagtttacttagaatcatctctttcttgattggataatatttttcttcaaatatttctctttgaactatttgattctctttttcaaatgtatataaaagattaaaagttatagtgtcttcagaactataatcccagacttgaaccaaattgactctgcatttctttgcaaaaacgggattatacagatagaatcttcttttttcattcaaaatttttcccaatttctagtatccagatataaatatccgcctttttttaccaacgaattcatttgctctaaagctgtaagtacatcatcattatttacatgcggcaatgaatttcccgtactggcaacacagtcaaattgtttgccttcccagcaagaaagcttcctaaaatcacaactctttaattcaatctcatatcctgccgcagaagctttttctttgcattttcttatcatttcttcgctcaaatcggaacctgcaagttgaacacccaactcacataacggcaacgttacacttcctgatccaatactaacgtctaaaaaagaatgaacattctttccttgtaacaacgttttccaatgttttttataggcactccaatgggtttgatcttctaacaaatcataaatatcggttctgtcatatatacttgacatttcttttctccttcaaattcaatcacgatgacttttcagcggaataagaattctcagattttagccgtcacgatggcttttttgagctttctccgcacaaaacagtagcagattacttgtaatacaatggtaagaaaccatgatgcagggtaggaaataaaaagtacatctaaagaacgatgttttgggaatacccaaaatatccagacaatcctggttcctactgttccgattacagacaggagcattggaactgctgaaaatcccatgccgcgcagtgctcccggaaacagatccatcagtccgcacataaaataagtcactgtcgtatacaggagaatctccatgccgcattgtattactgctgcatccgatgtgtaaacccgcaaaagctgcggccccatcagataggatccgcctcccataacaattgagactgctaccgacaaaaggatacagtttcgaagaattttatccattcgtttccactttccaacactgtaattctgactggtaaagctcatacaggcctgtgtgatggaatttacggatgcaaacaaaaatccaaaaatattgttggcagcagtatatccagccattgccacagaaccgaatgaatttacagaggattgcaaaaggacattcgaaaaattgatcaccgtactttggattccggccggaattcctacctgaaaaatctgctttaaataaatccatttcaatcccatcctagaaaatctgaattgatagctgctgtctgacctgtagagacaccgaagcactaacatacaggaaatcatctgtgcgattacggtcgcaatcgcgactcctgcaactccaagatgcagaacgatgactaaaaacatattcagcaatgcatttgttacgcccgcaatcatcaagaaaaaaagcggacgtttcgtatctcctactgcacggagaatggcagctccataattgtagagcataaaaaacggcattccggcaaaataaatccgcatatacagagcagattgttcaattacatctgcaggcgtatccataagttccaaagcggtccttgagaagaacaaaccgacaaaaaccattacaattccgctggtcaaagcgaatgtaattgcggtatgtacagtctctgacatcttcttttcctgacctgacgcatagaagcgcgcggccagaacatttgctccaagtgaaactccgataaacaaattcgtaaatacgttgatcaaagcagttgttgatccaactgctgccaatgcctgacttcctgtaaatcttccaaccacaatgatgtctacggcattgaataaaagttgtaaaattcctgataacatcaaaggaatggaaaatgaaatcaacttatccaaaacggtaccgttacacatgtctatttcatatctgtttctttttactgctgaatccacagtatcccccctaacctgaattttataaattaccaacaccattatatatcaaaaattccataaagataagaggaaagtgttatattttgcactgcatcaaacttatcaccgattgctgttccgcgtatcttttctgaaattaaaaaggctttgtaccttcacaaagccctttcctttctgtcatccaaatcccttgtatcttttgtgtctattccgtctcctgcaatgtctcagatacggattgagcagcaccttgtgcaatctcttctcctacctgatccagtcctgtaaagttgatgttttttgttgtttttccttcaaaagtttctgcacggatgatttcgttcatatcgattccggtcgcttcttttacggattccatgactttccccatgatgatcggtacatttcctgcaaggtcagataccccatcgctgtttccgccaattaccgtgactttatcaatcgcagataatggttctgccacactttttgcaatatccggaagaactcctacgatcatttccagaattgctgcctgtccgtattttttcatagcttctgcctttttgtccagagcttctgcttctgccagacctttttgccggatggcttctgcttctgccagacctttcgcacggatggccgcagcttctttctctgcttcgtactgctgtgcctcggcatctttctggcggcggtataattccgcatctgcattctgcatttctgcatatttgtctgcttctgcttttttacggatctcagcatccagctttttctcagcaacttcggcttcttttgtctgcagttcaatttctttttcccggcgggcaatatctgcttcctgttcccggatttctaccgtttttcgggaggtttgtttctgaatttcgtatgcggcatccgcttcggctttttttgtatcttccccaatttttaattcagctttgcggatctccagatcattgttacgctgtgcaatagcaagttctgctgcaacttttgcttcactggctttgtttgcagcttctgcagatgcaacctctacatcacgatctgcatttgcttttgcaacccgtgcagtcttacggattgtctcgcggttatcgattccaaggtcatcgatcagtccgtctttgtcgttgacattctggacgttgaaagaaagaatgcggattcccagttctttcatatcctgttctgcattttgtttgacttcctgactgaattttgctttgtcctgacaaatgctccttaaatccatggttccgatgatctcacgaagatttccctgtaaagattcagtgatcatagatcgtacatcatctgccttccggttcagaaagtttcgcatggcaacgggagacacctgattgttggaaacttccattgctacctgggcaatggcatcgactttgatattgataaaatctttggtcggaatataatcttctgttacaacattgatgttgatctgtccgacttccagccagtcaacacgttcaaaaaatggtactttaaagcctgattttccaagcagaactcttggattttttgacagcccagtaatgatcgccgctttattcggcggagcctttacatagcctgcaaataagaaaataagtaacagtactacaatcggtataatgatatataacactctgactcctttcctttggatgacatctaaaatacaaaatggaaactgtatttttctcattataaaatgaggacagaacagatgtcaatcaaaaaaatacggattgaaaaactggaagtttctcaggaatcttgttacaatttaagaaacaatggaaaggaaggctggataggatgctggagaattcactggcggaaaaactaatcgaacaggttacaaaatacaccagttataatgtcaatattatgaatgaacagggtgtgatcatcgcgagccgtaatccggagcgaatcgggaaatttcacgaagttgcatggcagatcgtgcatggaacaacggatatcatggtcactgaaaatgacaatgaatacccgggagtattaagcgggatcaatatgataatcgagattgagggaaaacgggaaggcgtggtaggcgtgacgggaaatccagaggagatacgaccgatcgcactcattatcaagatggcgatagaaacgctgatcaaatatgaaaatcagaaaatgcaggcgtttcgaagacagacaaggaaggaccgtttcatggagatgttgacgcaaaagcaatatcgtgcgccacaggatatacaaaagctggcagcagaattgaattaccgggaggatttgatccgaattccaattctttgtcatctgcagtccgcttcagatcaggaggctttcttacattcaatcaagaacggacgggaacatcttacgcaggatatcagttttcagatggaagatcgatatattttgatcttcaaaacactaaaaggggaacatcttttttcagattataaatttttgcttgccgactatttgaaaagtacgttgaaatggatgcgggaagaagagatttgctgtacattctacgttggaacctttcagaccagcttttctcagtattattattcgtatcagcattgcaaatggctggaaactcacatttttggagaacatcaggcgttttatttttatgattttataggagaatatatcacctcttgcattccaagacaggaattacagcagatttttaatgtgtttgcacagaaacttccggaagactttcgaaaaaattatattgaaattgtgggaagtctgattcagaataatttcaatatccaaaatgcagcgcggcagtgctttatgcataagaatacgtttacctaccgttataataaaataagagaggttctgcgtctggaccatcagcgttcaatggacgatacatggatgctgatctgtttgtatttatacttaaaattatagaacacatgttttgtgcgtgaaacacaaaatatggagaaagttttggttgaagtattctgaatttttgaaaaatattctgctacaatgaatacaattaaataaaagcaaaaaaaaacaaagggggctttaatatgacaggatttccacttatcatcgcttttattgttgcaattgtattcatgattgtagctatttccaaatttaagattcatccgttcttatcgattatgggtgtttctttgattctgggattggtggcaggaattccgctggtcgaccagaccgcatcggacggaactgttaccagtggtctggcaacagtgattggagccggattttccggtacattcaccagtattggcatcgttattattcttggagcattaatcggaagcattctggaagagaccggagctgcattgaaacttgcagacatggtcatccatctggttggaaaaaaccatccggagttggctatggaactgatgggatgggttgtttccattccggtattctgtgattctggatttgttattttgaatccaatccgaaaagcattggtaaatcgtaccggtgtgtcatccgttgcaatgtccatcgcactctcctgcggtttgtatatctcgcatgtattcattccgccgacaccggggccgattgctgcggcatcgacactggggattggagataatttactgatggttatgggaattggagcattatgttctgtatttcctctgattgctggatatttttatgcaaaatacatcgggaaaaaggtaacagctgatgatgaagcaaactgtaatgatgtaaagaaatcttacgaagagctggttgctgaatacggaaaacttccaaatggatttattgcacttgcaccgattctcataccgattcttttgatgggagcaagctctattgcatcaatggcaggctggtcaggaactgcaaatgacattttgaagtttttgggaacgccgattattgcccttgcagttggcaccattttcggtgtgattcagcttgtgggtgcaaggagaatcgataaattttatgatttgacgaatgaaacattaaaaaccgttggaccaatcttatttgtaacagctgcaggcggtgtgttgggaaaagtgatcgcttctacaagtatgattgattatattacacaaaatgcagaattgctggagacaataggtattttcttcccgtttatccttgcagcgattttgaagagtgcacagggatcttcaacagttgcacttacgacaacagcaggaatcgtagctcctatcctgccggttctgggactggattccccgatacgggcaacgcttgcggtaatggcaatcggggctggagctatgacagtatctcatgcaaatgattcctatttctgggtagttaccaatttcggcgcgatgactccggaaaaaggatacaaaacacagacaatggcaacgctcgtgcttggtctttccggtatgcttgagatctttatactgtcactcttccttcattagggaaaaatacaagatgaaaaagggaggcttctcactatgaaatttttatttgcatcagattcttttaaaggaacgttatcttctgcgcgtattgcagaactgcttacgacagcagcaaaagaatcctttccggattgcacctgtaccagtattgagactgcagacggaggcgaaggtacaacggatgctgtattgtctgcagttcaggggcagcggattccacttgtggtgtgcgggcctctctggaaaaaaacagactgcttttacggaaaactggatgaagaacgtgcagtcatggaaatggcggcagcatccggtcttccactgttgacagaaccggaacgagatcctgaaaaaacaactacctatggaaccggagaaatgatcctggatgcattggatcgtggttttcgggatatttcgatcgcaatcggaggatcggcgacgaatgacggaggaatgggatgtatgtgcgccttgggagttcgttttctggatgaaaatggcgagatcttgcagggatgcggggaaaatctgggtaaaatttctgaaattgatgtttccggtctggattcaagagttgcaaagacaaaattcacagtcatgtgtgatgtcaataatccgctctgtggggaaaatggagcaacctatacattcggtccacaaaagggaggaaccccggagagtttagcaaggcttgaggagggaatgctccattaccgggatgttcttttgagagagtttggggtggatgtcaatgaaattccgggagcaggtgcagccggcggtttgggggccgcactggtggtctttttaaatgcggtgctgaaatccgggattgaaacggttctggatctggttgattttgacagcaggcttcagggtgtatctcttgtggttacaggagaagggcgcacagactggcagtctgcgtttggaaaggtactgcatggtgtcgggatgcacagcaaaaagtacgggattccggcagtggccattgttggctccatgggacagggggcagaaagaatctacgattcaggaatcgattcgattctgactacagtcaatgccccaatggaactgcatgcggcactggaacaggccgaggaattatatctcaatgcggcgagacgtctgtttcgaatgctgaaagccggaaatgagatgaaacaaacagattaaaattcctgcaaatgacaggagttttccggcagccgcgcctggtgcatggtaggaaatttcaattttgtgttttccctgtttcagaggaaagcccaggaatgcagtatttactttttcataagatacgttcttgccatccaccaggacttcaaaatgagagtcataaggaatggttgtgataaaataacttttttgatcaacctggatcgttcccttgagctgattgcctttggaagcatttttatccgcgtgaaattcagactgatatagtgtttcgtttgaagccgggtcctgccaggttcccagagaaagctgcagatcggaaagctggtagcttccttttccaagggtgagggagatctgctgctgccctttttccaatggaaccgcatacgtaaatgttgtgttgtggttatagtaaatgtgtgatctggcacttaatttattccgttctttttccagtgtgatggatacgtcagaagatggcttcttgttttttacatgaaattgcaggaataaaacatgctcctgctcattttgtccgttctcattccagttcggaaataagtctgcaagatttaaatgaagaatctcagtctgttttaatactgccgttatggtttcgtctgtttgtgtcagagtgtttccggtcttttggagagccggaagcgtcattgttccggatgtgatcttcagactgtcagaatccggagtctctttttgtccgcctttttctactacagcataatctaaaagtgtagtctgattgtacggaaacggtaatgtatcataggtctgtttatttagcagccggttcgttgcataggcaattggtgatacattgtcatttttcagaactttcgtatttccgattgtacagtcccattgatagccgggaacatcctcctgggtgatcagatatttgatgcccataaaccgttgatagacaggatttctggaaacagactgcattagaaaattccgatagggctcttccagttcaaacgtctttgtccgaaattcctgataatctgcattatatacagaagaatacacagagctgctgtactgtccggtgctccagatgcgattgagatcggcaaactcttcttttggggtaccgatttgttccatgcggtaaaactcttgttttcgcgtgataaattcggttgcttttttcgtttcataatccgctattttctgataaaaaccggaatccagcatcgtgtctgcctgtgtctggaaagactgatcgtagattccaaggaacaggattggcgggatcaaaaggcacaaaacacttccggtgcgaagggattttctgtttgtccgaatcctgaaacgagtcaattcataaaagagcaggtagcatcccgccatgatgacgacgtccagagcaagtaagaatcggctgaaggacggcatggattctgtgtttccggtaaatatcagtatgatcgtcagaatataaggcagaagtccgcgccagagcgggcgagcttcttcctgttgtttttgcatatagcaggcgatcagatagcataaaaccggaagaaacggaatcagaaccttgtcccggatgtacagtccgccattgagcagataagaaaagaacggaatcgtcagaatcaggatcgtgctccagatcaggatccgttctcctcttctcttccaggcaagtccggcgatcaaaacggtcaggatcagtgtggtcagtccgattgcataaggatgataaaggatcgaggataattttactgtaggaataaaaagggaaagatctgtcggtgttgtttccccttctcttccgccgtgcaaagccattgcggttgggactaaaaagaaggcgcttaaaagaatcgcggtcaggatcggacctaaaaaccggattccgtctctgagaaaatcaagaaaccggattttctttccaagcgaatcctgcagcataaagtatcggtgcagtccgtataaaatcaggaccagaattccgccgatactgaagtagaagctggtcatgatcatcaaaaatacaccggataaatagagaagcggttttcctttttccaggaaagaatccacaccccaaagagccatacacagaaacggcatataattgacaaacataatctggttgtaggactgaaaaatcataggtgctgacagcaaaaacaacagtgcagtcagaaagctgacagtctgggagaaccctctttttatgagccagaagtaaagcaatacaactgctgatgcaaggcaggtgaaggatgctgcaatcagataatcgctcattttcacaaaaggaagcagataggacaacaaaaaaacaggactgtacagtccatagtaggcaaagttataaatgttctgtcctcctccgatgcccgctgcaaattccgggaagaagtctccggtgtcataaaactgctgtcggaaataatccggaaatacgctgtgctggctgatccagtctacttttgagccgaatacaccatatctcccgcaaaataaccagcagaaaaacaaagtgaaaagaatcaaaagaaaaggcatccgccattgtttgcatttagtgttcgtattcatagtgtgtcctcgtttcctcttcgctggaatcttttaaaataaaaatcggccggtgttttgtctccagatatgtcttagacaggtactgtcctacaattccggtacataaaagctgcacgccacttaccataaagatgatgcaggcaagagaaggccatccggatacagggtctccccagatcaaggtccgtacgatgatcacgatgatcatgacaaaagaaaccagacagaacaaaagtcccagtacagatgccagtgacaatggcgccacagaaaatccggtgattccttccatggaatatacaaacagttttcttaaagaccactttgtctctccggcccggtcagaacgtctggttgccacgctgtcatactcctcttctaacagaattttgtacatcttcggcagcagtgacggcggatcctgcagatctacatccatgactgcaacataatctccgccggcattggaaagaccggcataaatggctgcttcttttccaaaattacgggaaaaagaaaagtatttgcagcgaggatctttttggtgcagcgctttcatttccagcagtgtatgatcagtggatccatcgtcgataactaacagttcaaagtcaatattctccatttgcttcataacgggctgcattgcctgataatatacaggcagagcctcctcttcattaaagcatgggataattacagtaattgtttcagttttcatattctgtctacctcctggaaacgatgatactggtattttcttaaaaaaatccaaaagcaaatcttaaaaatgcttaagaaaaatagtattttttttaaattcgctataatatacacagatcaaacagcttaaaatagaaaagaaagggataaaaatatccggcaggagacagcaagcagaaaggccaatcaggatctgagcactgcactcctccatgatctgcgtacaccgctgacgattttgaatggatatctagaccggtgcctgcagaaaacatccgatatcagaaatgagcatatgctgagagttcctattaccagtgcagtcatgactgtgaaagaggacatttaatattttagaggtgggaaaatcgtattttttgagaaaaaaaacacatcccggatgaaatacgatccgggatgtgttgaaaaatcagagatttaacggataaagtttgtctttaccttctcttctgattccggttttgaaattccagcattttttccggcttccagacaatgcagaagccatgccatatttttgccgagaacatgcatgatctgaattccttctttgtcctgaagtacttcatccggagtgttgccgtgtaccatattccaatagttggaagaaacgattggcatctggtggaatgaaaagtattttaagaggacatccaaggttgctgtggtgccggcgcgtcttgcggatgcaatggcggcagcaggtttcagcaacatatcttttccggcaagagaacagaacttatccataaattcgatgatctgcccgcttggagatgcccagtataccggagagccgacgatcagagcatctgcctctttcatcttttcggcagctgctcttacattttcaagttccggggttccagcctgaaaaatttcgctttcgattccgtttttctctaaaaccccggcaatctggataagtgcggtatacgtgcagccttcttttctcgggcttccatttaacatcaaaactttcattttcaattccttctttcttttgagcttataataaatattataacgcagaaggaacttttatgtaaatattaagaaaacagtttcatagagaaaaggttactcttcctcatggctggcagcatattttctgccaagcttgatcagaccggcaaaatagagagcggtcaaaacacctgcgataatataagcaactgtcattggcagaccaaatccaattttctgactcaaaatgaaagaagatatgatgaacatataaaaacttcctggaatcaatgcaatcagatagattcctttttttgccccctttttcgccatcagataaatagtaattgcagcaaatgcgaaaactccgatggtctggttgctccatgcaaaatatctccagaggatattaaatccttctgtattcatttttgcaaaaacaaggatcaaaatgacaggaataaaaattcccaatgtcacaagtacacgattttttctggttttctgatcaatgtgcaggtaatctgcaaccatcagacggcaggagcgaagggctgtatcgccggatgtgattggaagaacaatcacaccgaggattgcgatgattcctcccacaggaccaagcagaccttttgcaacttcgccaactgctgcggtagctccggcagtagaaccgctgttgtaaagtcccatagctgctgctgcccagatcatggcgatcaggccttccagaatcatcattccataaaagactgtgcgtccttctttttcatgttctacagagcgtccaattaaagtacactgtgtagagtgaaaaccagatgtaattccacaggctactgttacgaaaaagacaggaatgaattttgttcctgctcccgaatttccttctgcatcaaagatcggatacacatcaaaaattcctttgagaccatggctgaaatcaatattatcaagctgatatccctgaataaagattccagcaaatactccgactgccgataagagcagaatcgcaccgaaaatcggataaatcttaccaatgatcttatcaatcgggaacaaagttgcgaccagatagtaaagtaagatcactccgtaaattacccatgtccatacattgacatcctgaaatccgcaaatctgtcctgcgaatagatctcccggggtataggtgaaaacagcaccaacaagaagcatcagaaaacaaaggaaaatattatacacctgataggttttatttcccagaaatttccggatgattcccggcatttgtgcaccattctggcgaagtgacatcattccgcttaaatagtcatgtgttgcaccgctgatcacacatccgattggaatggtaataaatgcgattggtccaaacaagatcccctgaatcggcccaaaaatcggaccagtacctgcgatatttaagaggttgatcaatgcgttcttccatttattcataggaacataatcaataccgtctttcattcgtacggctggagtctcgcgatcgtcaggtttaaagacatgctctacaaatttcccgtacagccagcctccaagtaaaagtattacaagccctgttataaaagttgccataaaattttcatctcccatttctttataatagagtgcactctgttttatagatattttatacttttttaataaattgtcaataggttttgcactgttttctttatttttttaaagaactggcaaattaacgctttagcttaataaacttttaaaagtaaaaaagacaggattgccatctctttcaacggctgtcctgtctggttctgtttacatcagttttctgaataagtttttcagatcttctacactggcatcttttggattgcctggtgcacatgcatctgcgtgcgcagattcggcaaggaacggaagatcttcttctttgagtgcttccagttttgttgggattcctacatctacagaaagtttctgtactgcatccacagcagcttttctgtactcgtcagcagacatctcatctacacctttcacgcccatagcacatgcgatttcgcgatatttttctccggagcaatctgcattgtattccataacaattggaagcatcatcgcacatgcgacaccatgaggcgtatcataaacagctcctaatgtatgtgccatggaatgcgcaattccaaggccgacattggaaaatcccatccctgcgatatactgtccgagagccattccttcccgtccttctttttcatttgctactgcacttctcaaagatctggaaatgatctcgatcgcttttaagtggaacatatctgtcatctcccatgctcctttggttgtataaccttcgatggcatgtgtcagtgcatccataccggtagaggcagtcagtccctttggcatagaggacatcatatccggatcaacgatcgcaatgatcggcatatcatgcggatccacacagaccaattttctttttctttccacatctgtgatcacatagttgatggtaacttctgcagctgttcctgcagttgtcggaacggcaatgattggaatacagggttttgttgtaggcgccacaccctccagacttcttacgtcttcaaattccggatttgcaatgataataccgattgcctttgcggtatccatagaagaaccgccgccaattgcaacaatgtaatctgctttggcagctttgaatgcggcaacaccattctgtacattttcgatggtcgggtttgctttgatgtcagaataaatttcataagcaagcccagctttgtcaagaacgtctgtcacctttcctgtgactccgaatttgatcagatccggatccgagcagacgaatgcttttttgaaagctcttgcctttgcttctgctgcaatttcctggattgctcctgccccatgataagatgtttcgttcagcataattctatttgccatttgtatcactctcctttgttttgattttaacaatttttcacaaaaatagaaagtgaaaaactgtcaaatttgtcactttacaatagatttaataccttaaatacttccattagtttcagaggcatagcatcaaccagagagcgtgcaatttcttctggagttcctttcaactttccaagaaccctctgtacagtcatatagatggaaccctggcaatacatttccagtaagaaacgcaaatgctctgaaattttctctccggtcttctgttcaatctggtctgtataaaattgaaggatcagatgaaagtcgtgatccctcaggcagttctgatcatcattcttaaaggcagtacgaaaaaacagattctcctgctggatataataaaatttattgacaagtccttcgtagattgtttcgctctttcccatgtactcgaaagatttcaaaagaatcttatcaaaataccagttgatcaaatcgtatttgtcctgaaagtttcggtaaaaggtctgccttgttgtaccgcatacttcaacaatttcttttactgtgattttttctaccggcgcatatttcatacattctttcatcgcttccgaaagccggtatttcatacgttccggatccctggaaggttctttggtattctgtagtttttccatgcgtgtttcagctccgtgatttttatcatttataaagacagtttatcatgaaggcagtgtggaaacaatacagatgtgtgtgaaagcggctgtaattcataaatttgatggatacgatcataccaacagttgtggatccctgtgcaaattttgtggacagataacagacgattccgatatagacagcaatagttcccgtcaggatttttgtcttgatcctgacattctgttctttcagatagctgtccagatattttggatatgcaccgcgcgcctgaacatctgcaaagaaatagtttttctgttctgcctgcattgctgccagtacatcctccggctttggtgtcagcgggtatgtcggcattgccagaatcatgcagccaacctgactgtccggcataatctcatgcgccagctttactgcttttgctgatgcaaccagttcatgatggattgcctgatacagatcctgctttgtgagctgttcctttggagtcaggattccaccgctgatcagaggctgatgcagcacggaattgatttcattgaaagtaagccagtactttacttttcctctgtagcgttcaaagattactttacagaaattcatataaaagtcgatgagctttcggctcctccatccgtcatactctcttgcaagatgcaatggagtctcgtaatgggaaatcgtcaccaatggctcaataccatactttttgcactcattcagtacatcatcatagaagtgaagttctttttcatttggctctttgtcatttccatttgggaaaattctggaccatgcaatagaaaatcgaaacaccttaaatcccatctctgcaagcatggcaatatcttctttgtaacgatggtaaaaatcgactgccacaagcttcatgttgtccgctgtaggttcttctgtaggtgcccccttgattccctttggcatgatatcctgaatggacagcccttttccatcctccaaatacgctccttcacactggttggctgccactgcgccgccccataaaaaatcctttggaaatattactcgattcatctcttttttatcctttctctattttttgactgttaaaattgcatctcctgcttttaccggaccgaattctttttgtaccacgatttctgaaaaatcatctgcgtttgtaataagaaccggtgtaatgacatcatgtgttttctggatttcctgcagatcaaatgtaatcagcggatcaccttttttcaccagatccccctgagaaatatgcacctcaaaatgagttccgcccaaatttaccgtttccagtcctacatggatcaaaagctccattccctgatcgtctgtcagtccaattgcatgttttgtatcaaaaagagcggacactactccgtcaaaaggcgcatagacgattccttcttttggaagaattgcaattccttttccaagtatctcttctgaaaatgtgggatcattgacgtcttttagagatttgagttctcctgtcagcggactgaaaacagtttgtcccaaaatagaatgctctgcgttttccttttgctttggttcgcacccaaacagcaggatacttccgattgttcctgtaatcgtcactgctgctcctgtggcacaggctggaaatgaacccggattttccacagatatggaatttaccacggagatcagtcccggaagtcctgcatacacatactgtgttgctcccagtatcgcagcgattgcacttccgattgcagcccagatacagccataaataaacggtttctttctcggcagtgtgatcccatagattgccggttctgtaattccgaaaattcctgtgattccggcggacagtgcatctgttctcagctgcttgtcttttgcttttaaaaatactccaaatgcagctgccatctgtgaaattacagcaatctgaataaaaatctgcagtgtgtcctgtccgttctgcgcaaaattggcaattacaatcggaaccatcccccagtgaatgccaaagattacgatcacctgccacaccccgccgacaactgcacctgcgatcggaggcgccatctgatacagaagattgtatccggcggcaactccattggacagccactggatcaatggaccgatcacaacgatggtcagtggaaccagcgctgccaggcagataagcggagtaaataaggatttgatcaattccggcaaatgtttatttagaaatttctccagcttggacagcagtgcaactaaaatcaaaggcggcagtacagaagaggtataggtgatttccgtcaggtttacaaaaagaaaacggatattctctccttcttcgatttttcctgccatttctgtccacacaggatttacaagtgccagacagcaggcggccgcaatatatggattgcagtgaaaatgctttgatgcggaaatcgcaagcagtaccggcaaaaaggtaaacggcgtccagctgataaaattaaaaacctgatagactccggtttctgtcacggatggtactgccattgtaagaatgatcagcaatccctgtaaaagtcctccggctgcaaggacataacagacaggtgcaaatactcctgatatcatctgaagcaggcggtttaacaggttttctttttcttttgggcgttcttcctgttctgtttttttgtttgtttcaagttctgcagaaactgcctcgaatacatctcccacatgatttcctatcacgacttgaaactgtccctgtttctgtacaaccgtgatcacgccgggcagggctttgattttttcctctgcctgtccgggtgtatttttcaaaaccagacggagtctggtcgcgcaccgttgtgcactggcaatattgtctgcaccgcctgcaagacgaatgatatcatgttccagcttttgataatcttttactgcttctgccatttttccctctccttttctttacgcattcaatcctgcctcgtatccttcccggattccaagatatccgtttttcaccccattggcatctcccacttttaatactttgcaggaaacatgttccatggagtccagaagggttctgtctgttttcactccgactgcaataataaccgtatcaatattttcaagtacaaatctttccccgtcttttctgcggttaccgtatgatctccgatttccaaaagttttgtagaagtatgaatctgaactccgttttgggaaaaccgctctttcatgtattttgttggagctgcttctccatctttcatgatctgcggaagcatttctataatggttacctgttcacattgctgaccgagcatatcggcagtttcagctcctacgagaccgccgccgatgaccacaacacgattgcccggctctgtttttccaaggagtacatcatgagcagttacgacaaaatcctgatctgcaccttgaatcggcggaataaacggtctgcttccggttgcgatgatgaccgtatccggttcatagagtttgatcagttctgcatcggcggttgtattcagaaggatctgtacatgcattttctccagcatacttttctgccagcacagaaacgaagtaaactcgctttttccgatcggaaccgatgcgggaatccactgtccacccaatcggtcatttttttcgatcagagtgactttatgaccctttaacgctgccgagatcgcagcctcacatcctgcaataccaccacctataacgaggacctgttttgccttttcggtaggagtcaaatcatattcatcttccattccggtaagcggatttaccagacagcggataccgtttccttttccgttctctccgatacagccctgcagacagctgatacaacggatcacttcatctccccgtcctttcagaaccttgtttggcagttccggatccgccagggaggctcttgccatggtcacaagatctgcctttttggactggagaacactttccgcaatctctacatcattgattcgtcctacagcgataacaggaatctgaactgcttttttcatttccgcggcatgttccacataacccgcccgcggaaatacggatggcggaatgatcgtgtgcgtggatgcatatacgccctgggaacagtgaatacagtctgcgctcgcttcttccatcaaccttgcgatgacctttgactcttcgatacccagcccgcccggcacatattccacagaagagatccgatacagcaccggatagtcttctccgcatttttctttgatgttccgaatgatctccatgccaaatcttgcacgattgcggatcgttccgccatattcgtcgcttcgtttgttagaaaacggggatgcgaaagcgcctgccagatatccgtgcgctccatgcacttctactgcatcaaatccggctgctttggctctttttgcacagtcaccgaattgctctaccagagtatggatttccgggatcgtcaattctctgggtgtttccggcatacttggctcccggactgcagaaggggctacgggctgcactccggtcacggcactgcttgtctctcttccggcatgataaatctgagctgcgatttttccgcctgcggcgtgaacgcgttcggtcagcttccgatggctttcaatctgcccatccgccttttgctttgtgttcgtgataagcaataaatttttcggttgcctttccgtccggtgtacaataattggtcaccatggctgatacgaccatcctgtttttcagttccagaccattgatcttcataggttcaaaaactttcatgtttgtcatcctttctatttccttgaatctttctgatttatactataaaagttccttctggatagttccccctcatatgagggaaaagaacgattttttcttcttttttcttgactcacaggaccgatggaaattagaataaaataaacagatcttaagaaccgctgaaaggatgaaaaaaatggctgatattgaaccgcatatcattccgagtatttatctggcaaattatctgaatgattttgaggatgtaatcttaaattatgaggtgcagaagacgcagatcagaaaaggcagttatctgacacaatatggagtgatcaataacactgcttactatatcaaaaacggaattgtccatctttcacttgggcatgaacaggggaagaagtctctgaatatgtttggccccggactattttcccggtaggcgtcgagattcatgaatttcgtgtggaatatgaaatgatcatacaggcactgacagactgtgaggtatacaagatgtcgtatcccactttgaaaaagatagcaacagaaaacggaacctttgccggggagctgcttcgtgagaattgtgattttatcggatatatgttctttgacagtatcaatcagacatttgaaccatgtctggccagaatttgcgatatcttatacctctatcttacaaaagtccacccgctctctgcgaaaatcccgctgtcgcagtcagaacttgccagcattgcgggagcgtccactgcccagatggagcgctcgatttcggatcctgaaaaaagaagggatcttagatacctcccgaaaacaaatagagatacttgatgaagaaaaattactggcgcactgtacgcttggaatgagaagcaacattatctgattttctaataaaatagctatgattcaaacaatttgaatcatagctatttaaaaaaagatttgtcaagagcgaatgggatataattttacaccaatccccatctattcataatattttccagttccaagaatggtaccaaacaacccgaatacccaaatcaaagtaaccgctttttgagacgattcccacaagcctgccgtaaccaggagaaagctgacaacaggaaataggatcatggatcccagcatccagtatcggcagcattttacaatatacggccagttactgttgtgaatccgaataaacggaatattcattcggaagaccccgtcggacacataatgaagttcattttcatcataataagtcggaagctgttcttttgcaaataagcagaaccatgcaccaaataaggcaaataaagcttctagaataaagatgtccttctggatcagatttacatcctgccatattaaaattccgagttctaatatgctgaatcccaggacaaacaaataccacattttgtgaaaactggaatgtacgtgtttttgattatctgacaaatgaatggtttttcccagcagttcatccatctcctgcggctcaagtgcggcatgaatccgctcaccttttagcagctctgcgactgttactcccaggatatctgccagaggttccaataaggcgatatccgggagactcagtccacgttcccattttgatatcgccttattagaaagaaacagtttttctgccagttccttctgtgtgtaacctttttctttcctcagcgctgctacgaatcccccaaacttttgattgtcaatttcatacatgaaaaacatcactccttattgttttgatgttttcagtataaagaatccctgaatttttggcaatcgactgtcggtagaatcgcatatttctgctgtttaaaacatactgtcccttaaaatatcatgatctctcagcagtttttcaatcacagttccttttacgatccgtatcaatggttttttcaatgcattgagcggtcccggcagttcaatctccagcggagatcttccgtccatcaatttaacggaactgtctaaaagttctcgtacatcatacacactgccccacacttccggtaccccgcggtctacaccgagcagtccatagacagcttccattgctgtacggacagaatattctgtcgtaaatacggtatctctcggcgtatctgcaaactgtccgagaaatgcgaaattgatgcagccatccggaatgacatccggccggtctccttttgttctcggcataaagaatgctgtaatataaggcatcatcgtcggtacacaaagtgcactgttttttgcgagttccggaatctcatctgtcggcacgccgatgtgatacagccattctgccgtaatctcctctccggtacagtctttcatcggttttttgatataatctccaggaacatccgtgaaaagtccgtaaacccagacgcatactttttccggatcctgctgtttgaactgtccctgacggttgatcgtccagctcatcagccacttggagtctttacagcttacaattcctccggtcacaacgtttccactgcgtggatcccgtttgcagatatttgtaatataaggaataatcttatcatccagcgttgtgatcgtagcagattcccagttagtctttgaaatatcagaacagaacttctccggatgtccaaaggccggatcctgtctggcaatatttttccagagtgaccagcagccgcttgtacggacttctgcatctccgttcggtgcgtgatgatgatctccgtagacagttccttctgtacagcttccgtttgtcacaaataccagatctttctcagtcagaaggattcctttctccacaccattgactttgcattcaatggccgaagctaccttctttccgtcttttctctcaaatacgacgttcgttacttcggtatgaaactgaaaatcaacacctgctgcttccagatatttctgcataggaagaatcagagattcatattgattgtatcttgtgaatttcaaagcgctgaaatccggcagtcctgcaatatgatgaatgaatctctggaaatacagcttcatctccagtgcactgtgccagttttcaaaagcaaacatcgttctccagtaaagccagaatgtagagtcaaagacttcttcatcaaaaacatcctcgatcgtcttatcatacagatcttcatccggagtcaggaacagcttcatgatctccatgcagcccttctggcttaaattaaatttgccgtctgtatgggcatcttctccgcgattgacagttgcccggcaaagagagtaattcggatcgtgcttgttcaaccagtaaaactcatccaaaacggatgcattcggcacttccagcgacggaatactgcggaacagatcccacagacattcgaaatgattttccatctcacgtcctccgcgcatcacgtaacctctggtcggatcgaagataccgtcacatgcgcctcctgcaatatccattgcttccaggatatggatatgatctcccggcatctgtccgtctcttaccaggaagcaggcagctgcaagagaggcgagcccgcttcctacgatataagcactcttctcttccaccccctccggtttttccggtctggcaaatgcttcataatttccatttgaataatagatcccttttttatttttcacctgttttccgcgttctgtgttccggtaatcctgataccgggcatccatctgtgccttcttttgctttttctgagattttttcttcatatatgtggcagctcctgcacctgcagcgatcgcagcaattccaatcccaacgtgtttttttgccatagtaatgaccacctttccagaaatgtcgtccgattcagatcggatatctttgtttctgcccatatactatgatttttattcatgaaattcaatttacaaatcaggacgtttgataaaatttttatcacggatcggtttttgataaaaaattctggacggaattcgtaatactgccatgtagcgtcagcgccatattgtctacaatttcactgtagtcctccttcatgccctgtttgatccagtccagcatgattcccacaaaactatatttgtaaaaatttgcgataaattctttctgttcctcccgaatctgcattccggctgttttctcttccacaactgctttcagcagatcataggtcagatgaaacagataattttcaatctgttccctgctgacagaatggtatgcattgagaataaacggcttgttttccaaaactgcttcaaaaatctgcaggatgccttcctgccatgtatcataggtctttttcccctgcagcgctctttttgcatcctccagacaggaccattcaaccagatcgtaaatatctttaaagtgataataaaaagccatcctgctgattccgcaatccgatgtaatatcagaaatcgtaatcttgtccagaggtttttgaagcattactttctttaaagatgcttccagggcctgtttcgttgtgttggacatgaaatccctccttatcatgcgttccttccaatagcatacaggataaacatgaactttacgtgaatttttttcaattattttcccgaaaactctgtacagtcagattccggtatgctatactctacctcgcatttatcaaatcagaggtgcattttgccctctggactggttcgtgaacttcccagtataaaaaaccaagtatctcgtaaggtggtctttgccacggaataaaaaagtaaaggagattggagaatgaatgcaaaaaaagtcatcattgactgcgatcccgggatcgatgacgcactcgccctgatgctggcgctgcgatcaccggaacttgagattttagggatcacagttgtctctggaaatgtaccggcaaaaaaaggcgcgtcaaatgcgcaaaaagttctgcactggatgaaccgaccggacattcctgtttatcttggagaagaactgccgcttgtccgtccttatgtggatgctatggatacccacggggaagacggtctcggcgaatctcattaccccgaaatcacagatggaacaatcaatacggatggtgtgggctttcttgcccgtacactgcatgaagctgcccaaaaggaggagccggtttcgatcattgctctgggacctctgacaaacctggccagactggttcaaaatgatcctgaaagtcttgccggtcttggagaactgatcagtatgggcggcagctgccagagccatggaaactgctctccggtcgcagagtacaactactggtgcgatccgcatgccgcagaaattgtatatcgtgcatttgaagaactgcctgttttacaggacaaacagattcacatggtgggactggatgtgacaagaaaaatcgtcctgactcctgacattttagaatatatgtgttgtgtgaatccgcagatgggcgaacgtatccgaaatattacccggttctattttgattttcactggaaacaggaaggaatcatcggctgtgtcatcaatgatccgcttgcagtcgcttactttatcgaccgtactctctgcagcggaatggaagcctgtacgagaattgcaacggaaggtctgtgtatcggacagagcgttgtagacagatttgacttctggaaaggacataaaaacagctatattctgaccaggacatctccattgtcatttatgcagatgttttttgacagagttcttggtgtaccagacaaaacaagcctgcccatgctggaacagatcatgaaaggagacgtattatgagaaaattttcaaccaataaactttgtatcctcgccctttgttcggtgatcaacctgatcggaggtcagatcgcactgctgcttcgccttccgatttatctggattcttttggaacggtgtttgcggccgctgtgatggggcctttttatggaatgattcccggaatcgtcagtaatctgatcggaggcgtgacaactgatatttacgcgctttattaccttccggtccagatgatcaccggatgtatggccggttttgttttccggaaaatgccgcctcatgacggaaaagatctgggaaaaatcctgtttggagccggaatgatcagtattccgggaacgctggtcagctcttctattactgcaatcgtattcggtggaatcacctcgtccggatctacacttctggtgcagctgttccatcatcttggtctggggctgactgcaagtgtatgcatggttcagggattgaccgactatgcagacagagcgatcgttctggcactgacagccgtacttctggcactgcttccttcttccgttaaagcagcagtaaataagtaaggagaatattcatggaaagatacaataagattacaaataaaaatccgcgggaaatcgtgctgttaaaaggcagaccctgtgcctggggaaaatgccgtttctgtgattatattgaggataattcacgggatgttcaggaaatgaacgctctgaatcaggaagtcctctcccatgtcaccggagaactcggtgtattggaagtcatcaattcgggaagctgttttgagcttcccgaagagactctgaaaatgatcaaagaaattattgcggaaaagcagatccaccgtctgttttttgaatcccactggatgtaccggaaacatctgcagaaaatgcgggattatatgggaattcccattacttttaaaattggtgtggaaacatttgataaaaccttccgggaggagtatttaaataagcatgcagattttgactctccggaagaagtccgcaaatactttgattcaccctgcctgatggtcggcatcaaaggccagacaaaagaaatgatcgattatgatattcggatgttaaagacacattttgaattgggaactgtcaatgtgtttacgaacaacagcacggacgtcaaacgggatcaggaactggttgactggtttatgcaaaaatatgccgaccttctggaagatccgtctgtggaagtcctgtatgaaaaaaccgatttcggtgtgggggattgatttgcttttgttttcctgttactttgcattccactgtccgatcacttcattgacagttgaaacggttacaaacacgtccttttttgtggtgtgcagatagttgagaagcagccggtactcctgctgtgcaagaatcgtcacaagttctgtacggtgtttttcatcataggcgccctgggcgacatagagggtggcaccgcgtttcagatcatggatgatataattctgtatttccttataatcatcagaaatgatgcacacccgttttcgcttattaaatccatcaataaaataatccacagccataccgtttgcatacgttccaagcagactgacaatgagtgtcggtacgtcatacaccaggatagatgtcattgctgttacaaatccggacagcatgacagcttttccaagttccatgtgtgcaaatttattgagaatttttgccacaatatctaacccgccggaagaggcattgacatgaaacaacatggcctgtccaagcgctacgatcagagtatacgtaacaagatcaaatacctgattgcctgtaacggattctgtgaccggaatcaatcgttcaaagatccagagaaagattggaagcaggatcgaagtgtaaattgtcttcgccccaaaatccttcccaatcagcaaaaatccgatcacaagcaaaatggcatttagaaagaacgtaaggatcgacatggaaatcccggtgagctgggaaaataccagcgccagaccggaaatacttcccatgacgattttactgggaaccataaaaaaataaacggctgccgatacaatcagcatggcaaatgtgatcactgcaaattcccggactgtgttttttaatttcatgctgttacatctcctgcgtaaaaaatattataatttcgtaaaactccacaaattctcaatctgtggttccagtgtcgcataatcccaggtacggctgcttcgttctttactgtttggatcatgcacctgaatcttaccgtctgccatgcctgtcagcacgataaaatgtccgtctgttgtgaaatcgccctgcttcatactgcagatgatcggatgtcctgcattcaattcttctgtgacagaactttctgacaatgcaatctctgttcctgctactccaaaattcaaagcggcttccgtcatcagactccagctgcttccggagcctgccacataatatccgttggcgcctgcataggatgcgatcttatacggggtaatactgttatctccggtgagtcctgcagctaccatagcaagcgctgtcggaccacatccactgttcgctatgattccatctccataatgaatatacccccaccgttcatcccactggatcaagagcggaatctcaccttcttttacttctccgatggattcagcaggtgcctcatctttcttctccggataatctgccacgaaatctgttgtctctgcattttttgccagaagctccagcatactcaccggataattgcgggaatctgcaagaatcttttgtacttttttatcttcttttgcacgatcagagagtgtctgctgaaattctgctgataaggtgccgtcactgcatacgaaatcatagaccggagtctgcgtattttccgcttcagttttatcttccttttgagccgtattatcagtctgcgtctttgtctgcttttttttctgcgaatcttcttttgacagctgtcctgcgatccaccgtcctgcaagtgccagcaaagcgagcaaaatcaggatacagatcgttcgttctaccagaacgaccttttttctgtcaaatcttctttttcttctttggtatgccatagttcaacctccggtaacagaataccacattcctacaatgctttccatacctgaattaattcttctttcatttccttcggtgtaatctgcttctcaatcccatttaaaatcctgccgctgttgacttctgccacctcgatcttgccataatccatccagacaaaacaggcaaaacaaaggatggaaagtcccagacgaaacaaaaaagagtgatcctctgctgcatcgtcctctgtgacagaagttgtaagatttccatatctcggatgaatcacaggcgtgcttctgcctgtctcatgataaagtctgcgtgtctgtctgagcagttctcttcggcgtgcatctgattcgttcataaaggttcctcctgtaaaaaagacatatgacgggcttcttacccccatcatatgtcttttttttaagaactagaacttatctgtctgccagttcttttacgatatcttcccatgtgacaccgcgttccaccatgagtaccatggcatgatacagaaaatcagaaatctcatatttgatctcttccgggttcggattcttggcagcgatcacgatctctgttgcttcctctcccacctttttcagaatcttgtcaatccccttatcaaacagatagttggtataagatccttccttcggatgctgctttctgtctgcaatcgttgcatatacagattcaaaaacctgaagcggatttttagaatcgtactcatttcctacaatctgccgataaaagcaggtatgatttccggtatggcaggccactccgatctgctctaccttggccagcaacgtatcgttgtcacagtcggctgacagcgcctttacatactgataatgtccggaggtttctccttttacccagcggcactgtctgcttctgctgtaataggtcatttttccagatttgagtgtatgctcaaatgcttcttcattcatgtaggccatcatcagaacctcgttggtcttataatcctgtacaacaaccggaagaagtccgtccgtattcagcgtgaaatcagaaaaactcatcgtactttccagagaagtcatctgaattccttcagaaatgcaatgatttttgaatgcatcgatatcaagtgcaggttcgctgatcagcataccggaaacgcccttgacacccttgcattttaagatttttaaaatctcttcctgttccattgtatcagtcagaacaacgcacggaatctctgtgatattcatcacagaaagcagatccaggcgatgcatgaaaataatctcggaactgaatttgtcgatcagatgctgctgtttgaacaaagcatcaaaatcatttaaagatactgcgatccgttcttttccaaatcgtttggatacttcttcgatcagttcaaacgacagcggtttggaaaaattcaggattgcccgttttgcaccggtgtacagaatctttttcacgtcttcctgtctgcgtacatttccgcctgcaaccattggaatactgatggcacggtttacttttttcatcagatcgatcgcttcatcatgctcgtcatccgtattggacagatcgaatacgatcagctcatctgcccctttgtcacagtactgctttgcaagcccgatcacatcgtctgagatgacttctttatcatcaaaccattttattgcttttcccttgtaaataaagatacaggggatcaatcttttataactcatcgttttgttctcctttataagctgcctttcgtagaccataccccgttcatacgtggttcctccatggttgccatatccagagcctttccaaatgccttgaacaaggcttctgccatatggtgattgttccctccgtctacgatctttaaatgcaggttcatcgctgcgctgtaagagactgcataaaagaattcacggatcatctctgtatccagagttcccagtttttccactgtaaactctgcctgataattcaggtaagggcgaccagataagtctactgcacacatggcgagtgtctcgtccataggaagcagaaagcttccgtaacgcttgatcccttttttttctcccagtgctgctgcgattgcctgccccagtacgatcccggtatcctcgatcgtatgatgggaatccacctccagatctcctgttacgtgcaccttcagatcaaacagaccatgtctggcaaatccattcagcatatgatcaaaaaacggaattccggttgcaatctcattttccccggttccatccagattgatcgtcagagaaatgtccgtctcttttgtttttcgttcgattgttgctgcgcgctgcttcatttttaatccctcttttcaaagcggacatggatggagtttgcatgtgccgtgagctgttctgcttttgcaaactgctcgatgtcctgatgtacggtctccagtgcttcttttgagtaagaaataatgctggattttttcaaaaagtcatctacagacaacggagagaagaatttggcagtcccgtttgtcggaaggacatgatttggtcctgcaaaataatctccaagaggctcactgctgtattctccgataaagatggcacccgcattgcgaatcttggtcatcacggtaaatgcatcttttgtcacgatttccagatgctcagatgcgatttcgtttgccgcgtcgatcgcgtcatccagtgtctcggcgatcagaatatgcccatagttatccagagatttctgaatgatctcacctctggagagctcttttacaaatccgtccacttcccgggatacttcttctgccagctcttcactggtcgtcacaagaattgcagatgccagctcatcatgttctgcctgggacagaagatccgctgccacgtaacgtggattggcagtctcgtctgcaagaacaaggatctcactcggtcctgcgatcgaatcaatgctgacatgaccgtacactgcttttttggcaagtgctacatagatattgcccggtcccacaatcttatccactttcgggatgctctcggttccataagcaagtgctgcgattgcctgtgcaccgcccactttatagactgcatccacacccgcttcctttgccgcaaccagcgttgccggattgactttaccgtcttttcccggcggcgtgaccataatgatctcatccacaccagccacttttgcgggaacgatattcatcagaacagaagacggataaacagcctttcctcccggtacatacacaccaaccctttgaagcggcgtcactttctgtcctaggatcgtaccgtccggtttgctgtcaaaccaactgtactgcatctgttttgcatgataggattcgatatttttcagtgattttcggatgacattcagaagagaggaatccacctgggaataggctttttgaatctcttcttctgttacctgaatattatccgcattaagtgctgcaccgtcaaatttttccgtataagcgaacacggcttcgtcacgtctgttttttacttcatccagaatctcgcggacacttgcttcatacgttccataactgttgggacttcttttgagcagatcttcgagcagattttttctggttgtttcatctaatcgttcaattctcatactgtttccccctccaaaagatttcggatccttccaatcagatcacggatccggtcattctccatccgcatgctgactggatttacgatcatgcgcgcagaaagcggacacacttcttcaagcaccgtcagtccgttttcctttaaggtggatcccgtctccacaatatcaacgatcacttcagaaagcccgacgatcggtgccagctcaatggagccgttcatcttgatgatctctacggtctgatgcttcttattataaaaatagtcctttgcgatctttgggtatttggttgccacgcggatcacctcacgatgctccaaaagctctttggcatcctgtggcccgcatacacacattctgcaggagccgaatccaagatccagtacctcatgtacgttgcgtccttcttccacgatcgtatctttgccgacaactccgatatctgctgctccatattcgacataagtcggaacatccggcccttttgcgaggaaaaactttaattttaattcttcattgacaaacaccagttttctggaatccttctctttcatttcttcacaggtgattccaagctgttccagcatctccagtgttttacttgccaggcgtcccttggtcagggcaaaggttaaatatttcatctgttctccctcgctttcgctttttttctggcatttaccttcttttcttctccggtagagaggtttaccatgtcaatcgtcagattctcgttcaaatacagcatgctgaccgcatgtgtccgttttccgtaagcgataaaggtctcttttgaatcttcctcagtccgtttcaaaagttccatgtattttcctttttcacggaaatcttttgccagtgcaatggcccatttttctgtggcatcggtatagacgatgagattgttgtgaccggtctccacagtgatcttctgtctggacagagcgttttgcagctcatcaatgataatggcaaatccgatcgacggcgtctgctttccaaacttttccagaagatggtcataacgtccgcctgtcacaatggcatcaccggttccgtaagtataggcccgaaatacaatcccggtatagtatccataatgaccgctcatactcagatcaaaggtcacataatcatcagccccatacaatgcaagcagtttataaatcttcaaaagccgtcccaccgcttgttttgcctgatcggtaggtgcatgctcaacggcctttttcagcacatccacatctcctgcgaactccggaagcagacggaacgtctcttttaattccggggaggcatccgcctgctctaagagttcctcgactccaaagaaattccggtttgcgatcagattatagatttcttcctgctgctcttttgaaagtcctgtagcttccatgaggctctgcagaaaatccacatgcccgatattcacctgaaattctttgagtcctacttttttcagaccatctacgaccatggcgatcatctcggcatctgcttccacagaatcgattccgatcagctcagcaccaagctgtgtactctcttttaagcgtccctgataactgctgtgattgataaaggtacttcccacataacaaagacggatcggaaagtcttcggtctcaaacagggttgctgccgctcttgcgatcgaaggagtgatatccggccgaagtgccagtgtatccccctcccggtcaaaaaacttatacagctctctggatgaaatcgttccgatctctttgcggaacacatcaaaatattcaaaagtcggagtctgaatatcctgatatccgtaaagatgcagcacctgatgaagtttatcctgtactgccagctttgctctgcattcattactgtaaatatctcgaactccttcgggagtatgtaacttttgttccataattcataacaccctttcactttactatgctaatacattaaatcattctgtaattatacgaactttcatttcttctgtcaatccctgtcatccaaatctttttgaatataatccagatacgggacaaaacaatgatttttcaaagccataaaatattccggggaaagttcttcaaaccggatacttttgcgcccgccggactgtgcccgtttccagaatttcaaaagttcttcaaatctcatgtaatacaacgtttctttctgactgtaataaataatcagaaaagaaatcccctgctgtttttcatacttctccataaaagaaacctgatgctcgtgaacattctgaagcggaaatgtatctgcggcacactcttttgcgtcaaaacaaatgggaattccctgaacagctccgatataatccacggtgctgaccttgtcaaaataggcaagtgtgatatgacgccgttccttgtcaatccgaaccggagtgatcggggtcggcaccttctggatcagcgccagtcccatttcttcataccgggtatttgtgtaattgatcatatcttccagggtagaaccacgaagtccccttgaattccaggttcccattacaacacccctttttcggctgcaatcctgtaaaactgtttcggaagcggcgctgtaaactctttcttggatacgttgcataaggtttgcgtacataccggaaactgcagtctggcagcatgaagaagctgtgactgcaagtgatatttctgctcgtattcccggttgatctgcgatgctccgtatttgtggtctccaatcagcggatgtccgaccgaagccagatgggcacgaatctggtgggtctttccggtgatcagatgcacttctaaaagcgttacaccgtcatgggactttatcggacggtattcggtgatgatccgtgcacttccaggtctttcctgaaacagtatttctactttgttggtgcgctcgtccttaaaaagccatccttctacccggctcggtttttcgatgattcccgctgtcaggcagagataatattttccaatggtgcggtcatgaaacatctggctgagtgactgcagtcctgccatgcttttccctgccgctacaattccgcttgtattgcggtccagacggttgcagatggaaggtctgaatgtccggagatcctcctctgtaagtgcatggctctggatcagataagaaatcagatgctccaccaaagactcgtctgaccttgctgctttctgggagagcatccccacaggcttattgatcagaataatatcctcatcctcatagagaatgtccagactgacatttgtatagccggaaaacgtttccgaaaatttttgaatcgtttcatctgataaaaataattttacacagtcgccctttgccagcttttcattgccggacgcctttttcccgttcagcgtaatattttttttccggagcattttgtacaaaaaactcttcggggctttatttaagtatttgccaagcagcttgtcaaaccgctgcccggcttcctgttctgtaatcttgatttcctgcatgttttgtaactcctcattacatggagagatttaaaagaagctgtctggtctgcgcttcttcctctccgtttattttggcattttctaccatggcgatcgattccagtccttcgatcctggagagaaaaaccttataatcctgataaaatttcacagtggaatacgaaagacgattctgcgtcatcatatccctgatatgtttggaaaggacgtttaaatcgacctttttgctgtctgtgtatccaaataccgttccgttggagatcaccacacactccaccggcatgattttttcacgggttgtcaggacaagatcgtatactctggtcgtatgcggtgcttttgtatcaacctcatgaaccagcttctgatctacagaagcataaggaaacctggtgataactcccaccagcgcttttgcggcaggaagacagccaagaattgccaccactgtcagaagattgcttcttgtttttgtctgtacgtagcccagtgtaaaaatggcagctacgagcagaaaataaatcacagtccggatgatttctacttttttcttataatccagataacctggagttcctttttcgattcgcttcatttgttcttctctcctacttttttccaatggtctgtacgtttaaaatccaactgaccggaacgatcctgaccagtatgtacagtgccctcatccagaacccgaagattgagactgctttttttcgtctcgcatccagaagtgcctgttttactacgtttggagcctttgccattgtcatttttttgagcggattttcaggttgcccgcaccgctcaaaaaattctgtgtccacaggtcccgggcagactgcagtgacatagattccttttttcttccactctgcgccaagagctctggaaaagctgagtacataagatttggtggctgcataaaccgcaaactggggctgcggagcaaatgccgcagcagatgcaatctgcaggatccgacttccttgtgacagatagggcgcacacaaaagcgtcatgtttgtcaatgcctcgcagttgagacgcaccatctcactttgtgcgggccactcttcttttgcgatatccaaaacagtaccactttttccgaagcctgctgcattcaccagcatccggatatcgggtcttagacgctgcagtgtatctttgaccgtttgaagaaacatcggatctgtcagatctcctgcaaagatgcggaccggaaccgaacaggtcttcgcgatcgcttccagccggtcttttctgcgtgaaatgatccacaattcatccaggttcatatagaaatgcggaatctggcggacaaactcccgccccataccggaggatgccccggtgatcactgcaattttcatcttccacgcctcttttctgtcttctttttctgtacattccgtatggtttttttcttctgttttggtctgcccgttttggcaggctgttcctttttcaatctgcgcgggcggatcagacaattcttttcaaatccgatcagatctgttctgccggcttttttcagcgcctctgcaaccagatcatagttttccggattccgatactggatcaacgctctctgcagggctttctcatgcggatttttcggaacatagaccggtttcattgtccgcggatccacaccggtatagtacatacaggtagaaattgtagacggagtcggatagaaatcctgcacctgctccggcatatatccaagatctctgcagtattctgccagttccactgcttcttttaacgtcgatcccggatgagaggacatcagatacggcaccagatattgctcttttccgattttctggttcatggcataaaactttttcgtaaaggtctcatacacattgttggccggttttcccatcatagaaagaaccggatctgaaacgtgttccggtgccacctttaactgtccgctgacatgatactcacataattctttcaaaaacgtatcatctgcgtccgccagcagatagtcgaaacgaattccggaacggataaagactttcttcactttcggaacttttctcagctttcgcagaagtgctacatagtctttgtgatctgcattcaggtttttgcaaggtgtcgggaacagacactgctttgtcttacacacgcctttggtcatctgcttttcacaggatggatgccggaaatttgcagtcggtccgcccacatcatggatatatcccttaaaatcaggatcctgcgtgatctcctttgcctcctgcagcagagattcgtgacttcgtgtctgtacgatccgcccctggtggaaggtcagtgcgcagaagctgcatccgccaaaacagcccctgttgctgatcagactgaacttgatctctgcggtcgccggaactcctcccagtttttcataatccggatgggcacagcgggtaaacggcagtgcatagacatcatccatctccatctgtgtcagcggttttgccggagggttctgtaccacatataaatgttcggaatacggttcgaccagacgttttccggaaaatggatccgtattacagtactgggtgtaaaaacttctggcataagaaagcctgtccgcttttaattcttcaaaagacggaagcatcacggcatcataaaccgaatccagagattttgtcttgactgttgtcccgctgatgtaagtgatatctgacacggcaattcctgcatccagggcttccgcaatctctacgatcgagtgttcacccatcccgtaggaaatcatatctgctccggagtccagaaggacggaacgtttcagccggtcagaccagtaatcatagtgtgcaagccttcgaaggctcgcttcaattccgccgagaataaccggcgtctgtttgtaggtctgacggatcaggtttccatagaccacggttgcataatccggacgcctgcccatcactcctccgggcgtataggcatcggattttctgcgctttttggagacagaatagtgattcaccatggaatccatattgccggcagatactaaaaatgcaagccttggctctccgtatatggtcacactgtctttgtccttccagtccggctgggaaatgatcccgatccgatagcctctggattccagaagtcttgtgatcacagcaggaccaaaagatggatgatcgacatacgcatccccggtaatatagacaaaatcaacccggtcccatcctctgtctttcatatcctgtctgcaaattggtaaaaacctttctctcatgtatttatactccacatctttcatatgtttttgcttggatctcatcataactgcggataaaatagtccgccttttcttttttctctttttcatcacttgccgagaatgcatcatccactgcacacactgtcattcccgcattgcgcccggcttcgatcccctttggaacatcttcaaataccagacactcttccggctgtacaccgaggtcctctgccactttcagataaacatccggtgcaggctttccttttttcacttcacatccggtgcgtacagaagaaaaatactcccggatctgcagcgcgtccagagcggcaagagccagctcctttgcattgctcgtagcaattcccatcaggatctgctcctgttttaaaaattccagaaatccttttgcccccggctttagctccacttgggtctgatacagatgcagtgtcatatcgatccactccttttgcacatcttccagcgaacaggagagctctggaaatacatccagaaaatactgtgcggtctctgtgtagctttttccctccaatgccttggcgaatccgggcggcggggtcagatggtatttctttaaaaagatccggtccacttccggccagatccacatggaatccgtcagcgtcccatccatatcaaaaattactgctttttttccactgagcatagtgtatccttctctttctctgtcaattcccggtattcgccgggcatcaaagtttcatccagctgaagcggtcccatactgagcctcttcagataaatgactttcttaccgactgcttcaaacatccgcttcacctgatgaaacttcccttcgcagatcgtcagaagaatctctgaaacttctcccgactttactacctccaacactgcaggagcagtcagctttttctcatggatatccacgccttctgcaaatttacggacatcttcctgcgtaacgatcccctgcactttcgcataatacgtcttatctacatgctttttcggggaaagcagccgatgcgccagttccccgtcattggtgatcagcagcaacccttcggtatctttatccagacgtcctaccggaaacagatcctttcttttgcgggaaacaatcaggtcgatcaccgtcttttctctggcatcctctgttgccgaaatcaccccggcgggcttgtgcagcatataatattctttttttgtgtagccgacggtctgaccgtcgaatacaacggttgtctcttcggtatcgatctttgtttccggctttttcacacaagcgccatccacagacactctgcctttggaaatcgcccgctttacttctgttcttgtgcccactcccatatctgcgagatatttatccagtcttatcttcatctcttttcatccttatgactgccagcgccagcccggcagatatttgtttttcagcgtctggtttgccagttttccgaatccgagcggatatccgtccacacagaccagataccatcctttctccttgcgggagacaagatcttctacatccagagtctctccttttaaatatttgatcacacgttcatcctgtacggacaaatccagaatattggcatactcttcttttttcagtgacattgcaaacgcctgactcggttcaaaccgctttttcttaagttctccgagcagcaatccggttcttaaaaagcggacaccgttcagctttggaagtcccttcggcatatagtagactctctctccatggatatccagtcttgatgcttccggtttccaggaaacgttccggaaaaactcttccagctcttccggcagttttccgccttttttagaatccttttctttcagagcaatcggagagccttccccctttttcaacagtgcaagataatgtccttccccttccattcgatgcggaaaaatccggactgtctttgcaagatttgggtttttgctgtctgtcacttccggcattcccggtgcaaagccttcatatcctgccatctcacaaatctcaaactccggatattcttccagcagatattcgatggtctgctcattctctgacggatcaaaggtacaggtagagtacagcatcattccaccaggacgcagcatggatgccgcctgcgtgatgatacttcgctgaatttttgagaaaaactccggaccatgctcttcccatgctttgaccatctttttatcttttcgaaacattccttctccggaacacggagcatcgatcaggatcttgtcaaaatattccggaaaatactcggtcagcttgcccggctcttcgctgagcaccagcatatttccgattccgaataattcaatattcttcagcagacctttggctctggaattgctgatgtcatttgccatcagaactccttttccctgtaactttgccccaagctctgtcgcctttcctccgggagcggcacatacatccagcacccggtctcccggctcgatcaaaagccggtctgccggtgtcatcgcgcttggctcctgcagataatacagtcctgcaaaatagtacggatgctttgccggctggatctgatctccgtcataataaaatccatttgagatccatggaaccggacgcagcggccatggagcgattttcaagaaatcctccacggaaattttgtttgtattaacacggagtccgtaatgacgcggctcctcatagcattttaaataatcctcatattcttcacccaaaaggtgtttcatcttttcttcaaatgtatttggtaaattcatattcattcctccacatgaacatgattataccataattcctatagtaagactacctggaatacacacattttattctggcattttctgcataccgcagcaccggatacggatttacactgatttcttccgttccttctttcagataaattccaaggtggagatgcaccggaaactcccccgttgttccctcctctccatatccgctgtcccccatatagccgagcagatctcctgcctttaccggatctcccttctcaagctccgcataagaatccagatgtgcataataaaaatacgctcccgtcggtgccgtgatcccaatcctccagccgcccttttccagccagcctttttcggttacgacaccatccgtcatgcttacaacaggataatacccgggcgtatttttctctgccataatatctgttccctcatgcccccgttttcctccgtaatttcgttcaaacatccaggaatcaacataagaaatcttatcctcggtatcatccagagactgcgggatggggaaatattttacatcattccagattgccctgcatgattgcacataagcatcccagcccgtttggtttcgccattggcggtacagcttctgaaatccggaaggtgagacttttcctggaaatctgcggttttcaaagtctgttgccatccagtagagtcccacgtcccgtcccggatctgcagcctgtttcaaataaacctgcatggtttcagaaacaggctgcctgcgaaaatcaggctgagataccaccggtttttgaagtctctgaaatccactgacagaaatcaaaaccccggtatttaatacggcaaaaaatgccagaagaaaaattcccgcaaaatagctgatatatctgtgacgcatagaactttctcccgttggatgtttcaaattatcgtatgccggtttcttctaaaactttccactgataaatgtcccatatcgtcatatacatataacaacaagtgaatcggagttttcctatgagaaaaaatctggccggaatcggagttctgatctgttttgcctttatgcttttatttccaaaagatgtatttaatggagccagcaaaggtctgctgctatggtttcatacagtctttcccacactgtttccctttttgatcatcacaaacctgctgatgtccaccaactgcatccgtctgattgcccgcctgttcggccctcttctgaacaaaatcttccgggtctctccaaacgggagctttgcgatcattgcaggctttctctgcggatatcctatgggcgccaaaatttccgcagacctgacacatacaaaacagatttcaccgcaggaaggagcgtatctactctccttttgcaacaatacaagtccggtctttattttcaattttgtagtctggaaaacactgggaaaaagcgaactgatgattccgtccatcctgatcctgacagctgcgcccattctggtcagcttttttacgagaagaacgtatttgaagggaaaacaggcatttcaggctccggattcaggctggcagaaaaatacgttctggtcctttgacattttggatcactgcattatggacagctttgaagcaatcacaaaagtggggggctatatgattcttttctccgtgttgatcgcactgtcagaaaacctggcatcctgctttccggcggttcaaattcttctgccggttttggaaatcacaaacgggattcagttgattggaatgtctgccgtttcttttcctgtaaaatacattttggcgctctctctgacagcattcggaggcatatgcgctgccgcccagacacagtgcatgatacaaaaagccggtttttcaatctttccctacataacacaaaagctggctaccgctctggtaaccagcctgcttggcatcttatatcttttatgcttcgcctgagaactcctgtccttcttccggagtcggagactctaattctgcacgattcgtgcggacaacatcataacactcctgaagggagttgatcagtccgtcatattttgtcgtatagctgtctaatgtatgaccgataatactctctgcattggcaagcagatcatcggtatactggatcgcacccatacggatctcatttgcatccattgttgcattgtcgatgatctcctgagcctgtgcggtcgcctgtgtcacgatctcatttgcctgtgcatatgcctgctgcatgatctcatgctcactgacaagctctgttgtctgtacctgtgcttcttcgatcatcgcatcggcttttgcttttgcatccgcaaggatcgcatcccggttgctgatgatcttctgatatctcttgatctcatccggagtcttcattctgagttctctcaaaagctcatccagatgttctttatttacaataatctttgtcgaggataacggctgaaacttacaatctttgtcaatgtactcttcaatctcctcaataatctgttcaatacggctgctcatagttacactctcctttttgctttcatcttcgcttccaactctcctgctaccgcttctggcacaaactgtgatacatctcccccataagcggcaatctccctgacggttgtagagcttaagtaagaatattcgatactggtagtcagaaacatcgtctccagatccggctccagtttatggttcgtctgcgacatctgcaattcatattcaaaatctgtaattgcccgaagtcctctgatgatcacaaaggcatccatctgacgggcaaaatctatcaaaagtccgtgaaatggaacaattctgacatttgtcagatctttggtcgcttcctctaacattttaacacgttcttctacagaaaacaacggcattttcgcattattattcagcacaccgacaaccagttcatccacaattttacaggatctgcggataatatctaaatgtccgtatgtaacagggtcaaaactgcccggataaatggctcttaacatatcatttcctttccagctttctcaatgaaaacatgcttgttcgtcttgtattctttctctttgatcagtgtgaagcccaaatcttccagataagaaaagtccgtatgctttgatgcttccacaatgatcacggtatcctcataaatcagttcggaaccggacagatacgtaagaacctgtctctccagatcctgatcatacggaggatccataaatacaaaatcaaacactttctcgccttccagctgatacagagctgtcagaacatctctcgtcatggtcatcgctttctcagaaagctttgtatagtttaaattttctttgacacaggccatcgcttttggattcttttcgacaaaaacagcctctttggcgcctctgctcaatgcctcgatgccaattccgccacttccggcaaacaagtccagaaaaacgcttccgaaaacagacggcgcgatcatattgaacagtgtctctttgatcctgtctgttgttggtctggtctccattccgtccaaagtttttaactgcagtctctttgcagttcctgcgatcactctcattgcgcacctccactttctcaactatgctgaattttagcagaaaaaagcactcaggtcaatcccaagtgcttttttccgcctgatttcgcattggcaacagtgactgcttatttaccggccatctgtttttcctgctgctcgatcattttctttaccatataaccacctacagatccgttctgtttggaagttaagtctccgttgtaaccgtctgacagcggtactccaagctcgcttgctacctcgtatttgaatttgtccagtgctccctttgcttctggtactgctgctcgattagatgaacgacttgccatgataatttcctccttttcgtaacttcttttgttacctctttttgtagttttataacctaagcccgggccgcatcgacatgaaagttgctgcattgtgatgcggctcgtctcatgtgtctgcattccgttcgcttgtgttacatccatagtatatggaggaattttatttttaatctggtaagttctggtatttttaaagtgtcatttctaacatcacatctgacagatagtgttttaagcgatcggccagccgccggtttctttctgatttcagtccgggatccgtccgcagcagttctcctgcagcttcggcagcttgttttaggatcagagaatcctggaacacatctcccagtttaaaatccatcagaccgctctgccggattccaaagagatcgcccggtccccgaagtcttaaatcttctcccgcgataaaaaatccgtcattggactgattgaggatacccagacgctcttttgtttcttttgatttggaaggactcataaaaatacagtaggactgatgtcctcctcttcctacccggccgcggagctgatgaagctgagcgaggccaaaacgttctgcattttcgatcatcataactgttgcattcggaacatcaatcccgacttcgatcaccgtcgtggatacaaggatctggatctcatttttcccgaatgcttccatgatctcatctttttgtgcctgcttcatttttccgtgaagacaccctactttgacagactcacccatgatatcctgaagcatctgggaataatcggttacattttctgcttccagcgcttcactctcctcgaccatcggacagatcacataacactgtctgcctgattgcacttgctttttcataaatgtatacgctgtattccgatatccggtatccaccacacaatttttgatcggaagtctgtttttcggcaattcatcgatgactgaaatatccagatctccgtagaggatgattgccagtgtccgcgggatcggggtggcgctcatgaccagaatgtgaggcaacactccttttcctgccagcgtctctctttgtttgactccaaaacgatgctgctcatctgttaccaccagcgccagattctgatactgcactttttcttgaatcagtgcatgagttccgatcacaatatctgcctctcccgcttcaattctggcataagcctcccgttttgcctttgctgtcatggaaccggtaaggagctccgttttcaacgggattccgtatgcttccagcattccgctgatattttcataatgttgtctggcaagcacttctgtgggtgccatcatcgcgctctgatatccatttaagccggtatacatcaaagcaagaagtgccacaatcgtttttccggatcccacatcaccctgtaccagccttgacatgacagattctccggagatatcccgcaaaatctcctgccatactttcttctgtgcgcctgtcagttcatagggaagtgcgtaaagaaattcgtccaccttcggctgatcacagaatccataatgattcttggcacggtcttcccgttccttgatcattcgcagggaaagcacgaaaatcaaaaattcttcaaatacaaagcgctttcttgcttcatagaattcttcttttgtctctggaaaatggattccttccattgcagttcttcgatccagaaggtgatatcggcagatcagctcttccggaagaaattcccggattccttccacctgctccaatgcctgagcgaccgctttttttactgcattattggtcagtcctgccgtcagggcataaacgggctgcattgtatttcttttttcctcgtaagaggcactgggatagaaaatctccggatgctccatcaccagtgcgtcctttttgcgcacaatccttccgcgcagagtgatcacgccgccccgccccagtgtgttgcgaagaaacggcatccgaaaccagatcactttcaaagtgccggtcatgtctttcagatagagtgtggtgatctgcatttttttattctgactgacctggatcctcccgaagatcgcgccggtgacagtgactgtctttccctcctggatctctccaatggaaatcggatcttcatagatatcataggtcctcggataatacgtaagcaggtccccaatggtatggacacctgcttttataaataattgttctgttttttcaccaacgccttttaagacgctgattctttcagattctctcataaatgaaacaacttcctattctacagataatacgtagtagtagatcggctgtccgccgcagtggaaatcaacatctacatccggatagatctcttcaatctcgcctgcaaaacgctctgcatcttcttccagaacatcctgtccgtaatacagactgatcagttctgtatcatcatccacaagctgagaaagcatctcttttgtcgtctgctctacagactgaccgacagaaaggattccggcatcaccgattcccatgatatctccttcatggatttctttatcgtcaatatgggtatcacgcacagcgtacgtaacctgccctgtctttacattcttgatctcttccagcatggtctccatgttggtatcgacgtcctcttccggcatatagttgatgatcgctgtaattccctgtggaactgtctttgtcggaatcacgatgatatccttgtcctttgtcagatcttttgcctgatttgctgccaggacaatgttcttgttgtttggcagaatgaagatgtgatctgcattgaccgcatcgatcgcagtgagcatatcctctgtacttgggttcatcgtctgacctccttcgatcagataatccacaccaagttctctgaaaatctcgttcatcccttctccgatggatactgcaataaacccaaccggcttgcgaggcgcttttttcgcctgttctgctgcaactttttccgcatcacggatcagcttttcctgatgctcttctctcatgttgtcaaccttcatacgggacaactgtccgtatgtgagtcctttttcaaaggccagtcccggatgatttgtatgaacgtggatcttcacaatgtcttcatccgccacacatacgatggaatctccaatggactccaggtaggatttaaactccatttcatctgcttctgtaaaggccttatctgtcataatgataaattctgtacaatatccgaacttgatgtccgcttcagcctgcgcacctgctttggtcatctttgttcctgcacttgcttcgatcgcactgtaatcgatctctttgccaagaaatgcatcataggcgccatgtaacacttccagaagtccctgtccgccggaatccactacgccggcttctttcagtacaggaagcatctccggtgtctgatccagcacttctttggcatatgccagaactgccggcaaaaactcttccagatcatctgtcacctctgccatctcagctgctttctgagcgattccttttgcaactgtcaggatcgtaccttctttcggtttcatgaccgccttgtaagcagttgctcttgcacgctcacatgcctgtgcaagtacaatcgtatcgatctctttttcttcccggatcgtctttgtaaatcctctcagaagctgagaaaggattactcccgagtttcctctggctcctcgaagagaaccggaagaaatcgcttttgccagagattccatatccggtctctccatggcgctgacttcctttgcagctgacatgatcgtcaaagtcatattcgttcctgtatctccatccggtacagggaatacattcagttcattgatgaattctttttttgcctccagatttgccgctcccgccagaaacatttttgcgagcagctctgcattgatcgtttttgttgccacagcaaatatcctccttaatctatcactctgacaccttcaacgaagatgttgatcttatctacggtcatcccggtgaattcttccactttatatttgacgttgttcatcaaattatcagaaacagaaagaatatttactccatatgcaacgatcacatggaaatccagaaccaggatattctcatctgaaatatccacatggatcccatgggtcagactttctctttttaacagccgcacaagaccatctttcatgttcacgacagccatacctacaattccaaaacattctacagcaacagagcctgcgtatttagcaataacttccgggctaattgtgataatcccaagctctgtactcatactacctttcatcatatattacctccaattcttaatggatcttcgcacaattaacattcgtattatactctcattatccggattttacaatatcgattcataaagtgctgtcaaaacattcaaaatctcgtcctctgacatggccgaactgtccaggcacagatcgtactgggacatctcttcccacttcttgtctgtatagtagttataatagaattttcgctgtttatcgacctttttgatcagagaaagcgcctctttttcttccagagaggtacgctccatcactgtctgaagcctgtagtccaatggtgcatgaataaaaatactccgggatgtcgggcgggatttcaggatatcattggcgcatcgtcctacaatgatacaatcctccgtatctgccagacgtgtgatgatctgtgcctgtgtgtagaacagcacatcgttcatcggttcaaaccgaaaacggctttccatctgcgccggatcttctaccgggtaacgccatggattcgctcttttttcatctactttaaccagctcatcataagaaatatcattctgttcactggcaagcttgatcagttctttgtcataataatgaattcccagcttttcggataacttctttgcaattctgcgtccgttgctgccatactgtcttccgattgtaatgatacgtctgctcataatcattccccgctttctgcctgtcatcaaggcgtttgaagttatttgaagttactttaattttatcatgaaatgaaattgatgtgaacaaaaaacccgatagaattcacaaaaaatcccatatattgattttcacaaaaaagaatttcaaaaaaagacttgcattcagagggggtttctgctagaataacagtgttgtgagtctgtataagactatttcagattgttaggaggtgcaatgatggctaaatgtgctatttgtgaaaagggtgctcacttcggaaacaacgtaagtcactctcatagaaaaacaccaaaaatgtggaaatcaaatgtgaaatccgttagagtgaaaacagaaggcggagctaagaaaatgtacgtttgtacttcttgtttaaaatcaggatgcgttgagcgtgcataatctgttatatgacgacacggaataaaaaggcttgatatttactttgtaaatatggagtctttttttcatgctttactcgccagaaaaaacagatgcccagccggacacctgctcttcatttacaaaacagacaatatcctattaaaagcaacgcagtaatgatcgcaatcccccatggaatactcgataacaggagcatgatcagcattcccactgcgacgaaaatcagcgcaaatccgatcacccgtttcaaaatacatcacacccaccggccctcttactgcaaatatatgacagatatttcaaaataatactctgattttatacgttttcttctttttcagcagaatctaaaatctctgccacatctgcttctgttactttatcttcttttttctctgtaaaacggtccaccagatccggtaccatatccagaatttttgtcatcgtatcctgatttctcacatttacaagcttggtcgttccattcttgatcacaagaactgcactcggggtaatctttccaccgattccacccattcctttttcgcgtttttcagcacgaaaagaaccggctccgattccaaaggaaacatctacaagcggaagaatgatcgtatcacccacatgaattgcgtcaccgacaaccgtcttagatgagatcactccatccattccctgaaacaatgcttccacagtcgatttaaaattgttgttattctctgccatttgctgttttcctcctttggctttttggttgtattctaaaagcgtaattttctgatatgggaaatcgtcgtgcggatattcttgttccacagcagattccatagaacaatcacaaaataaacggcatgcaccctccccttgatcatggcctttcctttgagcactttctcgtcaaaattcggagtgatctccacacattctccgataaacggatagataagactcgctcccgccagaacatatcctgtgacagaagggtctgaaaacccgaattccagatctgcctcacactttgacggcttcaaaaagcaaaacaaacgtcgaagctctgtgaggcatttcataaaagctgaccgatgaatttcatccgtaagaaactccatcaatctttcctttttttctgccagtgatttgagcatatcacaaattttatgaaaagtacattttatctgttccgctttttgagaaatccgctctccaagtcccggtcttgaatcctgtttctttttgttttcggttttcttatgttctgttattttcttttgtattggttccggctgttttttaagttgttctgaaggctcttttttctgtatacttttttcagaaggcggagacttcagcgtttctctactctgagagttcttctcttctgcccgggaaacaggtagggccgcctgttcgggctgatccgccagaaaccgcttccatgcgattcgaaacttccattttaacgctccgccttggtacgacacctctccttttacaagggaacacagccaggaaaacttcagtaaggcgaacaggttttcccattcaccttcccccaggacatctccccgatatctgaccggtacaaacagaaagatacctgccaacaggatcagtattcccaatattaccagtaatatccagcctatgatttttaaaatcaacagaagtatatgtatcatatgattctacacactgccttccccagattgtttctgattatttaagatgaactctcttagtctgacatcatttgttttttggtacacatcctgcacgatttcttctgtcagctccagtgccccttcgtatccatccgcgagaccgactacgaacagcccagcgtcctcaaaaatatgctgcttcagcaacaatacagagaaaaattccagtggattttgttttccctgggctaacacgatcagataaagatcctttcgaaaccgtttctttttcaagccctcaataatccttttttcacgttttttcagagaacggcttacatacaattctctataaaactccatattcatgcagtctgtcatcccctttatgcttgttcttttctattgataataataagaatccaacacctgctttgcaattggaactgcttttgcaccggcatttccgtcatagccctcgatgatcacactgatgaccagttccgggttgtccagattcgtaaagcctacgaaccaggaatgtgttttttccccatctgtcatgctgtattctgcagttcctgtttttcccgccacggaataagactgtccggaaagcatcgtggcagttccttcatccacaactgcccgcatatagtctttcaactgtgatgcttcctccgatgtcatcagttttttataacttttcggtacatttttccgaatctcggttcctttatagtttgtgactttatcaaccagatatggttccattaaagttccgccatttgcgatcgcctgtgtgatcagtgccatgtgatacgggctgaccaatgtgtttccctgtcccatagctgtcatcatcatctctccgtcactggtattctcatccactacaaacgagctttttgaataatccagcacggatggcagttttttgttaaacagaagctcttcggccgtcgcacggtaagaattccgatccagcatcagaccaatgtttgcaaaggaagagttgcaggagtttgcaaaagaactgcgcaagtcttccaatccatgtaccgtactgtcaaaacatcggatcgtgatgtcttcataagtgatcgatccttcacaattatagctgtaattttgatagtccggatgttctcgcatatattccagtgcagtcacgatcttaaaggtagatcccggagcatatgccccttgagtcacccggttcagaagcggactgtaagtactgtctgcatttaaggcttcccaatcctgcgcgattgtattcggatcataggacggtccggacaccatggcaagaatttttccggtgctggcctccataaccatgatcgcgccccgattttctcccaatgcattgtatgccgcctgctgaagccccgcatccaatgtagttacgaccgtatcgccatgatttttttcatccttaaattcgttgagaaatttttccgcaaaaaatgcattggacgtcagaagttctgagttttcgatggattccagtccgctttttcctgcggtctcattgctgtagccaacaacatgggcaaatgctgccccgtacggatagactctgttttctgttccgccctctccgacctgtgtctcggcaagaacttctccgtctctgtccgtaatgcttccccggatgatccggtctgcaaaggcatcctgtcttacattatacggactgttgacgattgtctttgcccggaacacattaaaatagacaatataggagatcagggcaagaaacagcgtaacaaacaaataggtcatcttagcgaactctttgtttcggaacttcttcgaagcctggctctttggttgtctttttcttctttgtggttcttctcttcgtgccatttcttaactctctttctctctttctttccagattttcttcctcatcttctcttaaaatatacagaccctgtatgatgccgaacatgatcatcgtacttaaaattgagcttcctccgtagctgacaagaggaagagttacgcccgtagaagggataaattttgtcactccgccgatatttaaaaatacctggaaaatataacaggttccaagtcccagtgctaccagtttgtagaactgattgcggagtgccagagcaatgtttaaaaacatcacataacagctgacacacaccagaatcagacacagggaaagaatcagtcccatttcttccgaaatcgcagcaaagataaagtctgtatcagctacaggaatctcatccggaagtccctgaaacagccccattccaaaccagcttcctgtgccaatggcaaacaaagactgcgctacctgatatccgccgtcactataggttgcaaacggatctttccatgcagctacacgtacctgaatgtgcgcaaataaatggtatgccagtacggcagcgaccgaaccgcctccgagaccggctgccacataaagaggctgtctcgttgccgtgtacagcatgaccagatacactacgaataaaatcaatgccgtaccaaggtctgtagaaagcacgaggatcagcacatgagctgctgccagtgctgttgtaatcacaatgttcttaaactccaaagaacgatttaaatttgccgctacaaaaaatacaaataaaattttcacaaactcggacggctgtattccgaatccggcgatcgtaaatccaagctttgctccaccggaaacctctgccagaacggcaaccagaaccaacgccagaatcccggctcctgcatacatatagccccagtcttttaaacgatccagcttacggatcacaaccggtaccaccaaaccgatcacaactcctactgcggcgaagatcagctgcttgatcgcattttcttcttccagtctggtcagcatgatcatcccgatacaaagaagcatgcacatattattaacgatcagcttggacaccttcggatataaaatccggtacaacagaatcacagccagaagaaaacccgcgctggctgcataaagagtcagtattttgggatcatccttcttcagatacatgaccacatatgctgtcagctgaagtaaaaacatcagcacattctgccggatcaggatccatttctgctcgctctcataattatgtgcgaaaatagagaaacacgaaaacgtgtaaattcccattaaaaggatcataagatattttgataattctactatgatgttaaccacaatttcacctgcttttatgttattccgcgtctgaaatgaccgcgcgtaaattcttctcctgacattcccgataccgcattccgggtattcacagcaagagccgcattcaagatgcgagtcacctcgctgcctgtctctgtcgaaaactgcacacggatgcttcttggatgcatcctcatccactcttctctttcatcaaacaacgataaaggagcggaattgtaaacaatattatagcaaaatccgcagtgatttttcaccgggaactgttttcctctgcgatccgtcagtgttatcgtgaccgggtggtgtgtacagccgtttgttgtcttcaccacacactgcgcagatgtcataaccggaattcttccatagattacaagttcactttcctcaagtcccagaacattcagctcctctgcatttaattccatcggagctgtaaacagttctacaccgttccttttccagaattgccggctgtattgattgaatacatacagattatgatccagaaggatcgtcctgtcaaatccgtgttgttttaaaaactgaaaactctcacagtttctgatcaatacaccgtcctgtgcgatttccagaaaccgatcataatgttgttcaaattttcgaactgcatcagcccggaaaatatggggcattgccagaaaaatcttggcactgcttcttttcgcttttttacagaggtgctgcagtctcgcatcttcaaataaatcctgcactacattactgtcaatataaatccgttctgctgcctctgaatccagcacactttccagctgttccaaagtctctgtcagaacactcagcagtacaccttccgttttcttttcttctgagttttgtttcagaagaggttgttccgtggatgtccggcggaacttcccgcatatctccagttctaatttttctaatgcctgccttcttaattcattgagctgctgcattggaagaaacacctttccttccagatcaatctccagatgttcaaatacaaattctgtggctcccgtcttagaaagttgcttttggattctggacacctccatcggctgattctgtgcctcctgcacagtctgctcggaataaacggtaacgcttatatcttctgtccagactgtcagcattgccggttctcccactgccgcacgcaggtatccggatatctgctctttcgttgccccttccagatactgttctttcatctctgtcatcagtttctggttacggattcgatttagaatctgtcctttttgatattgttcctttttgggaaccagaatcacagtctttgttccctttggaatctcttttccaaaagagtaattctcacgctgcagattcaactccaggagatctcccttgtggatatccgctaaagtctccaccgtcagttctcttcctttctgtgagagcacacgtgccgcaggtactcctgcatggttcgggcgggaaatggcgatcatatcccggccgtttcgttctttataataaccctggctgaatccgccccgattatacagatccatcagcgcttcccggtctgcctgttctacccgatatccactttttcccttttttagatacaaatctgtatacttccggtaaatcgatgtcacggccgctacatactcgggacgcttcattcttccctcaatcttaaatgaatagacgcccgcctcgatcagctccggaatcaaatccagagtacaaatgtcttttggactgagcacgtattcttttttgctgctctgatccacactgtacgggagacggcacggctgggcacactgccctctgtttccactgcgtcctccgatcaggctgctgagcaggcactggccggaatagcagtaacacaatgccccatggacaaagcactcaatctccatccctgttgcacgataaatctcctgaatctcttccagagaaatctcccttgccgggaccactcttgtcactccctgactttgtaaaaactgcgctgccttgacattaactgaggacatctgtgtacttgcatgaatctccagatccggaaaatcatgccggattaattcaagcactccgacatcctgtacgatcaccgcatctaagccatgcagatacaagggttccaaatagtcatgaagtgtctcgatctcccggtctttcagaagtgtattgactgtaagatacacttttcttccatggaagtgtgcataatcaatggcctgctttaatgtctcttctgtaaaattgtctgcgaatgcgcgagctccgaatttgggacctcctgcatagacggcatccgcacccgcatggatcgcagccagaaagctctcataggatcctgccggagataaaatctctacctgtggttttttcttttcttctatcaatcaataactcctttttctatttacataaaaagagggccaaacaaaagctgcttgcttctgcagtctcttgggcaccctcattcttttactttctgcgattcttcatctctgtttccagcttcacgatctgcatctgaagatcgttgttttcctctttcatcttagcgagctctttttccgcattctccaacttgatctgtacggaaattaattcatgctttaagtcatacatctctttatctttcagttcgatgtcactctccagtgaatctccctgcttctttgccttaaaataatcatctgcaatattcagtgccaaaagtacatttctggtgtctgcactctgcttgcggtaaccttcgctgttggcacattctgttatcttatggttcagataggaagatactttctgcagatactcttcaccctcaaatccacttagcgtatagacttttcctccaattaaaacttctgtaaaatgttttgctgaactcatagcatcctccttggcatttcttatctgttattataaactatctgcaaacaaaaaccaactgttttttgaagtttctgtgtgaccgctcaccttgaaaccggaggaagaattccaagatgccggtatgccagatctgtcacaactcttcctctcggtgtacgctggataaatccacacttcagcagatatggttcgtatacatcctccagtgttccggaatcttctgaaatgctggctgcaagcgtatccagccccaccggacctccctgaaacttttcaatcatgacctgcaggatcatccggtctccgtggtccagtccataacggtccacatccagaagatccagtgcataatttgctacttcttccgtgatcacaccgtcatatttgacctgtgcaaaatcacgcacccgctttagcagacggttggcaagccgcggagttcctctggagcgtttggcaagctcaagcgctccttttgtatcaatctcgacattgagcactctggccgaacgcttgatgatcgtcatcaactcttcttctgtataaaactcaagacgattcacaactccaaaacgatcccgcaggggtgcggtgagcatccctgctctcgtagtcgctcccaccagggtaaacttcggaagatccagacggatcgaacgtgcggtcgcgccctttccgatcataatatcaatcgcatagtcttccatcgccggatacagcacttcctccacctgccggttcaatcggtgaatctcatccacaaacagcacatcatgctcctgcagattattcaaaatagcagccatctctcccggcttttcaatcgccggcccggaagtcaccttgagattcacccccatttcattggcgatgattcctgcaagcgtcgtctttccgagtcccggcggtccatagaacaatacatggtctaacgcctcgtctctttcttttgccgcccggatataaacttccagcatcttcttcgcttttgcctgtcctatgtagtccgaaagaagctgcggccgcagatgattctctatcttcgcatcttcttccagattttctgttgtgataattcgtcttcccatatgcttcctctactatatctataacatttttttcaatgcttctttgagtacgtcttccacagaggtatactctgtcacctggcgtactgccttcagactctcggcattgccatatccaagagccactaaagcctgtactgcctctgtctggatatcaccgtttcgcccatctgatggaatctctgcggcggctgcgcttcgcggctctaacatctccttaagatccagcttgtctttcaattcgatgatcagcttctcggctgtcttctttccaatcccgggtgctgcacagattgccttggcgtcacctgacaataccgcaaacttgagttcatccgccgagagacaggataagatattcagtccgccttttggcccgattccgctcacgccgatgaccagtcggaacacttcaagatcgtctcttgtcagaaatccaaacagctgcatcgcatcttcccgcacattcagatacgtgtgaatctttacttcacatccaatcggccccaaaagactcagggactgctccggcatataaattccgtatcctactccctgtacatctacgattgccttgtcccgttccaagcctgccagttctcctctaatatatgaaatcatagcttctgtttccttttcttctatacttattctgcttttttcaaaaaagcagtccttttgagtacttcactggatacaattccaatcagaagccccgttaccagccccgatatgagcaaaaccgggaaatagtacccgacctgataggtctctacgatcatcatcgcgagcaacagctgcccgatgttatgaaatacacctcctgcgatgctgactccctggatactgaaaccaccggtcttacgaagcaacaccatgatggcgagactgaaaacgccccctgccatactgtagagaatcatactcagattcccaaacaaaaatccggacagcagaattctggttacagataaaagaaacgcttcttttcctccatatgtatacaaaacaatgacgattaccagatttgccagccccagttttatcccagggattccaaaagaaatcgggatcaaggtctccacatagctcaaaataagcgccagcgaagtaaacacaccaaaatatgctgtcttattcttcatctgtcctctcctgtttttaaatgttaattcacgattccatccagttcactctctttactgccctgtacactcactacgacctgattcggaagacagatgatactctctcccgtcctggagattgccttctggtgtacgcagagctgatccggacagtctgcccactccatcttcgcctgtccattctgaatacgcagacgattcccatcctgaatctctatcgtctgatcctttgccagtgaatacgtaccatacacttctccgtctacggtgacaactgcctcctgtgcctcttttcctgtcagcaaaaaaaatcccgcacacactgctgctaccaaaagtatgcatccaatcaaaatataatctcgttttttcatagttgtatcctttcagagttttatcatagcacactgcactcaggaatgcaaccattcattcgaccatatgttcgggttgcattcttttacaaaaatctccggatcgggatggtaatcacccggagcactgcataaaaaatctttttctcggtggacatttcacgcggatgataattctcttcataatgatattctccgctgtccgtcattgttctgctataggttttgtcgcgatcgatttcttctcttaattctgctgacagtgcttctgaatcaatcgcaagcatcaattccgtatcctgatacgtactgcgcatatccaggttgtaggaacctacgatactgagtctgtcatcaatgagcactgctttggtatgattggaatgaggccccagatattcgtgcacctgcacaccggttgcccagattttttctttttggttcaaataatctgtacacccccacggattggctccgcttgacacatcattggtaataatctccacattcgttccctgttcacaagtatttttcagatctgcatacatctcttttccgcagataatataaggcgtgcaaatgactgtatttttccctgtctgaagcagctggttgacagaataccacatatgaggctctttgttttttgcttcaatcggattggaaagaagggttacctttgcagtctctaccgtccgcgcttcccaatcccaggtttttaaaatgtccggatataacgcttcaagtttcggatatcgttcttccagttctttcagactgttctgtacacggtcagtcttctttttacagcggtattctttactgtccgaaagctcccacacgcgttcaaaatatgccttcagctgttttaaagaggcactttctccttcctttgcatagataaaaatctctttgtcaatattctgatgctttccataatctcccaaaaacagattggtcgtatttcttccgcccaaaaggtacatcgaagaatctgtgatcacgtatttatcatggagtcttgcctgcatcgtccacggcttcaacagattaaccggattgtacactttcacttctatattatctgtagaggcgagtgcctgaaaatacggatctcccagcatatctaaaaatccactgattccatctacgatcagacgaacatgcacattcctgtgtgctgcctcgatcagcgcactcatcacatcttttcctccggtatccgcattaaaatcaaaagtcgatacgatcacttcttctttcgcttcccggatcattttcaatcgatattccaaagcttctgtattatccgtaatgtaagccgcccgttcttttcccggctcctcagaataacattcctgtggatcaaactgtttcttataatgatccgatacttttttatgctgaacataaggaatcgtcagtgctgcgatatacaaaagaactgcgatcagacaaaatcttccccagcgtatttttttctttcctgtttttaaatcgtatgttctcacctctgccacctctctgtttccccatagttaagaggtagtatagttcgctcctgcccaaaagtcaagtacgctattttgttgtattttacgggaaatttcgttataataagcgaaacactcaaacacaaggagatttctttatgaaccagatcaaatcgattagaaaattatgctttattccgctgctctttctgcttcttttttctctcagtggctgtgcctcatctgcagaaccgctccagatgaacgggatgtattttgatacaatcgttacgatccgcatatgggatacttccgatcgctctgttctggaagaatgcgaaaagctttgtcaaaaatatgaaaatctgttcagccggaccattgataccagtgatgtttccaggatcaatcaggcaaacggacagcctgtgactgtagatcaggaaacagctgatctgatcaaaaccgcactgcactatggggatttatcagatgggaaatttgatatcaccattgctccgttaagtgagctctggaatttcggacataatgacggacagattccagatccagctgccattgaggaagccagaagtcatgtgaattacaaaaacgtcaaagtggacggtactaccgttcagcttctggatccaaaggctgccatcgatcttggagcgattgcaaagggctatattgcagatcagctgaaagagtatctggaaagcgccgggattaaacacggactgatttcccttggcggaaataccgtggcaatcggggaaaagccggatgggtcaccttttaagatcggcgttcaaaaaccctttgccgagcaaaatgatatccttacaagtcttgatatcagaaatcaatctgtggtttcttccggaacctacgagcgctattttgaaaaagacggaaaaatttaccatcacattttaaatccgtttaccggatatccttacgagactcatctgcagcaggttacgatcatctcggatgcttctgtagatggagacgccttaagtaccacttgttttgcacttggtctggaagagggatcaaaactgatcaaatcactggacgaaatcgaagctattttcgtgacagatgacggaaacatccatcgggtggggtgatatcactcccaccccaaatgtgttctttttacaatcattcttggcatgaactttaaaatcccatttctgtccacattggtcagaaatgggattttcttgatctgtcagatcattcattcaaaaaactggaatttgcctttctgtgatagtttgtcactgatcacctatcagcagccatataatgatcgtcggtatgattgcggtaagcaagggcgaaaacatcaatgccttctttgtattcttcaatttttgagatacatatatgtggaaggaaaaccatattccacttaataaaaatcctataataaaaacaattggataaagcatttataaactccgtttataaaaagtccaaaaactccgaattttctccataatggctctatgtaatgcttattcatttccagtgctttaactgtgaaagatatatgttaaattgagctcgcctgtcatccactcccagattatcaggattcggcatatgttccacaagataatccaataaagactctcttgactgatatacaaacttcccctctgcataacaccacttacaataatcttcgttgtagcttccatctttctcccggctgatgaatgcatcttcatttaagggcattccacagcattgacaaatgagctgacgaggagagcccagaagcgtattgacggaaacttcaaactcctgtgataacagttttaatgtatctgtattaggttgtgtctctcctgtttcccaacgactgacagcctgtctggtaaccatcacacgtttcgccatttgctcctgtgtgagactatttttctcgcgcagctttttaagcacatctttcatttccatattagttccctcctttgtgtaatatcttatctctattatgaagcctctctatggttttaacaagcaacctgcagttgctaagaagttcttgtaatcacacatcaggagtcgcttttaccggattcagcagcttccatctgttttttcacatctacaaggctaatccacactcaaacgctaacagcatgtatttctcagcattcgtaagtccatacaattccagatctcgaatttcccatttttccgaactgagactatccgccccatacagaaattgtataaatggaatctgccggtattgtgaaactgccagcatagatgcacattccatttcaaccgcaagacagccttcctgcctgcgttcctcaatcgctggaatggtttctctgtaaattgcatccgaggtccatgtttttccttttacataggaatacccacagaattccaatacattctgcagtacccgaatggaatgttccgacgctttaatttcctctgatggagctatgtaatgatagcttgttccttcatcacggactgcagaaaccggaataatcatgttatccttcactttctcatcatccaacacaccgcaggaaccaaacattacaaacttctttgcacccatggcaacaacttcctcaaatcctgccacacacgccggtgcccctactctggataaataaaatgcaatatcctgatttttgtaataagttttataaacaggcaaagctccattggccgtatatagttctgcaatcttctctacacttttcaaggaagcaaacttctgaataatattttccgaaaatgtggaaacacagatttccggaaaaccctctatttttttcgtggtatcaaaaggcgtaaaaagtgccggttctgttattgtatttttttgaaaaatggttcccatagtgacactcccttcttgtcattctcatgaaaagatctaaaatcattgcataatatgcgctgtaataatcgtatagctatatgcgttgactgttattttaaggattcaacacaaaatacgaatcatactttgttccatcatgccctaccagtttttccgccgaaagctcaaaccccagatttttcaacgcttgaatacgttccgtagctgctggaattgcttttgtggcaattttactacaatggaataaacgatatgcaggcgcgataatcaaacttaatatttttataatcttatcagacatttcatagtcgctccgaatatcaagcctaagcaatccacaatctgtaaaataatctgcggcatctctgtgaaaaagttctattgtacctattgcttcatgcgtttcttttgatataatcgtccaccgcacaaatccctgtcgattatactcaaaaagccaataatcaatagcctgctgcattctgttttcagttgtataataaaaatcatctccgccacaattatcactattaaagaaagagacagcctctttatctgaataaacttttagtaaatccagtctatcctcctggctgaccattctcaaaatatagtcattattctcaaattcaggacaacttctataaatctcttccatactggtcttcctccgtaaattccgattgagatttcacctgttttaagaaatttaataactgttatattttgttattaaattctccgcaaaccattgaaaacactggatttgtcgcaggtgagctttcccttattgtttcccttgtgttatatcgtcccaccagtgtttacgaactctgataagggaaaatacaagggcaaaaaaattgttaagatgttggggtcaaaagagtttgtaaaaactatttgatctcctatatagtaccttgaaaattttacacaatcgaattttgagagatatttcttgtttgggcgctgatattaacgtgactgtcatcctttttcttatgctaataccggattttgagcataatgtcccaagccctttcgataggtaaagagctttttgaaattcaatgctccgattttacatccgaagaaaaaacgtccgcggatcagacccctgaccgacatcctatctgcatggtatcgcctgcgcagcagagagggcagtgtttctactccgtttcggatttaaaaaaggtttcggaattcttccgttcccataaaacgttgttgctttgccctttcatgggattttaccgatacggtaactctgctgacacgtttatagattttcgccttgcactgcgctttgtgtggacagtttgcacactgttccttttgaaaggaaacatgaaactgctgggatttatcaccggtatatccacaggattttggctcatatcctgcagggcatcttactactttggttcccgtctcgttgaatacaaaatctgctagaatatcatcaaccggttttcccgataaatcggtattgatcagacggatattcttttgggcagcaagatcatggttttctttcccggaataagcaccgtcggtgatcagtgtactttttttctcctgaacctcagtgcgttcaagactgtcctttagaaaacggctgtcactgtaaatgttttgctcaaactggtaatctgtgataacagaaccatttctatcaacggtttcttcaagatttgccacatagccctgatgttcttttccagctttgcttctatatgttgcatctgggtcagatggattttgaagtattcctgaatggaaaccgccatcttctttagtgcggagacgacggaaaccttcttccacaatggtctgttcagaaagacagcgtaccaataactggtattctgtgatgtcatcataatccgttccacaaaggtccagcagacggtctgcatctttcagaatggccgccaagtgattctctgtatcggaatcgttactgtaataaaaggttttattatagtcattcggatcacaataatgttccattcctttaataagctcatcgcggctgtttttgtggaaatagatgaccagcttttttacgcaggtataaagcagctctatacggctgagtttccgtatatttgctgctatcatcatggaatccattcttttgacccttgggctgatgtccataagttttgcgatattcgttccaagtcctgtcatgcattcgtggagcagatcgataccgtgaatagattcataatcataacagcgtttacgaaaacgggtgagagttttgtcgctcaatggctgttcctcaaagcttgatgtatgaagggcatactgataacggggatccagcataaggttttcgacaacttcatcatctgagattccaaagagttctttgatgatgagagcaccaatacacacatttacgggtgtatttggtcttgaagcgttcgaggaatacagaacacggaaaggttcttcattgattgcaggaaaaatatcttctgcaaaaacctttgcccatgaatgttccaatgctttctgctcacgaaacgtaagcccttcgaaactgtcagcaaaagataattgttgatacgaatttgttctgaatgccatacacttccaccacctttgattgatatatacagtataccacatctgggggaagttgaagaatttgtgtaaaattttcaaggtactatagcagggcttttgaccccaacatctataaaacagtataacacaaaataaaagtgacatggtgaactgattgaaatgcttctgatttttgtgatgataagtaaaattactaactaaattcgcccttgctgtcagccagacatcgtactatattgtattgccttccccttctaaaacttcgttttctaatactccgtcattattgataattgatttgacagagcaatcataaaatcaagtccactaggatttcccatgctggttctttatgcgttattttatatttctaaaaatagtcaggtgaaatagttcaattaaccttttcacctgactatttacatagcaaagagtctctgtacaattacttagtgtgacagcactcattctaccaatatcttttaaaaatctaattcctaataatcaaactgacgataatatctacgaatagaaagtggatgtcttaaaaatagctccatatatgcatctacacgattattaacaccatgcattaccaaatgagaaattgttcctctaaattctggactaattccttttaattcatgttcttttgtatcaataatagtatagtttgcatttacacgtggaagaaattttgcaacacgctcagctaatggtcgttgttcatcctctcccataaacagagtaactggtgtatcttcaacgataatctcctgcattccgtggaaaaattcttgacagctaatagattttgtacggatccacatctgctcctcccaatagcacatagcataggaataggttgccccatactgatttcctgatccaataaagtaatgaggaagatctttatgttctttccaaaatgccaccttattttttgcatactcatatgcccactcatcggaatctttctcaacctgaactaatacatccgcaagattagcttccatctctttattataacggtcataatcatcaaattcaccatttttatacatcaagtaatttgcaaccatataaaatttcaactgctcattcattggataaacaatcagataatcttgcttgttaggctgtgtgagaatagtacctggattatcgatgaatgaaaatacttttgcacctttttcatgtactctgtccactaattcaaccatttcttttgtatttccagatactgaagatataattactacagatttatttgtaaattttttgtttcctgtagtcaaaaactcagctgcattttcaacaaatactggaagctttgaacggccacgcatatatacttccacctgcatactggaagcataagtacctccaataccaataaaatatattccatcaaatccttcttcccagatttgatcaataattttttcaatctgcgaacgaagagcaagtgctccattcacactatcaatctgtgcttgctctttaaaattacgcaaacaagcaccttctgtttctttccacgcttttgcttcatatttcatagttaatatcccctttcactactttctatttaatacaatttcgttgtctgcaaatctaaatttaagaaaaattgtatagcacgttgaatcattttatcccaataaggccactcatgatcccctggtccttccagataaacatgaccataaccattactttcagcgactgttctaaatttctgattattttcatataagaagtcttctgtaccacaaaattgaattaacctcggacgattttcgtctttagcaagtttctctaccaaaaacagtggattttcccactcttctggttttcctgcttctccatgaaaactctgtatttcttgtggcgacatatcttcccaatttccggcaagtaccatctccgtaaagcctacataatcgagtactcctgataaacttgccacagcttcataccgccctggtctattcaatgcgatcttcactgcaccatatccacccatactttctccagctataaatgtgttttctcgtctttgatctaaatgaaaccatttcccacaaatagctggaagttcatctgcaacataatggaaataatcaattccaacttttcctgttgtataaaaactacgttgaacttcaggcataattattatgaaattatatttttttgcataatattcaattttagaaaatcgcgtccattcatcactgtttcctgacagtccatgaagtaaataaagaaccttcggtgttccctcataaagaggtgttacatcattagaaacatccgggaaaataacattaatctgtgttgtcattcttaaattttttgaataaaaattccctgtaaataatcccattattttaattttaccttttatctgaaaattgtacattaaagttacatttatcaccacgcacataattgcgattgaattcgattacccttccatccgtatcacacgtaagacttttaaacaacatcacgggtgttcctgcatctattcccaacagttttgcatcattcaaactaggacgaaccaaatccaatgtctgctctgcttccgctagatgaataccatacatttcatatacttcatacacagaaaacaccgataaatcaatcccatccattttgggaattaaataatgcggtatatataattcctccaaagaaatcgaatcttcgtcagcataacacatgcgcttaatataaaaaataggctcttctggtttaatgccgaacatatttccatacaaatttcctgccattcttagatacttggacacaattctaaaagatggtttcatattcctatctaacattgtctgcgtgaaaccttctaacttttccatgtttcgttcgattttatgtcctaaaacatatacttctttatcagaaatatatttcaacaatccttctttgaccaaaacttctatggctgttctcacaatttgcttctgaacaccaaacatttcagccaattctgtgtcagtaggtatttttgtaccaggatataaatcaccatcttctatttctattcttaaaatctcactcacttgctgagtgatcatttttttacaggcagttttcatatttcggctccttattttttagttaccatgctccaaaatactttaatgtttctgttgcatttgctgcacctttttccattgccccttctatagaaagtccatctacaattcctgttaaaaatccagcaatataactatctccggctcccatactatctacaagatgatcacaaggaacgattccaaaacgatgatatctttcaccatcataacacaaactgccttcttctcccatcatacaaatgacaagcttaggtccctgtttttgaattctttccatttgttctcttacctctttagtatctcctgtttccacagaataaaagagataatctgtatatggtatcgcttttacactttcctctgaatctgggtttgtcgcacaatcaaaggcagtaacaattcctttttctttcaactctttaaactgtccttctactttgccccaaacatcacaaattacaacatcaaaatttttgatataatcaatatcttcatctgttaatttatatttttccaatacgccttcgtcgtaatctccaaatactctttcgccatctatcaattcaacctgggtaacggctgtctttcctttttctacacgcaaatgcgaagtgtcaacgcctttcgctttgatagtttctatcataatctgtccgtagacatcatcacctactggtccaatatatgcagcctctcctcctaaacggagtgtataaactgccatatttaccgggcctccccccggaaatgcttttccaccatctatattgttataataatcaatacagttacttccaactgccgctaatctcatacgatatcactccttttttatctggtgtctcgccttgttagaacattcgtatattgtacctgatctggtctcgccataatcctaaaaaactcaatacctactcctctatcgtcgtttacaacgcctgactgatagtacaagtattgtccttcttctaccttcaacaatttagcttcttcttctgtggcaaatgtaattcctactttctccgtccctttagtcaacaatatgcctaaatcccctagaactttatataaagattcttctgcaaaattgtgagcttccaaaccttcacactgttcgtaattaatgtaactattctcaatcatcaaaggaacattgtttctaatccgcaagcgatataaatgaaatactatatctccctcttttatctgaagttttctcgcaacatatccatcacacgtctcaattctagagattaatacttctgtccaaagaaagtaccctgtttttctcattgcttccgaagtagactgaattccctttatatccctaactaatctcggaggtgccacaaaggttccagagccttttacactatatagttttctttcttcaattagttgttgaatagctgtatggagagtggaacgattcatttgccacattgtacacaactcccgttcgctcggaagctgtgtatgtggttttagttggttttcttgtatataccattgaatctgctccatcgccatatcttgcggacgaattttttttattttctccatacagttctcaccttctcaacatattaagtctaatgcttatgcactttctcttttattt

SEQ ID NO: 7121 - DNA, 357 bp, Unknown
  gut microbiota DNA sequence
cattacgcctttcgtgcgggtcggaacttacccgacaaggaatttcgctaccttaggaccgttatagttacggccgccgtttactggggcttaagttcaaagcttcgccttacgactaacctctccccttaaccttccagcaccgggcaggcgtcagcccatatacctcacctttcggttttgcatagacctgtgtttttgctaaacagttgcttgggccaattctctgcggccacttttacatggcactccttctcccgaagttacggagtcattttgccgagttccttaacaatgcttctcccgtcggccttaggattctctcctcatccacctgtgtcggtttacggtacgggt

SEQ ID NO: 7122 - DNA, 1220 bp, Unknown
  gut microbiota DNA sequence
gaatatgctgctggctttcaattccaagaacaacaaattctactccataagcggtctttttaatgacatctcttgttctggataacgtttccttataatcttttaattgaatgacaccggaaacatccgtatccatttcatgcaatgcctctggcttaataacctcttttcctccaaacacaactacattgaaaagatcggcaaaccgttcattattccgccaaaaatatttaaatataatatctgcttttgtatgttccacgtaaattcctctcttttctacaaccagtcactctcttgttacgattattatatcaaacttcataggacctgacaaattgaattttctatgatatttcagagaattcctctccctccattctttcataatcacacttttccggggatattggacggaagaccgatgcttgcaggtattttccttcagaagcaattccatgatttccacctagagaatccaaatactgctcttttcctttggtagccgagatatagatgtatctgctctctttttgaaaccgtccacttggaatgttcccaaagtaatcacgactgattaacaatgagatgttgagtcttcctgctttttcctttaccatacgaaaaagaagcttaaacatctcctgttccaatctgtctgaaatcccttttacataggctttttccaaaaacagaaccagttgctctggtttctttttctttcccgtatcctttgtaaaatctacaaattgaaattctttgttctccctttccattttttcttcagatgcttttgtaagccgaaggattgccctaaggacaatcttaccttgataagaaatatatataattttcttattactgtcaaagcaggatagcagacactttcgatacattcctgtcttgtaactcaaacaggttttatccggcagctccccaatctgcatcaccggaagaaaacggtcttcttcccagatcttccattcctttctctgaagttgcagattttctgcccacagtttcatctgtttttctgaaatcggaaaagcaagttccttttccagatctgcatcatggtattttaagtctttaaatttccccataagctctgcgaccaacaatctacgcaacatttctgtctgtccggtatctcctttataaaattcatacaaaatttcagaaccgccttgttccagaaatgtctggatatttgcttcatg

SEQ ID NO: 7123 - DNA, 594 bp, Unknown
  gut microbiota DNA sequence
ggcatccggaactttccaaagaagaagtcgtatcttcagcctgtctttctgactatctggaagaaaaaggatttcgtatcacaaaaggaatcgcagggcttcagaccgcatttgttgcagagtggggaacaggaaaaccgatacttggatttctggcagagtatgacgctcttccgggtcttggccagaagccggtctgcacgtatcagccgctgaaaacgccggggcacggatgcggacacaatctgcttggcacagcctgcgcgggggcagcctgtgccttgaaagagcggatggaaaaagcgcagctttccggaacaatccgggtgtatggctgcccggcagaagaaatcatcatcggaaagatccagatgaatgaagcgggggtgtttgatgatctggatgcggcgatcacctggcatccttttgaccggaatcgggtcagttatgacatctggcaggcgcaggatatgaagaattataagttttacggagtcaaagcccatgcctccaaacatccggagcttggaagaagtgctctggatgccgcagaactgatgaatgtgggagtcaattacctaagagagcatgtgg

SEQ ID NO: 7124 - DNA, 229 bp, Unknown
  gut microbiota DNA sequence
tgccgaaaccggaaaaacggaaggtctgatccatatcttttctgctatggaatgctgtaatacctacaggccctggcatgataaaacaactgggaagaccttcctgaagtttgagcagagcaagtgtcttcattactatttctattttatcgacagggaacttggcctttgctatcttcgtgtccctacatggccgcctttccgtcttcagttttacatgaacggtcat

SEQ ID NO: 7125 - DNA, 264 bp, Unknown
  gut microbiota DNA sequence
tactttaaaccaattccttacgattggcagaatacttcgaaaaagagtttacagtattcagatgccacaggctgttattctggatctggattccactcttcttgatgcatacggcaaacaggaaggccgagcctttaactttcattatcagagcaatggataccatccacttgtctgttatgatggaatgactggggatctgataaaaatccaacttcgtgatggaacacagtattcctgcactggagtggttgacttcctgca

SEQ ID NO: 7126 - DNA, 426 bp, Unknown
  gut microbiota DNA sequence
tgttgagacagtgcccaaatcattacgcctttcgtgcgggtcggaacttacccgacaaggaatttcgctaccttaggaccgttatagttacggccgccgtttactggggcttaaattcaaggcttcgattgctctgacctctcctcttaaccttccagcaccgggcaggcgtcagcccatatacctcacctttcggttttgcatagacctgtgtttttgctaaacagttgcttgggccaattctctgcggctcttatttctaagagcaccccttctcccgaagttacggggtcattttgccgagttccttaacaatgcttctcccgccggccttaggattctctcctcatccacctgtgtcggtttacggtacgggtacattaaacacaatagcggcttttctcgacagccggtaagcatgcttcg

SEQ ID NO: 7127 - DNA, 449 bp, Unknown
  gut microbiota DNA sequence
atttaaaacgaacgggtgaatgtctaagtaaccaagttcatcactatataactctattctaaccggtttccagtctgtatcaattttatagcccagattcaaaagcacatttaacaatttttccgtatgttgagcatcaaaatttatatctatatctctatgaattcttgtttgtttaccagctaaaatatctacaccccatccgccatccaaccagtatgtaattccagtattttcgaataattctattactttcattaaatcttcttttgttgttatttcttttctacccatacaaagtctcctttacaacttctatataattgtttagttaagtcaatatcaatatctaattgccaaggctcaaaatcaaaaatcatggtcatcacactcctttttaaaattccaatttgttattctcattttaccatactgctcctgtgttttct

SEQ ID NO: 7128 - DNA, 480 bp, Unknown
  gut microbiota DNA sequence
gaaatttgtctttgcgtgtatctcctcctcaaactgaaacctgcttgactttatcgtaagcctgagtaaattataaaaacgccaaataaaaatactaataaagcaacaacctctatacgaaaatcaaagcatttgaaaacctcatttccatatttttcattcttaaatacagaaatttcttttccaaccttcctctttcccaatgataaaaagaaacaaccatgtgcagtataatactttttgtttttaatcttcactatataagcatgctttttaacattaacaccacctactgaataaccagcattttgttctacaatgtcgattattttccctttgcatttttcgccagtaaaaacaaccctatattttagatatagaactaatagcgatgtgattataaaaatactccctaaaagccacatttaatacactcctataattaaatcttattcttattaaattctttaggttagaatc

SEQ ID NO: 7129 - DNA, 626 bp, Unknown
  gut microbiota DNA sequence
tgcggctggatcacctcctttctaaggagaaagaagtagaggaagtaagagctattgtttaattatgagggttcatcaagaactcaacttttttggtggcgatgcgctcagggggaacacccgtacccatcccgaacacgatggttaagacctgagcggccgatggtactgcactggagacggtgtgggagagtaggtggccgccaaaacaaaaaaagaatatgggcttatagctcagccggttagagcgcacgcctgataagcgtgaggtcggtggttcgagtccacttaagcccatatctataaattgaatatgggggattagctcagttgggagagcgcctgccttgcaagcaggaggtcacgagttcgaatctcgtattctccacttgattctattaatgtagaatcagatgtaccttgaaaattgcatacaaagagaaatatcttatgaaaataagagagttgaattgattcaacaagacatccgaggtaatgttaacaacattataaaaaaacaaactattaccaacgcatgtaacgctatacatgtgtagatgagagaccaacccgtgtttcttgtcagttggttatgctaataagagcgtatggtggatgccttggca

SEQ ID NO: 7130 - DNA, 2171 bp, Unknown
  gut microbiota DNA sequence
ccttggtgcatatctgtcataagaactaccgcagcagattccatttatatatattttatcagcgtctgtaaacgctcccataagaatttctgcaggtgtaactgcctgttcttctgtaataaagaacttcttttccagtaaaactgttccacagaaatctctcatgtttcctttccatataccgggaatacttattttataaaaactatctgtcctttgatcaaaagactgatccgcttttttcatccagtatttttctctttcaatttctattttctgcgtacataaaacatagtcttcatttttacatttttccaactcatctgtataaaaacccatatgccttattgtctcttcactacaccatgctttcaccggcgttccctccacagcagtctggatcagcccgaccgggacatcatttttttctcgaagagacaatgccataaacagtcctaaagcgctgaattcaaggaccgattccccctgtgcgctttcccagcgtccctgggaaagccattgtcttttctctccgaaatcatattctttcggaacatcaaactttctgataaacgaatcatttattttctttatttcatctgcaaaccgctctgttacaaattttattcgcaattccatattggactgaccgcccagaagaaatacatccccactcataatgtttctaattacacgcttctcgtcaccgtttatttccatacaatacggaccaccaaccggaagatccggaagttctgccacaaacattccatgtgtatctgccttagtattaaacttcctgccatcgagtattcccgttactataatttcagggctcgtctctccccaaatataattcctttttcctcgttgcaataccatcccatcactgaacaaatatgataacttcaatccttttccccctagcgatattttatcatgcgtctataattccccaaaaagctggtttttcgttacaggcatcatcaaatggcaacggcatctgaggtctgtttccatcagatccacctcctaccaaagcagcttcctgtagccacgaaactgagtcatgggtgccccagaatgtgatacctgtaatattaattttatcttccttatcaagactataaattgttcgaaacaactctttataccttgctccctctctctctaactccaactcgcggtctgatccgtcataacttttgcttgactgcatatcaaattccgtaaactgaatttcatttacaatagatgaatacatatacacagcttctctaatctgttcaacagacggaaactccatatgatagtgtgcctgcattcccatcccatcaatacgtgctccctttgtatccttaatctgcctgagcaaaacacaaatagcatccctttttaccggatccgcatcattgtaatcattataaaataacttgatatctttaggcgcatagcggtttgcaaaaacaaatgactgagtaatgtagctaatgtccccctgaaaaatattataccaacccgtattcttgttattacatgtatagcgcactgatcctgggtttttttctggatgaaaatcgtccggctcaatctgttcatttactacatcccaggcatatataataccacgatacgggctatttactccgtcataatgctctatcactttctgaatataattttcaaggcgcttcagcatcttttctttacccacatatgccccctgagagtcatatttttcacgaaaaaaccaatccggagtctgtgaatgccatacgagtacatgaccccttacccgtattgtatcatctggatttttctcattatgtttttttataaaatccataattttatctgccttgctgaaatcaagtgttaaaaccggatcgccattttcatctaaacatatacttccttcagtatcaacactgaatacaggaacatctcccaaaattatttctggtttcatctcgttttcacatgtaatactattatagtgctttattacaagattccttatcttctcgtcatttagcatgtctgacataattgcaacgccagccttcccattaattgctgatttctgttccagacgtttttttatcgacattatatccttcatattatccctcctgctttttacatatatgtctaaatagtgtctactgatt

SEQ ID NO: 7131 - DNA, 267 bp, Unknown
  gut microbiota DNA sequence
gcttttgtaagccgaaggattgccctaaggacaatcttaccttgataagaaatatatataattttcttattactgtcaaagcaggatagcagacactttcgatacattcctgtcttgtaactcaaacaggttttatccggcagctccccaatctgcatcaccggaagaaaacggtcttcttcccagatcttccattcctttctctgaagttgcagattttctgcccacagtttcatctgtttttctgaaatcggaaaagcaagttcc

SEQ ID NO: 7132 - DNA, 772 bp, Unknown
  gut microbiota DNA sequence
aaatctttctcctttgtttcagactcttgcatctgttctgttttgggacgttccttttcgggtagagtcgttagggaacgtcccagacaaaggctgccacaggcagccagtacgatgctggtgatcagcaacatcttgtttcgttttttcatggattcgcactccctcctaaaaggcagtgcgtgtttccactacctttgtattcactgccagccgcttgggggtctggaaatatcccacacaggtcacaagcgtcaccctggctgtatcctgaccctggctctccctactggaaaaacagggatcatctgcctgcagatacttccagccttccacctgcagtttccggacacgctccggcgtatacagataggcttccggatttgctgccagaaacgcatcgttcgtgaattgtttcaggctcccgaacatctgtccggaagccatgttgtgggcaaacagatacacctgactgtccgaaaacctggctccggcaaatgtaaaaatactccccagcgggctgtatgccccttcaaaatctttggtcaggtattctgtatctgtctgtcccgtcaggatggggctgtctaccccaatctggggtacatacagccatcccacgatttccggattgatgcgctgcagcgctgcaaaatcgatcgtacgttccatgggatctgccccctggctgacagtctcttgtaccaccagtttctgcagcgcctcccctttgactttgatctcctggaatggttcctgttcccggtatgcc

SEQ ID NO: 7133 - DNA, 708 bp, Unknown
  gut microbiota DNA sequence
aggaatgaaaactgtgaaccgaggataagtacagttatggctatcgagaaagccttaaaaatagaagtcacagaaattttatgatttgttagaaaaaagatgaagtaggcacaagtaatactgttccgaatttcggaacaacagaataaggagaaaaaaatgagagatccattgtatttttatggagatgaaccatatgaagcagatgaaaatgcaatactgattccaaaggaattggtatttacagaagcatttgcaaagctacccggagacgcacagatcttatattttgtaatgttggaatatctgaatgatgcagaagagaaagggtggattgatgaagaaggaaagctctatattgagtttccaatccaggagattatgaatctactccattgcagcgaaagaaaagcaatccggttattggaagaattggatgaacaaaaagggcttgggttgatcaagaaaaaaacacagggtggcaagaaaccaaacaggctgtatttaaagccacttgcaaaggtgttaaaggaactgaaagaaaagtaatgttccgaaattcggaacggaacaggagcagatatggggaaactatcaaaacacacgagaaaaagacttatcaagttattgacagcaatggggatgtttggactgatggcagtatgggattgggcaatcccgcaaaatacagcatggaaattggtggtc

SEQ ID NO: 7134 - DNA, 229 bp, Unknown
  gut microbiota DNA sequence
cattacctgttatgaccgcatgatcattcagggatatatcccaaactggagccatgcggaagcaatgactgcctatatgaaactcaacggtatccgtatttttgattatcccactagtttctcccagccccttacggaacaggtccgtcagaatgcggaaaagattgctcacgaaaatggaatggaaattgagttcatccgaaaactccatgcttttcgaaaagatgac

SEQ ID NO: 7135 - DNA, 229 bp, Unknown
  gut microbiota DNA sequence
tacgtacggattctccttgctgacaatctcctgggttcctttctttgtgaatcctacgaattcataatcctcggatgccggcactgcactcaccttgatctcggttcctgcctcgtaggtatcctgctgcggttctactgcaacgcttcccatcttctcatcatttgctgcaacagagaatgtatatttttctgcagggatcttttcaaagtttgcagtcagatccaga

SEQ ID NO: 7136 - DNA, 611 bp, Unknown
  gut microbiota DNA sequence
ccactgttgaacactttttcccctttaagctcctgtttttactgccacaaggatgttccgggcttgtttccactcataagagcaggtcaccagcgtcagagttttctcacaacctatgccatctacccctgtttcaaacaacgacagcgcttttgcctgcgctacataagcctccaattcctgtggactctgaaaagatgtcctctggaagtcgaacatggacacatcggctttcaaaactgccgctatccggtactcctccatccctcccggtgtctgaaagaacaccctgggatgtgctttccagtaatcataggaggcgtactgatccagattcccgaacattgccccgctgttcatgttgtgaccgtagatggtcagatttcccgattctcccagaatacagtctgcctggaggaacaaacttccattgatgtcgtagtttccccggtaatccctcggcagataatactccggttcttccgggctgctctgcagtaccggataatcgatgccactctcctggatcgtaagccagccccgaacatccggatactgactctggagggagcgaaagtcaacggcaggcacttccagttctcttccagcct

SEQ ID NO: 7137 - DNA, 1451 bp, Unknown
  gut microbiota DNA sequence
tccttacctgacgttctacttgaaatgcctttgttatctcttcttcggtgggttttgggtacttccggaaattcagatagagaaatgcctctttatcaatttcccgataatagattgtgtcatccttttttgccatctctttgtacgcttcgctttgttctttactcaaaaattggatctgctttttcgtttcaatcgtaaaataggttcgtttttcttcgtcaaatatcacttttaccgaatgatgatatccgtcttctccagctaatttttccatttccttccaccgtggtgtctggaatggaattgccttttgatcaaaaaccggatattgcccctcgatgaaaagaatacaatccttccgcctcattcttttcacagccgccggtgtcatcagacttcttcctaatttctgattctgtatatttgcatttccatgggctccataggtacggccatcattccgcacgtcaatggtcatttccccgatcaattctgaaataaacttgtgcgttgtttttgcagccgggccagatcccatgtaaacaagtacggcgcagttctctataaaaatttcccatttatcctgtggaaataatgcttttgcctgtgcgattgactgcagaatcggtacaatggacatatttcttccccgaatcgttcccatcaacacttctgtcctggttggtttcgggcccgcatagaattcatccgcccacagtctgacatgaatcggaagtgcccctccatactcatgatctgcagcatgaatcagtacatcaaacatggtcgtataaagcatagaaatcaaaaaattaaaagacggatcattatccggcatgaccaaaaagagggctgtctttttccctgggattccatccgcacctgttcccagactcttgatatccatatcatccgactctaggattctcttgattgcaggaatctcacaaaggcgcagcattgcgtttaccatcaaaatgacgcagctgacggtttcctgggcttccatattgccttttagtttccggtaatcacgcactggtggataatctgcaccatattttctggcaagatcatccattttctcctgtaatcgggtactgttttcctccgatcctggctgcatttctaaatttgccaatgctaaaacccgtggcaatgtggccgcctgatattggtccggatgctcttttttctcccgttcttgccgcagccattcataggagaaaagagacatcagatacaagctcactgcctgatcccagaaaggatctcccttcatcgcatccggcggttttaccgcctcctgcagattggtgatcaattttaccaatcccacttcatcccggatgtaaacaaagggattccaacgatccgattcttccggattgatcaggttaaacactttgattgcaacaccttgattctctaaatatcttcctgttttt

SEQ ID NO: 7138 - DNA, 1418 bp, Unknown
  gut microbiota DNA sequence
cagcatattcatgtttgacaattttccattatccactgccacattttgactgagcaacgtattctttgtttcatctttattcgttaggattcgctggatttgtttgatgtccgcccactgctcagatccatactccacaccgatctgtcggttgcgataatagtccataagatatgttacaatgccaatccatacaatcagcgcaattccaagaaacgtaaaggtcagatcgttccaccagttttgaagtggatggagaatcacatacagcagtttgtcctgccagtttgccaatgtcactccatctaatgttgtcaaaccacttagaaagtaagagataacaagcaatcctaccagaagagctgccagcatcccccatggcaattttcgcttttctaccatacattacatcccctttcgcggcatggctgggagtttctgcgggacttgtcctaccacttttttgattgcttctttctgcacattttctttctgcagcaattctttctttttaaacatgcgatccactttctcatagtttgaagcatacagatcagcaccggttggccgatgatccgcagaaacaggttttccattggcatccaaaaggatctgtttctcattttttgctaaaaaggcaagataggttttcccaccatccgtttgaaacacctggtctgttggcaaaaccagggttctctcattctctccccaggtacctggaactcggctggcaaacatcccttttgcctctacttccggattcttttctctggcaatcctggattgatcgatcagggtttccctattgatcgtgatttccacataatccggatgattatggagttcctgataccgttcattgctgatggatttgatggaattttccgtttccaacactttttcttccagctctccccgttcctgcccttcgtattttcccaacttttctttcatttccccggatgcagtatccacataagcctcttcattcattgtccctgtttcccgatactgacccatgtcaattgtctcgaagtctttgatctctttgccttctgacaggcatttttcctgcaacattcgataccagtgttctaccttgggaagatcggcgtttgcaacgaccacctggatttccccatctccaatgttcaaatccggaaggatggaataattgacctgcagcgtatcgaaatctgcttttaaaagatctacttcctgttccatcggaatactgacaatgcttgttctgccactggtaaggttatttaagttctgcagttcatgctccccgccctgcattcttgccatcagaaaccggtcataccatccctgaaaattcagctggtcttccccataaacagccagctgcacaaacccatccttgtcattcagatccggcatccgaatgtagc

SEQ ID NO: 7139 - DNA, 550 bp, Unknown
  gut microbiota DNA sequence
cagctgctactgctgccaccagaagtactgcccacatgatcacattggcattgtctcctgtctgcacactctgagagtgtgaaccggatgtacttccattgttatgacttccgccgttattgtttccactgttgttgtcatttccgccgttgttatcatttccgttgttgttatcatttccgttgttatcgtcgtccggatctgctttttctcctctgaccagaaccttcacatcagctttggctgttgctccgtttgtatccgttacctgaatggtcacgatcacatccgtatcgttttccggtgttgttacctttccatccagtccgatgattccttccggattcactgccacgatctcgatcttgcttccttccggaacttccggcagaaccagagtttctgttcctgctttcacttctgatggaatcttatggtttgccagaatgtcatctaagatttcctgtgcactcggaatatgcggcacttccacggctttgaattctccggtcagctcgatgttctttgtcactttaaactgatattctgc

SEQ ID NO: 7140 - DNA, 470 bp, Unknown
  gut microbiota DNA sequence
cagaagccctggcgaagattttaaatgaaagggacagggagctgtttgaagatattctggccaacaccatcagcaagaaaatccgtgcaaaaatccaggcaagcaggcgctgggtagagaaaatgaatgcacttatggagtctatgcagacctccagcggactgaagctgagcctgcgttggaaaaataaaagagcagaaaaggaagaacagttagacaccagggctttggtggaattattgcagaaggatgcagaaatcatgcgtacggaagagatagaaatgctctcccggcatttccgttccaagattgaggaagcaaggaaaatcgcaggggatatgggagctgtgcagtctttccatgcaaccatgcgtgaggttctggattaccggaagtggttcgaattccagttggagtgtcagaagacaggagagaagaagaaagaactgacagaccgggtcttctttacc

SEQ ID NO: 7141 - DNA, 511 bp, Unknown
  gut microbiota DNA sequence
acttacattatcctgattcaacacaggttgaaaccatacatcatccatatgtacatccggtatcgctttcaaagtaacatttctaaagattccaaaaaagcggaaaaagtcctgatcctctaaaaatgctgctgtgctcatcttgtgaacctgaactgccagtacatttcccttttcttttatatacggtgtcaggtcaaactcagaaggcgtaaaactatcttctgcatagcctacaaactgaccattaagccacagatacatcgcttcttctacaccttcaaaacaaatatggattcttttcccacacatgctcttatccaagtcgaagtatttgatataagaacctaccggattgtactctgcttctgaaaacattcctttttctgctccggttgcctccatgctgtaagctcctctgtggtactcttttccttcccacggatacatggtgttaatgtagcggatcttatcatatccagccagttcaatatgtcccggaaccataatt

SEQ ID NO: 7142 - DNA, 949 bp, Unknown
  gut microbiota DNA sequence
ggataccaagaatcctttagacggtgcagtgtatggcatttatacagacagcaagtgtgagcatcttttgatggaaatgccagtcaccggggaagagggaaaagcagtcagtgattattttgaggcagccatcaaaacagtatatgtgaaggagatcaaggctccagacaagtatgcacagagtgatgtgatccataaggtggatgtggaagccggaaagacggtcaccatctcagcaaccgatgagagggtgaaaggtgctgtccatatccaaaagatcgataaggagacacaggcttttcttccccagggagatagttcccttgccggggctgtgtatggtctgtatgccagagaggatatcgtccacccggatggaaagacgggggttctgttcaaaaaagacagcctcatcgcacagggcgtgatcaaggaggatggtaccttagatttttccaaattgtatctggggaaaatgtatgtgaaagagatcactccgccggaaggctatacggtagatccaacagagtatgaggtggaccttgcttacgaaggacaggaagtggcagaggtaaccagggacctgacggtacaggaacaggtgaaaaagcaggcgttccagctgatcaagatcagcgaagatggagaccagacagaaacagaccttgtggaaggagcaggttttaaggtgtatctgatcagcagcctttccaaagtagagagtggggaattacagccatccaatggggatcagtttactgcggaagatttccgaggttatgatttcagtaaggaagaggtggcagtgacctatgtggatggcaaggctgtcccggtacaggagcttattacagataaaaaaggatatgctctcagtccggagcttccgtatggtctttatgtggtagaggaaagcaccgtaccggagaacttgaaagccatcgatccg

SEQ ID NO: 7143 - DNA, 327 bp, Unknown
  gut microbiota DNA sequence
gttgatgaggacagcagagaaccgatggtatggcgtgtgttcgatgaccgtccgtttgagtttttgttaaaaatcgtgaaaaaggatgcacagacaggcaatccggttttaaaagcaggagcttcctataaaatctttgacatggaaaaagaggaatatgtagagcagacggtattctatccgaagaaagagaccatcagcgtttttaagaccaatgaggaaggctatctggtaacaccggaagaattgaaatgttctacttaccggatcgaagaagtgaaagcaccggaagggtttgtaagacagggatatgagagttccttgtat

SEQ ID NO: 7144 - DNA, 316 bp, Unknown
  gut microbiota DNA sequence
ccggggcagtcatcgtggaagtcgagcagccaaacgatgagcaggtgggaagcctgacactgaccaaaaccggggaacagccagtggaagtgaagggggattccctgcttgcaaaggcaaagagactggcaggaaagatcaaagatgcagtgaccggagaggataccgataccggagtgttccatgattttgtctatgaagaatccggtgtggaaggggcagcctttgaactgtatgccaaggacaccatttattccccggacggagcaaaggatgagcaaggcaatccggtcatccgttatgaaaaagacgatct

SEQ ID NO: 7145 - DNA, 1226 bp, Unknown
  gut microbiota DNA sequence
tggcaactttagtgaccgattcagaaggaaaggcagtggtaaataatcttccattgggttcttattatctgaaagaaacggtggcaggtgaccatttcgtattgaacccggaacagaaagaatttaccctgaccgtagaggatgatactcaggcagttgtttatgaaggggttgcttataaaaatgagcgacagaagatttccatttctgtagaaaagaaggatgcagtcacagaagagaagctggaaggcgtgatctttggattgtatgccaaagaagatatcctctcccagcagggtgaggttcttgtggaaaaggacactctgctggagaagaaagcaacggatgagaagggacagcttacctttgacagcgacctctatcatgggaaatattatgtaaaagaggaagtgagaaaaccgggatatcttccaaatgaagaaatctgggagatggatgcctcttacacagaccagaaccttgcagaaatcaagctgacaaaagaagtggaaaaccagccgactgagagccaatttacgaaaaccgatgcaacaaccggggaagaactggaaggcgcgaagcttcagatcatcgataaagagggcaacatcgtagaagagtggatcagtgcaaaagaaccacacgtagtttatggactgccagaaggaacgtatatccttcacgaagaactgccgccttatgcagagggctatgtatctgcagaagatatcgagtttgaagtaaaagaagatggcagtgtgaccaaggtggagatgaaggatgattattccaaagtggaaatttccaagacggatattaccacaggcgaggaactggaaggtgccaagctgcagatcttaaataaagagggtgagattctggaagagtgggtaacggatggaaagcctcatctggtagagaaacttccggtaggggaagaactgactttgcgcgagatcacagcgccggaaggttatgagattgcagaagatgtgaaattcacattggaagataccatggaaatccagaaggtggaaatgaaagatgcaagaacaccggaaacaccgggtgtaccgcagacaggggatgaccactggaaaccaatcctgctgtttgttcttctgggagcatcagcagccggactcatggcaaccatgatttataagaagaaacatggaaagacagaaaaagcagatgaaacgaaaaaagaagagtaggctgtggat

SEQ ID NO: 7146 - DNA, 561 bp, Unknown
  gut microbiota DNA sequence
ctctatgttgatcagggaatcatcgcgggatgtgcaggtggtggatttgaaaatatctgtgcagcagcggatattataaaaggaagaaacatcggtgcggatgagtttacattcagtgtatatccggcaagtacaccgatttatatggaacttgtgaaaaatggagcaatcgcagatctgatggaagcaggaacagttgtaaagactgcattctgcggaccatgttttggcgccggagatactcctgcaaataatgcattctctatccgtcatacaacaagaaacttcccgaacagagaaggttccaagctccagaacggtcagatttcttctgttgcactgatggatgcccgttcaatcgcggcaacggcggcaaacaaaggattcctgacaccggcgacagcaatggatgtcgagtacaagggacagaaatatcactttgatcagaatatttacgcaaaccgcgtcttcgacagcaaaggtgtggcagatccgggcgtagaaattaagtttggaccaaatatcaaggactggccggaaatgtcagcacttccacagaat

SEQ ID NO: 7147 - DNA, 754 bp, Unknown
  gut microbiota DNA sequence
atgtgtatgcttggagattgacacccacagacccgacaccaaaggaaaaacgggaaaaaccctcacttcgtgaactggaacagcagataagacgggatattgaggacggtatcgacagcacaggcaagaaaatgacgctttgccaactctatgccaaacagaacttacagagggcgaatgtgaagaaaagcacacaaaaacaacgggaacaactcatgcggttattgaaagaggacaagttgggtgctaggagcattgatgcgataaaaccctctgacgctaaggaatgggcgttacgcatgaaagataaaggcttttcctataacaccattaacaaccataaacgctcgttaaaagcgtcattctatatcgccatacaagacgattgtgtaaggaagaacccttttgattttaagttaagtgaagtcctagaaaatgataccaaagagaaagtcgcattgacagaggaacaggaacaagccttactctcatttatcaagacagacaatgtgtatcacaagcattatgatgatgtgctgatactgttaaagactggacttcgtatctcggaactgtgcggactgacagtagctgatattgatttcaagaatgaagttgtaattatcgaccaccagttactaaagagcaaggaacagggctattatattgaaacgcctaagacgaaaagcggaataagacaagtgccattaagtagagaaacaatacaggcatttcaacgggttatgaagaaacg

SEQ ID NO: 7148 - DNA, 457 bp, Unknown
  gut microbiota DNA sequence
atatggtatggacgatcttctatgaccagccgaacaaaaggagatgtaatcagatcaccatggggcttttgcttcttcagcttttaaatcatatggaccggatggagaccggaacagctgcttttgaccgggagctgacgggaagtgtatttaattatattgaagagcactataaaaacggaagtctttccgaactggcggagatcatgggatatgatgtatactggttgagccgggagatcaaaaaacggacgggaaagacgtataaagagctgcttcagtcgagaagaatgcgtcaggcggcatatttgctgaagaacagcaggctgtcggtggcggatatcatagagtcggtggggtatgacaataccagttatttttttcggaaatttaaggagtgttatggagtcagcccgaaggggtatcgggatatgtgagaaagtgaaagaaaagcaag

SEQ ID NO: 7149 - DNA, 397 bp, Unknown
  gut microbiota DNA sequence
agtctgactcccggcaatcagtttcatggcattcggagtttgatattcttcggtaggctttgacgccccctaggaaattcagtgctctacctccataaacctttgccgaggctagccctaaagctatttcgaggagaaccagctatctccgggttcgattggaatttctcccctatccacacctcatcgccacccttttcaacggatgtgcgttcggtcctccattgccttttacggcagcttcaacctggacatggatagatcacccggtttcgggtctgcacatactgactctggccctgttaagacttggtttccctacggctccgcacctttggtgcttaaccttgccagtatgcacaactcgccggaccgttctacaaaaagtacgcggttc

SEQ ID NO: 7150 - DNA, 845 bp, Unknown
  gut microbiota DNA sequence
ctttttccgtcaaataatgtgctgccttatattcatatccataaaaagcccgattcgtagacgttccgaaaaagtagagagaagttttttgtcctgtttcccggatatatttggcggctgtcagtccacaattatctatcgtatcttccaaaaacacgatatccataggactttgttcatttgctttgcgcaaagcctctatcgtagaatattcataaatcgcatatatgttatctggctgacacgcttcctttcggatcttctttcgtatatcatccaaaagcttgctttctttctggtaaaatattgcaattttcatcatttgtattccctcccctttttcttttagaatagcatgctccggtaaaaccacaaggttctttgtttaaattgccttttttattgcgtaattggctgttcatggtattttttagggggcatgtcaccgacacacccccgccatcatcaaatttctatgctacaaatgtgaaaaatttttcttccacattcacacgacagactctgtcattttccagttcacgatacagtatggaaaatacttccactacttcctgaatgctcaatccttgaatttctatgtttcgaaaaagctctcccaaacatacatcggaatctctatatgcttgccgtacaaggttacaggcatcttctatcgtcttcaccgtaatacagatttcttccactatatgctcaccctttctttttactgccagctctgttttagggccttttagtaaaatgcccattttcagcatatcctgtttccagtcctgatagaaaggatattcctgtttattaacatatttgcgaaacagtctgtatac

SEQ ID NO: 7151 - DNA, 1036 bp, Unknown
  gut microbiota DNA sequence
ctttcagcacatctgacagatactggccctgatattttccacctctcatcaccacatgatccttataagcagcagaaagctccgcagtccatagtgtaacctgcgtttttgtaggatctttttcctggttccttatctttttcaatacattctttttccatttctttaaaaatggttctgcctcttcatagtcctctcccgttctgttatagtccttacttttttgtacaatgtttccatctggttcaatttccatcgtataaaattccttttccaattcttcctgtctgcgtaagaaaacaatataagaggtttttctgctgatccggtcaaaatagcattcctgagtacctacacaatgatgcaatgcttttccttcttttataatatcttcaatcttttgaggaaccagcactgcatatttttcatctttcagtgactgatagatgggcgtgatttccctacaaaccttttccagatttggaaatttctcccgtagttcctctgctctctgctttgtgtctatttcctgcagggctattaccgcctcatcatgccttctttctaactcccgtggtctataaacgatggagtcctttagattttctcctattttttttgccatggacagataatctctccatatcgtcaaaatcttctctacgggcagcccgctttccttttccattcttcttaaataatggtaaatctgctgtggcgacatttgattttcaataaaggcaacatctattgtggaaatattatgtttttcaaaataacgaagtatatcctctgaaatccacttttgtgtattcttcatcttttgcagccaggataaaccagctattccgccgtccattttcaccaactgctttagcaggcaactattgattcccaaaatttccatcagttttctgtgatttggaagtcggctctttttatggatgctttggatcacaaactttttcaatcccgcctttgcagctttctcaatagccggacaatgataacggtataataaatacgtttccggttc

SEQ ID NO: 7152 - DNA, 378 bp, Unknown
  gut microbiota DNA sequence
tcaacataatcatctttagtcatgccaaataaaccctttaattcttttgtagttactccgaatactccttttgtactccaacgcatcagttgctgatatataatcattgaaaacttgcttttgaatgatatggcgtcatcactaagtaagcgagtaaagccaggttgcagttgaatcaacaaaggaatatatttagctgctatagtgacgtaaactttcttttttgttgttctaatcgctgaaatcaaaaaaccgtcatcaaatatttcgtcatcaccgaactctatccatgaagccattgcaagttttttgaacatacctctaattcttgaataatagtgatgtgatttaaagcccaacatatcaaacattgctttt

SEQ ID NO: 7153 - DNA, 238 bp, Unknown
  gut microbiota DNA sequence
ccacccttttcaacggatgtgggttcggtcctccattgccttttacggcaacttcaacctggacatggatagatcacccggtttcgggtctactccgactgactatttcgccctcttcagacttggtttcccttcggctccaggccttcagcccttaacctcgccagccagcgtaactcgccggaccgttctacaaaaagtacgcggttcatcatataaagatgttccacagcttgta

SEQ ID NO: 7154 - DNA, 416 bp, Unknown
  gut microbiota DNA sequence
attaatgtgaattacaatgtaataaaaaagtaaacgcaaaatagcgagtaccttgacatttttaggcggctgctttgcagccaccgatatttaagctttgcggatccctgccggaagttttcctgaccagggcagaagatcttccagaaaagaacaatccttatcattcatgtgtttcggaatctcttccaggagatgctgcacataatcaaaaggtttcagattattggcttttgcagtttctacaatactgtaaatgattgcggaagatttggatccatgaatcgtatcgatcatctgccagttcttctttccgatacagaaaccccggattgccctttcggatgcattattatcaatcggaacatctccatctgtgagaaatacccggagatatttttcctgattcagtgcat

SEQ ID NO: 7155 - DNA, 363 bp, Unknown
  gut microbiota DNA sequence
acccgtaccgtaaaccgacacaggtggatgaggagagaatcctaaggccgacgggagaagcattgttaaggaactcggcaaaatgactccgtaacttcgggagaaggagtgccagtgagagctggccgcagagaattggcccaagcaactgtttagcaaaaacacaggtctatgcaaaaccgaaaggtgaagtatatgggctgacgcctgcccggtgctggaaggttaaggggagaggttagcagtaatgcgaagctttgaacttaagccccagtaaacggcggccgtaactataacggtcctaaggtagcgaaattccttgtcgggtaagttccgacccgcacgaaaggcgtaatgatttgg

SEQ ID NO: 7156 - DNA, 469 bp, Unknown
  gut microbiota DNA sequence
atataaagaaacagaatggaattatacagaaaaggctgcctgcaggaaaacggggtttcattgtgcagaaaacccgctggactgtctgatttactatagcaatccggatttagcacagtattgtgtggttgaagttgccggagaacgccaggaagagggcgatgacagcaaaattgcctgcacacagcttcggattgtcagaagactgacgttattggaacttttaatagaaggggttgcatatatgctccagtatccacacagaaggccgagtaaaatcatacagatagaaaaaggaagttccatgggtggatttacagtggtgcgtgggaaacatcccatcggaaaagggaggaaagatacaatccttcttctcatcagggaagatattaagggaaatatcgttaatttttcagtcatcataattgacggaaaagaatatgttccaaatgtttattatgattttgat

SEQ ID NO: 7157 - DNA, 441 bp, Unknown
  gut microbiota DNA sequence
agagattacaaaagaaaatgaaaatgaggaagtttgaatatgaagtatctgtaaagatttgtaaaaaaggggagattttggcagtttcatttttcaggataaaagaaatgcttgccggacaagtgcagccggagatagttgtattcttaaataaaaaggagcgtacctatctttcgtaccttccaagagaagcaaagtggagaacagccacaattataaagattatgggctatttttatgggagtttttatcactgtaccaaaagagattgggcattattccggaaatattttgacacagaatgtagcagatggacacctttaaaagttagttctatcagaagtattatagaagagtttcaaacggatattttatgggataggatagaggaaaggcgcagacaagaaaccaatgaatgggatcaggtaatgtcccaaattc

SEQ ID NO: 7158 - DNA, 858 bp, Unknown
  gut microbiota DNA sequence
caggagattcgggataatgcaggagggagaattacaatctttggagaatacagatcttacaatgaaaaggatggagaaagaaatcatttgaaattgtatgtatttgtaaaaggaatcagcaaagctggtgaagcggatcaaaacagaattgatctgattggatatatctgtaaacagccgctctatcgagagacaccactcggaaaagaaatcacggatattttaattgcagtaaacaggaaacacagaaaaagtgattatctcccggcaatttgctggtattcgaacgcaaggctggcagcagggcttccagtcggaacaaaagtgagagccatgggaatgatacagagcaggatctatgtaaaaggagacagcgagagaacagcttatgaagtctcaataagagagatggaagtgattgaatagtggaaggttacgaaaaatacgaatccaggatccaggaacttttatttgatgggatggatgtacacgaagcatgggtctacatgaaagtcatgttccagatcgagaaaagtgaaatttgctttcgggcatatctggagagatcgggactgatctggtttgcggaagcgggcagcagaagacaggtcaaggtaccggatctgctggagacaaagagaaaactggaaatgaatcgaacgaaaatttcaaagccgctctgtaaatatccggattgtttccgatgtgtatatccggattgcacatgtaatgaaggccttacgaaaaaagggaatgatgaactggttcgggagttggcgaagcgataggggaaaaagattaatggatgaggaaaacacggagaggaaaagaagtgatttttgcgtatgtacattgccg

SEQ ID NO: 7159 - DNA, 529 bp, Unknown
  gut microbiota DNA sequence
ccgtgtattaaagagcgatgcgtagcgtacaaggatggaaagtgtatgaaatacgacaatgaagtggagagggaaagtggaagaacgaacatttgaagatatcctgtatatgattaaaagatcgtgcgacaagaatttttataaaggcactgattacgatggattaaaaccggagattgtaagatgcgccacaaacatttacatagagcagatgcgacagaacggaggaaaagaagatgaatagagaaatcctttttaaagcaaagagaaaaagctggaaagaacttccgaaagaggaatggtgggttgaaggatatttatttgatgatggaatgccagaaccgaaacattattttattggcgggataatcgttaaaccgtatgaaggcacagcatgcgacaaatggaatgtagttggcattgatttttgtgagattgatataaacaccctctgccagtacacaggactgaccgacaagaacgacaagaaaatctgggagaatgatattgtagaacttccagacgaaga

SEQ ID NO: 7160 - DNA, 884 bp, Unknown
  gut microbiota DNA sequence
aatgaaacaaatcctgaatgaaagaggaggggtatggtgaaacgaaaagtaggagcgatattagttattgtaggaatgcagttgcttatatttggagtaatatgttcacaatgggtttatatacgtataggattagggaatcaatacatattagggagatcattattatcgacactaggaatcctgtttatgatactcggaaatgccttttacagagtgttgtatagaccacatgaggagcatgcctcaaccaaagaaaagtatggaaaaccaaagaacgtgctattacgaatagagtggaaaaagtggtatccattaaagaaatttattgcttttctgttgtggaatatctgtttgtttacagtattgataagtacgatattttattgttctgagcaagaaacagattctaagacattgtttggctacatcatttttataatcactacaattgctacattttcacctatgagaaagtatgtaagtcccaaatatcgttgccttcctcacatcggagatgtgcttagcaaaacagaactgaataaaatgctgggggatgaggattttcagggaatagagaaatttaaagaaatgtccatctatccatacgtaaaagaaagtagaaattggttctggattggtggactgctgttgcacaaaaagatggtggtggcaatagattttggattgaggacatcccctaatcatatgcattcacaaattaaattgatgtacgtggatggagaagtaggagaaattattttgtctgacctatattatgaaagaagcacggaactatatgggtatttatggaaaaaagcaggaattttaggaggcaacgttgcgggaattccgtggtatagaaaaaatactgaaatagctag

SEQ ID NO: 7161 - DNA, 424 bp, Unknown
  gut microbiota DNA sequence
gaaaattatgaagattatattgaaaaactgaactatgtgatcaaaaaactgtatttcagcctaagacagaatgggtatctggcaattctggtaggagatatccggcagaaaggcgtctttcattctattgcagcagatatgcttcatattggaaatatgaagtcctggattgttaaggggcagtttcactgcacttccagtaagacacagtattccggaaaaccctttattcctattgtgacggaaacactggtgctttttcaaaaagaagaaattcttcttgtaccattttcaattagaagggaaggaatattccagatacaagaacaggactccattgcactgacgtggtttcatttattgcggatgacactggaacagttaaatggacatgcaacgttaaagcagctatatcaggaattaa

SEQ ID NO: 7162 - DNA, 676 bp, Unknown
  gut microbiota DNA sequence
aaagatgatttttaataacaagtgaaaaatattttggaggaatgattatgatcacaatgaatgaaaaagataaaaatgaaatgttagactctattttaaacgaaaagggagagtatctatgcaaactttggggagttttaatggctgattccaaaacttatgcagcaatcggaggactctctgcgatagtaggaggtggagctgccgcattaggagcattaagtaatgcttactgttatataggtgttacagagcaacatttgaattttgttgttgtagactctgtaaatgttcgtaatattaaaaacagaatatctattccaatggaatgtatcacaaaagcagaagtgaagggtgggctcttgccgggaagaaaggttgtaacggtatattttgaaaaaaacaaattaaaaatttcccttatgaataatgcaatcggttctgatattcagggacaaaaagagaatgtagagcgattttgtcagatgattcaaaaggcttgtaaaaactaaaaatcagccgttggtcataaagaaggtgattcatgatgcgtgataaattgaaaaaggaagaatttttcagaaaatcattgctttttacagatgagtgtatcagtgagtttgagaaaatacttccggaaattatgaaacaagatggaactaagtctcaaagggtg

SEQ ID NO: 7163 - DNA, 713 bp, Unknown
  gut microbiota DNA sequence
taagcggtccttgaataaaagaaactccctggttttcatcatctcttctgcttttacactgttcagttcccgcatataatcctgatagttctggtttaaccgaatgaaatcattgttcaaatcgttccaccaggcatgcagtttttcatcctcttttacagacatttcttccagttttcccagattgatccgaatccgctccaacagagtcggctccagtgaagagccttcaataaacagattttcgattcgtatgaccatacgctcgatttccacggctgtctccgacaactggtaccggaactttttattcttgaactcttcaatggtcgtcacctttctggtatcctgaatggtaaccaggtttccccaggaggccagggctgtaaggtcctgctggcactgttccatggtataatccgcaaaatacgggtcttcttttaattcttcaaaaacctcttcctgataaagccagtatttcagtttttcatattttaaataaaaaagccggatgatagggcgatatctgtctgtattttccacattcagatatttcgcctccaacatcggctttctcatcttttcctgaatttccatattttttccctctgtacaaattgtatttacagacctgtcaaactgcctgctgtatgggtatttctttgtttatgatagcatggagggcagaaaatgtacagagattttttctgatt

SEQ ID NO: 7164 - DNA, 364 bp, Unknown
  gut microbiota DNA sequence
tataggctgaaattcctgcttccagtagacttataatctttgaaagaattttcggataggcaaccaatttctttccatactcgattggaagctgttttaatattcttctctttttctctgtattaatttcttttgtaaaaagaaggagctgctgatttgaaaatcctaaaatctcctgccagccaagtccttccaaccccttaataatttccatgtgttccttcactgtcgtaaacatcttctacctccgtttttatcaaccactcttttatagttgcaatctctatcccttcttttttccctaagtttaatagcagttttaaatattcccaaattgctgcttttggtaatttccaccccactt

SEQ ID NO: 7165 - DNA, 344 bp, Unknown
  gut microbiota DNA sequence
gtattccaatttcggcacatatgcggacaaatccggaagggacggtgggattccgcattcctgttggccgatctgatattcatactcccgtttcagatcttccgcttccatccgctcattgcgcagctgttccagttccagacggctcttcatcagcagttcctgttgctgtccttcatagagcttcttggtctgttcaaagtcctgtttttcacgctgcagagcttcctgttccttccggtgggctgcttcctgatctgccagcttttgttgtgcagatgccatctcctgtttctgcccttccaggctttggtattgtctcccaagctcggtctgaatctttt

SEQ ID NO: 7166 - DNA, 753 bp, Unknown
  gut microbiota DNA sequence
ggcataccgggaacaggaaccattccaggagatcaaagtcaaaggggaggcgctgcagaaactggtggtacaagagactgtcagccagggggcagatcccatggaacgtacgattgattttgcagcgctgcagcgcatcaatccggaaatcgtgggatggctgtatgtaccccagattggggtagacagccccatcctgacgggacagacagatacagaatacctgaccaaagattttgaaggggcatacagcccgctggggagtatttttacatttgccggagtcaggctttcggacagtcaggtgtatctgtttgcccacaacatggcttccggacagatgttcgggagcctgaaacaattcacgaacgatgcgtttctggcagcaaatccgcaagcctatctgtatacaccggagcgtgtccggaaactgcaggtggaagactggacgtatctgcaggcggatgatccctgcttttccagtagggagagccaggaatcatccgccagggtgacgcttgtgacctgtgtgggatatttccagacccctaagcggctggcagtgaatacaaaggtagtggaaacacgcactgccttttaggagggagtgcgaatccatgaaaaaacgaaacaagaggttgctgattaccagcatcgtactggctgcctgtggcagcctttgtctgggacgttccctgacgactctacccgaaaaggaaagtcccaaaacagatcagatgcaagagtctaaaa

SEQ ID NO: 7167 - DNA, 343 bp, Unknown
  gut microbiota DNA sequence
gaatatgctgctggctttcaattccaagaacaacaaattctactccataagcggtctttttaatgacatctcttgttctggataacgtttccttataatcttttaattgaatgataccggaaacatccgtatccatttcatgcaatgcctctggcttaataacctcttttcctccaaacacaactacattgaaaagatcggcaaaccgttcattattccgccaaaaatctttaaatataatatctgcttttgtatgttccacgtaaattcctctcttttctacaaccagtcactctcttgttacgattattatatcaaacttcataggacctgacaaattgaa

SEQ ID NO: 7168 - DNA, 806 bp, Unknown
  gut microbiota DNA sequence
tggtagaccgatgctttcaggtattttccttcagaagcaattccatgatttccacctagggagtccaaatactgctcttttcctttggtagccgaaatatagatgtatttgctctctttttgaaaccgtccacttggaatgttcccaaagtaatcacgactgatcaacaatgagatgttgagtcttcctgctttttcctttaccatacgaaaaagaagcttaaacatctcctgttccaatctgtctgaaatcccttttacataggctttttccaaaaacagaaccagttgctctggtttctctttctttcccgtatcctttgtaaaatctacaaattgaaattctttgttctccctttccattttttcttcagacgcttttgtaagccgaaggattgccctaaggacaatcttaccttgataagaaatatatataattttcttattactgtcaaagcaggatagcagacactttcgatacattcctgtcttgtaactcaaacaggttttatccggcagctccccaatctgcatcaccggaagaaaacggtcttcttcccagatcttccattcctttctctgaagttgcagattttctgcccacagtttcatctgtttttctgaaatcggaaaagcaagttccctttccaaatctgcatcatggtattttaagtctttaaatttccccataaactctgcgaccaacaatctacgcaacatttctgtctgtccggtatctcctttataaaattcatacaaaatttcagaaccgccttgttccagaaatgtctggatatttgcttcatg

SEQ ID NO: 7169 - DNA, 422 bp, Unknown
  gut microbiota DNA sequence
cagatactactctcccactgtcgtacacaaattctgtaaattccggattctttgagatctggagagtatatgccttctggatcacatttcgtttatcgcttacgatctcccatccaaattgcggcatttctgcaatccctaccggatttttctgataatcaatatgaactctgctgattcttagcatacacttacctcttttttaaatgcaagatttctcgtgcttcctgcagtgttgcggcatccagtcccattgcccggatcaaagccactattttttccaccagctgatagttatactctgctgattttccttcttccagataggcactgtcctcaaatccaatccgcaccactgttgctcccatggcgattgccgctgccagaaatgtccagttgtctcttccaaaatgtgtcactcc

SEQ ID NO: 7170 - DNA, 386 bp, Unknown
  gut microbiota DNA sequence
tgtcctggtgctggacgtaaatctggtgcagtgttggagattgcctgaatgccaggtttctcatcatacgataccgtaatggtcagtttataatcatctggaacaatgagtgtgccagtttcatcaaactgcatttcaatctgcttgtaaaccagcagaacctcatgcatttttgattcaaaatcaggatcccgtttttcacagtaatacttgattttaaacggcttaatatcttgttccttgagaaatttctggatatatggctttgtaactgttgaaagccttggatatcccgcctcctctgcatgcttttgaatgtatttgtggagggcggtcaaagtccaaagttcctgtgcatagccgagttctgttggtctctgacatgc

SEQ ID NO: 7171 - DNA, 229 bp, Unknown
  gut microbiota DNA sequence
tgccgaaaccggaaaaacggaaggtctgatccatatcttttctgctatggaatgctgtaatacctacaggccctggcatgataaaacaactgggaagaccttcctgaagtttgaccagagcaagtgtcttcattactatttctattttatcgacagggaacttggcctttgctatcttcgtgtccctacatggccgcctttccgtcttcagttttacatgaacggtcat

SEQ ID NO: 7172 - DNA, 229 bp, Unknown
  gut microbiota DNA sequence
gaattaattcaacaagacatccgaggtaatgttaacaacattattaaaaaacaaactattaccaacgcatgtaacgctatacatgtgtagatgagagaccaacccgtgtttcttatcagttggttatgctaataagagcgtatggtggatgccttggcactaagagccgatgaaagacgtgataagctgcgaaaagcttcggggaggagcaaatatcctgagatccgga

SEQ ID NO: 7173 - DNA, 19521 bp, Unknown
  gut microbiota DNA sequence
gttattcattaaaaaccgcccctgcgccaacagagacggtctacatatccgaagatatgctattgaaatccacgaatattgtatcatcttcggaaacagcttgcaatccagaacattcgttcatgtgctggctgttatttttgtacccaaatttaaatacaataacataggagtgtgatacaatgtcttattttatctacgccagaaaatccagaaaagacgccgaactggaagcgctagggattgatgttctggaacgccacattactaccctgttagagctggcaaagactctctctcttccgatcggtgcgatttaccgggaagttgtgtccggagacagtatcgatgcccgtccagtcatgacgcaagtcctctctgaggtggaagcctgtatgtgggatggtgccctcgtaatggacgtagatcgtctggctagaggtgatacgatcgatcaggggcgtgtgcagcgtgcatttttttattccaacacccggattgtaacgccaaataaaacctacgatcctgcaaacgagtatgataatgagtactttgagttcagtttatttatgagccgccgggagtacgccacaataaagcgccgaatgcagcgtggcagggaacgttccagttctgacggatattacgttggtaatgttgccccttatggatgggagcgcgtcattgcgccggatggaaaacactactctctcgccccgcatcagacagaagcacccgtccttgatctaatgtatgatctgtgcggaaataagcagtacggataccagaaagcctgtacctatatgtccaatatgggaatccttgcaaggagtggcaaaccttttacgccctctactttaaaagggattatctcaaatccagcaaacatcggtaaagtccgctgggggcatcgtaagactgtcagggctgtaaaagatgggcgtgtagtaaagtcccgtccaaaagccacagattacatcctctcagatgcggcatgggcgccacggatcagcccagacttatttaaacgcgcgaaccaaccaaaaggatgtttttctgctccagtcagaaacgacagaccgatacaaaatctatttgcaggcctggtcagatgctcacaatgcgatcggcttatggtccgcaagaaagcgcaaacaaaaacgccctatgatatgctgatctgtcagtatacagagtgctccacagtcgggatccggatcgatgaactggaagaagctcttctggggtggctgaaagactacatagccaagtatgaattttctgacactcatgaggaagatactgccgctattgccgcaaaagaattgatcgtcacaaattttgaggccgaacatcagacgcttttaaaacagagggaatccttatttgattttttagagcagggaatttacacaaaagaaatttttattgagcgttcgaatgcgcttgagcagcggatcagagactgcatgaataacatcactgctgctcgtgaagatttgcataccacaatcgcaagacaggcaaaccggaagaattttgtgccgaagtgcaagaatttattgagtgagtgggactctctgactgtctcggaaaagaacagcgccttgagacagctgattgacaggattgttctgactaaaacaaaacggaacaagaaaaaccagaaaaactctgaattcacaatcgatgtgtacccgaaagtgccgaaataacggtgctttcggagtatattcattagctgcatcttttacgagcgtattcctccgtgccgatatccgtaagtgttgcggtcacctctttatatggcatggtataccgctgagataaataccgcattgatgcagcgagctccccgtccggtccgccaaattgtgaaatgatcactttggcaatctgtgggttcgtttgtgtaatctttaccggatattgcaatcgtttttcataattccacataatcagcatcctccttcctgccacggccacggctcattgatccatttccagtattcactgcaggatgctgtggctgtatcaatcgtcaaaggtccgaaattcatggcatattctttcattgcctggttgcgcatccggctgtatttttcgaaataagccagtgcatccggatcctgcgggtgggtatccagatataatttcacttcatccaccgcgaaactgacagcgttgatatgatttaataattctgttctacatggacggtctgtcattgattacatcccccttttccataaaatggtttgtttaaaacagggaagattgttccacattctaatcccttatgaacatcataagtgtcttcccatgtctgccagggaacatatgccatcgcgagagtcatatgttccagtggatcacggggaatgcggcaggaacaaggcgacgagactgcttcaccacaggaggaagaaggattctgtcgacgctgcaccggcatattgcgataaggctgctgttgacaggtaaaccgttcgtttctggaataagaccgattattttgcatagtgtgttctttcctttcatataattacagtacataatatggaaaatctgcaaaaaggtgaattttgatgacaaatacaactctttcctgtacaatggttctgataagtgaaatacgaccaaaaaggagttatgtcatgagtattttaaatgtagagcatctcacacatggatttggagatcgcgccatttttgcagatgtatcctttcgccttctcaagggagaacatattggactggtgggcgcaaacggagaaggaaaatccacttttttaaatattgttaccggaaaactgatgccggatgaaggtaagattgaatgggcaaaaaatgtccgtgtcggataccttgatcagcacacggtcttagaaaaaggaatgacgattcgagatggattaaagtccgcattctcatatttgtttgaactggaagaacgcatgaatgcaatctgcgattctctgggagaggcctctccggaagaaatggatacaatgatggaggagttgggaaccattcaggacactctgactctgcacgatttttatattatcgatgccaaagttgaagaagttgcaaaggcacttggacttctggatatcggtctcgaaagagacgtaaccgatttaagcggcggacagcgcaccaaagtccttctggcaaaattactgcttgaaaagcccgatattttgcttttggatgagccgaccaactacctggacgaagaacatatcgcatggctgaaacggtatctcatcgactatgaaaatgcatttattttaatttcccatgatatcccgttcttaaacgatgtgatcaatattatctaccatatggaaaatcaggagctgaaccgctatgtaggagattatcatcattttgaagaggtatatgccgttaaaaaagcacagttagaggcagcctacagaaggcagcaacaggaaatcagcgaattaaaagactttgtagcaagaaataaagcgcgtgtttctacgagaaatatggcaatgtccagacaaaagaaactggacaagatggacgtgatcgagcttgcagcagaacgtccgaaaccggaattcaaattccgatacggaagaactccgggaagatatatttttgagacaaaagatcttgtgatcggatacgatgaaccattgtcaaaaccactgtctctttctatggaaagagggcagaaaattgctctggtcggcgccaacggaatcggaaagacgacattgttgaaaagtattctcgggctgattcctgcgatttccggcacctgtgaactgggagaaaatttgcagatcggatattttgaacaggaagtcaaaggagataatcgaacaacctgtattgaagaaatctggcaggaattcccttcattcacacaatatgaagtacgttctgctctggcaaaatgcggacttacaacaaaacacattgaaagccaggttcgcgtcttaagcggaggagagcaggcaaaagtaagactctgtaaactggtgaatcgcgataccaatatcctgcttttggatgagccgacaaaccatctggatgtggatgcaaaagattccttgaaaaaagcactgcttgattatcgtggaagtgtgcttttaatctgccatgaaccggaattttaccaggatgtcgtacacgcagtatgggattgcagcaagtggacaacaaaacagatttaaaaagaaaaggacttgatcttcattgaatttcaagtccttttccagatttatctaatcaaatccgcaaattctttctcaaactccttccactctgcatctgaaaggtgatgcacaaagtcttcctctttccactcctctccaacaccaaaataggcatgatcggagcactgtcttctgcacaacttccgattttgcacctgctactgtatctaaaatctcataaaccacttatttctttttgcgtcttttccccagcaacattgtcagtaatccagacgaacctgcaaacatagatccgaacaaaccaatattagacatatccgctgtcttcggcgattcggactgctgacttggtttttcaggctttgtgtcagccggcttgttcggcttctgaggttccgcaggcttatctgcactcttttccctcacagtaactgtgatcgtctttattgtgcttgctccttgactgtctgttaccttatatgtcacttcataggttcctgcttcctctttattcacggtgttcttcagcacttggatcttatctgtcagattaccgtcttccttatctgtagctgttactccttccaatacggcgaatctgtctccttctgtcaatactcggtcggatgcattgatcaccggcacttcattcagcacttcctgttttggattcacagttacataaatcgtctttgttgtacttgctccctgactgtctgttactttatacgttactttatagatgccgacttttgttgtatctacttcattattcaacacttcaatacttccgctgatatctccgtcttccttatctgtagctgttaccccttccaatacgtcaaatgcgtctccttctgtcaatactcggtcggatgcatcgatcaccggcacttcattcagcacttcctgttttggattcacagttacataaatcgtctttgttgtacttgctccctgactgtctgttactttatacgttactttatagataccgacttttgttgtatctacttcattattcaacacttcaatacttccgctgatatctccgtcttccttatctgtagctgttaccccttccaatacatcaaatgcgtctccttctgtcaatactcggtcggatgcatcgatcaccggcacttcattcagcacttcctgttttggattcacagttacataaatcgtctttgttgtacttgctccctgactgtctgttactttatacgtcacttcatagataccaacttttgttgtatccacttcattattcaacacttcaatacttccgctgatatctccgtcttccttatctgtagctgttaccccttccaatacatcaaatgcgtctccttctgtcaatactcggtcggatgcatcgatcaccggcacttcattcagcacttcctgttttggatttacagttacataaatcgtctttgttgtacttgctccctgactgtctgttactttatacgtcacttcatagataccaacttttgttgtatccacttcattattcaacacttcaatacttccactgatatctccatcttcctcatctgtagctgtcaccccctccaaaggatcgaaagtatctccaactgttaactccttatcctctacattaataaccggcggtgtatttttcttttcttcaaataccggatataatgtaatatttttttctactttactgtcttttgtaaaaagctccccgctgccatcctctttttctgaccagcctttaaacacctttccttccggaatcgttacttccggcagtcttgcctctccaatcttctcaccctctggcacaaatgcaaacgattcctttgaatctaccatatattttacaagacaatgtcctgttgcattgatattccaatttctaaatattgggttgatatcttcttttacaaagacggacgtattcgtaactttttctccataataactgctgataccagctcccggaaccgtcactgctgcatttttctccttcagctcatctgtatccccaaacggagtgtgccctgtaatagtcggcatctctggtgctgtttctgacaaaaatgttacagaagctctttccttgatcggtgttgcattacgcccgatggatcttaatgattctgggaaaacaagctcttcaaacgaacactctttaaatgcattttcccctaattccacaataccgctcaaatcaactgatgtaaaatttgctccaccgctgtcaaaagcactgtttccgatgatctgagcattcggcaaactcaaagttttcattcttaccgtgaacttcgccccattaaatgcatggtttgcaatctttgtaacacttgagatttcaaacacttccaagccctgagagcttctgttccctgcattcagaaaacaaaagcttcccagttccttcactcccgaaagcctcacttcttccagattattcagccctgaaaatgcgtatgccggcaatgcttttgtttcttctcctgtctctgtatacatttttgtatgttctaaatcaactgtcaatcttttcagatttcgaaatttgacgttgtgatcagttacaccacccagccagacaagatccttgtattccagatttccgtttgtaatgctcagactctctacattctttggcgtgatactatttttatctacgatctcctgtatgcttttccctgtatatgactgatcatcaatcgttacaccaatctccaatttatcctccggaacatcattgaccgcatacgttgtgatttccagagcatttgcatactggttctccggctcctgcccggaacctgacgaatagctttctctgacaacaattttgacctttaacgcctctaccgggtcaaactcaaaagtcgctgcacgattggtgcctgttccagtagatggactatatgtaatattctcaaaagaccctgcttttttccatcccgtatcactggccggatctgctcccggatctgttgtataataaacatctatattcttaaaaacaccgtttcccacaccattttgagccggttttcccagataatcgattcttccgatcttggtcacctgatccagactgtaactgatccaatgcggcatttttttctgtccatcctggctccagagtgtatgccacactgttgactcattaccgtcaaacgcatgctgagcacgcccgttgttttgcccttcccctgtaagttcttcgctgtccgccaccggattcttcacagacacttttgtatacttttcttcttgttccgacgtcacggcttcctgcatattctcctgtgccagtaccaccgctggaaatcctgtgagagcagtcgttgtcccaatcataagtgccgaactgactgccacgattttttttgttttcattgtgttctctccttcattattttattagatttggcacaaaaaaagcgcacagatcctccttgtcacagagtaatcggtgcgctttttctatcagagattgcacatgaaaagagccgacattccccatttgtcggtcgcaaacacagctgtacataaacatggctgtcatccccctttcaaatctctcaatgcttttacctatgtgcttgattatactaaaaaaaactccttttttcaagatttttcggaaaataatatctgcagtaattcctgatgcggatgttctgaatctgcctgaaacacatccacacaattcaatgccgctcccccatcaaaaaaggccggaaataaaaatccacattctggttttcccggttcataatctcctgtaaccggagagatcacgcagatcagatactcaaacatctgctcagattctcccagtcgttccttatccttcgcctttgcaggaatgtcataccggtcatgaaacaaatacacagcatactcctgttctgtctgatacacttctgtcactttctcgtaaaacacatccaacagtgcatcgttttttaacccacagtcccggattcccattagcagctgacgcatacctccctgttcagattctggaaatacatagcgtttcagattctgattggtctgtgcaaatggaaccgttttcgcaagctccagatttttctcacgttctgcaggagatagtttcagaaaattcacgttaaatgttccgtcaataaaaccttctgcgtctgcatagcatcctgcgattctggtcatggaagttcgttttactgtcatacgtcttgtcaaagcaagtatttcttctcgattgatactcattgtttttccattcatttttttcttttcccttttctatggttttcgataatatatcatccgtttcgaacaatcagtattcctctgtatatacttcatatctgtttcgtcctttttcttttgcgcgatacaacgcaatatctgccttatcaatcagactataaatatcctgccctgcatattctgtattataaatccccatgctgacagtcagtttgtctgatatatctgagtatttatgctctatacttttttctgaaagcttcttttgaatctcatctgctgttctcaaagcagcatcaggcctgatcccggaaatgaacatcaccatttcctcgcctccgtatcgaataaccgtatcattttttcttacactgtttctcagtatatcggcaacctcatttatcgcagaatctccttgaacatgtccgtaatgatcgttatactttttaaaatagtcaatatcaataataaaaacagaagtcggtttttcccataattttttctgtttttctccaaatagtacgttaaatattttctgttaaacaagccagtcatagaatctgtaaagctcatttttcttgatttcatcccggatctgacagtccagaccacgatgacgagcaaccctaagatcaccgtaatattcaccagcagagccacttgatattgtccctctttttttgccagcagctgatattgatacacctctcgaatcgaagaaacataagtcttgctaaagttcttattatttttgattatctgatcactgtacaaggtactatattttttatagttctcaaaatcatttctttcctggtaaattttacacatttgctgataaataacttcttcaagaccaagttcttcttccgcagactgacttaagagctgttcatacaacgacagtgcttcttcatacctggtttgcgccatatataattccgcatacgtcaaattgacatatacatcttttttgcttgaaaattcttcgtcatcattttcaagcagcgctgctgcattctcaagatattcttctgctttttcaaactgctcattgtgaatctcagcttttgccaagatgtcatttttcaaaatttcaatatcatctctggcatacgcctcaagatttggaatccactcgtctaactgctgcagccagacaatcgctttctcatattgtccaagcttaatgtaagcatgagccccattgataacagaaaggctcttatcagaagcttccctgtttttatcatccagagtaacttttattgcatctttgtaataggaaattgcattttcatattcttccagcataaaattaatatcgccaatgcaagtcaaaaatttgcacttataataattatcatccggaatatctgatgttgtatcaatgatataaataccatcaaaataatgcatcaacgcttcggagtacctttcattcaaactgtataattgacctatgtttccgtttaactgaacttttactttattactcagacctcttgtgttgtttagataatcggtcaaaagctccgtgctctccccaatgtgcgcagcattgttatataaaaatgctgcgatttccctatgtaaaaacatatcatttttatacgctttatcctgtgccatataggtcaaagccattttactgttttgaattaagtcctcagtctctcccatttcttccagggcgtaattccaaaaaatataagtatatatttttaaaaatgaatcgtccgtatctgtcatactttttgccgccaatttgaaattttcaattgccatctcatattctgcgtcctggtaatctaaatatccttttataaagtaatatgacacatcttgtccttcttctgacaaataagattccagcttttctctgttttttccagaaacactgccctttttaatgtcctcctctatacaggaaactgccgccgactccctggatgattttaaacgtagataggaaaaagtaactataccaatgattataaaaatagatataaaaattattgcaaaagttgcttttttctttctaattttcaatgtctcacctcttactaatttccattccggcaacaattttctccactacctccagacacagatctgctgccgcatccattgtctcctgaaattcttcaaaaccgccttcaattccgtcactcacacattttaccaacatgcatggcacctgatttcgattacaggtaagcacgattcccgcagcctccatttcacagatatccgcactaaacatttcatgcactcttattttctgctcgggatctgcaataaatttgtctcccgaagcacagactacaggcactaattccggatgaatctttctggctgtatcacttaacactttcgtcgttggaagaaagatatcgggatactgcgaatatcgtcccacttctgtatggtctgccgcacttgtgtcaaaatcatagtgaacaactttctccacaatacagacttttgttttggacatctcttccgtaagaccacccactacaccaaaattcatcacgatatctacgtgatattcactgatcagaaactgcgttccggatgctgccgcaatttctcccggtccacaattcacaataaccatccgatattggtccgtctcatattccagcacctgataccctgctgtctcttttctcttaaccagttttgctccataacgcttcagtactgactgtagctcaacagcaacgatcatgccgattgttttcatagactctctccctcataaataacttctgtaattccattataacttctgcacactcacgcagatctccagtacgttctctctgtaatccgctgtgatggttccgcccattttctccatcagtgcctttgcaatagataatccaaggcctgttgattttctggccgtattcacggtataaaaacgatcaaataatcgttctgcctgtacttctgacaaacctgatgcatggttggaaatccggatatcaccgtcttccgacaatacaattttcagatcgccgtcactgtacttcaccgcattactgagaatattgccaagaacacgggacagagcattttcatttactctccccgtgatctgttgatccggaatcgaaatctccggaacaatatgattctgctttaaaacggagtaatacgcggatatgctgctttccaaaatcccatttaacggtaagacttgaagcgtcatctcttccgcttctgatatcacaattgtataacgaaacaattcttccgtcaattgtttgagtgcctgtgcccggttttcaatcgcatccagataacgctttatatgctccggacattcttcttttttgagcaggttcaaataaccataaatcgcagtcaatggcgtccgcagatcatgagagatattggtaaccgcttcttttagttccaggtttccctgttcatagcatcgtcttttctcataaaatgtttccaactgcagattgattgcagaagccagcgcacacatctccctgtcacggctggaaatccggattatggtgtttgtattggtcttcaataatttctgaaaatctttccggatttcttttgctgattttcgcaacagatacaccttgatctgcagcacaatattatacaaaaccagaattcctactccacaccatactccaacttccatttccactcacttctcctatttgatatccttccgattaaatagatacaatcctgccaggctcgttccgaaaatgatcaaaatcgaatatcccatcatttttccgagattcagaactccctgattaaaaatctgtacggcctgccctgccggcagaaaatccaggatattttgataaaccgtacggcttattcccgtcagataagcaggattttttactgtttccataacggtttctccatttgcgattaccgcctgtgtgatcatctccggctgagacaatttcgaaaaaataatccccgcaaacaccatcataaaaactgccgccagaatgcagactaccgcagaggttgtcttactggagcttagcatggagatcatatgaaagatcgaaacataagaaagcaccagcaaaattcctgccacacaggtctgcagcattgtcaaagccggcatctctatcacgccgaacatgggaatgcctgccgccaaccctgccgtataagccaacaacacgctgcacgtcccaaccagaaagctgatccacagattcaatccatatactgcatttcttgaagaaccgctgatcagtttatttctcaatgttccatcgtgatattctgttccaacatataaactgacaaataccgaaagcaaaactcccatcaccagaaaaaaatgaaatagaaacggatccagtagataatttgccccactttctttcatctgcatatattgcgaaagcatcaggcagacactatagatgggaggaatgataacacaggcatatgcgcccttatttttgcgaagccgatagagtcccgcacgaaataatttattcatgcttgccacctcccactaagttgagataatagctttccagactttcctcgtattcctgcacggaaaacatcctgcaattctgttctgccaactccaacgcaacatcggaaactaccagttccccataaacatttgcctgcgtatctgacaagatctcatattcaagacctcttttatccagaatatgagcgagtacagcagtatccgtcacttgcagtttcacacacttcctacaggtattttccagctcttctgccgtaatctctttcactatagttcccttgtcaataaatccataatgagtagcaagtcttgacaattcatccaaaatatgacttgaaatcagcaccgtgatctgtctttcccggttcagctttaatatcagttccctcatctctacgatcccctgtggatccagaccattggttggctcatccaacacaagcagatctggttttcctgccagcgcaatcgcaattcccagtctctgacgcattccgagagaaaaatcttttgcctttttcttccctgcatcttccagccccaccagtttcaaagtctgagggatcccttcaaaagacggcaagcccaaaacataatactgctctttcatgttttcttccgccgtcatatccagataaatcgacggggtctccacaactgcgccgattcttctctgcgcttccaaaattttcttgtccgtattttcgcttccatataacctgtaacttccggatgtcggtctttgcagtccgcagatcagacggatcaatgtagttttccccgccccgttctttcctacaaatccataaattgcacctctcgggacatgcatagaacactggttcagtgccttaaagtgcccgtagtttttgcataaatgatcggtggttaatacatactccataacaatttggcctccttaccttttctttccaacatattctatctgtaaagtgttaagaaagctgttaagaaaagtgcaaagaaactgtaaatatttctcactctgccatcttaaaaccgattccccatactgcttctatataatctttccccgagatttcccgcagcttctttctcagattactgatgtgaacccgcagtgaactttccatacaatccggtgtttcttcgctgacacggtcaagcagcacagtctttgtgatcacctgttttggatgctccagcaaaattttcaagatggcaaattctgtctttgtcagttttacctcatgttccccaacccatgcttcatgcgtgaccatattcactgtaatttctctatacatcagtttttccgaagaatctgatcttgtacttttcctgagctgcacaacaatccttgccagcaattcttcaatttcaaacggttttgtaatgtaatcctccgcgccattcagcaaaagagcaaccttatctttcacttcaacctttgcgctcatcacaatcaccggaattttttcaatctgcgacagcacttcctctcctgtaagccccggcagcatcaaatccaataaaatcagatccggcttttcgtttgccagaaacagtaatgcctctgtcccggaataggcatgggaaacctgatatccctcctgtatcagaacctcttccagcatttcattgatatgaatatcgtcatctatgattaaaatatggctcatagaaagctccttcctgatttcaattttcttattcggaatttataaaatttttgccatataatactcgtccacaacttctccttttaccaacattgattttgctcttattccttctactttaaaatcacttttttcatataattttcttgctgcttcattatgacattccacagtaagctccagccgaatgacagaattttccttcgcccatttttccagattttcaaaaaaagtcgtgccgatccctttcccctgatactctttcaatacacccacaacaatatatgcagtatgaaaatttcgatgaaactctcccctctctgcccggagataccccactattttattgtctgcctttgcaatttgtaaaaagtcatttccatgtatcacgttatgatagatatccgtttctaattcttgaatatccatatgctgctttctttcatttggttcatacatcataaaattcgtttctgcatcaagagcatttaacaaactccagaaatgttccatttcttcgatttctatctttttataaatcacctatatcccccttatcactttagaaccgttttcggctcctttgtagcttccggatttaaatcatatcttcaaaattgttttctatttcataaattcctttatatggacattcaatataatatttcccgttctcttcataataaaacatggttgtcattccaccattattttcaatatttatcgttccatattcttctgctgacggataatcttgaatcgattgtttctccgttcgttttccagtcgcaatctctgataatatcttctggatgctttctgaatcatcatatattttttgaatactgttcgtgaaatcaatacaaatagagtcaacattctccgcttttggaagaatcggtgagcgattatcctctgcacatccaaaacacagacataaacaaattcccaatacaacaaataacttcttcattctacttctccatatgtaaattaagccccttgcctttttcagacaagagacctaaaaacttcttcacagtctatcatttcctcgctgcaatcaaataccgatgaatcgtcccttcaattttcccttgattctcaattatcctttgcattttcagcaactgctcaaagcatttatcaactgaaaaaccaggaaactcccattcaataatatgtgcaaaccatacaaacgcaccaatatcataaaatttaattggtcgatacgcttcctctgcagcaagaatatgaaatcctgcatcgacaaacgcatttctctgctcttccagatttaaatgaggaaacggactttccacttcaggcagaaccatttccactaaatctctatcgttatcgccgccaacctgttgtgtaacaaagattccacccttttttaataatcgatacaattccctggcatcaaaatttccatgcctgtttataatcatatcaaatgtctcattatcatacggaatccttgaaggtgtattacactctttaaaatcaattcctaaaggcagcaacttctcctgacacaatcgcacattcggctcgaatccttctgtcgctgctgttctggcaaacggatgattcagagacaataaaaattcacccccgcccgtatcataatccaacactttggccgtatccgttaaatactgtctcacgatcttctcataatcccacggcaaatcattctcttcctcatacctcccatggatatgcgaaaaatcccaacctttgatatatgccgtcttctcttcctttttccaaattgattttaattctgctctattcattttaactgcttcctttcaaattttctataaataaaatgatttgatcggtgcagccctgccagcatatgtttttacttttattttaacctcgatacaatctgctgccagttttaaaactgcaccgagtaattaattcgtttcattctctctaacctccgtattttcaatttacaatagctcctttagtttgtcaagaaacgcttcttcaccccaggtattgatcttgaaaagcattgcctgactgccgcctgcagcaatcgcagaaagttgaatcggtccgcttccattctgaaaaagagttacattcaggctcacccgattatctccaacataactatatcgttcgaaaacacgaacactgcatctggcagttccactttcaaagtcactgaactcttccaatgatgctgacatactactgttctgtatgccattttcaattttacgaagtaattcataaaaatctccacttactgtctgttctaattttgccatcttcgttctccttctcttttaaagtcacagtctgtaaatagccgataaaaactttacgcgcatcttccaccgcccatagcaaaggagtctcgcatatacctgctttatacaggaattgtttcgctgcttccatggaaaacggcggttcaagatactccatgacctcggaatccgagggcacatgatacagtggaaacaaatcctctgttgtcatttttcggattgtcagtttttctgttttcaagaacacggccgcctcacctctccatacatttaaccgcacctacatatcttccagtttcttagaaatcacaaaatgaagaatcaatgccgctgcaacgacacaaagacaaagtatcgtacaccacatcggcacgctcatatccagttgaacccgcaaaagaagtgtaattgccaaaaacaccgcacctacagtctgtataaaactcaatatcttcttttgaaattcttgtaattttcttctgttctttattttttctaatttccagattccataattaatctgaatatcctgcgccgcttcatccgatatcagttcatccatacttaccttcaattcaagtgccaatttttttgctgtgatcaaatccgggcatcttgagccgttttcccatctgcagattgtctgtcttgatacatacaatttatccgcaagctgctgttgagtcagatttttttcttctcttaattttttgatgttatttccaaatgccatactctgtacctccctttgctcgtatcttataacgacaaaactcaaaaagaaagcaccatcctgtattttctttgtttccattttggtaacatcattccatcaccatttatcatggacatgaaatctatgttccgacagaatatactttgttctgattcaaatatgcatcagtaaactgaagttgtatttgttgaaatattaaatttcaacagtttctccgcaagatatataatatatgttattcatatgatgagacaaatagtcaaatgctgtcttccctgtgcaatgacacgtataaaacttcatgtctttatatttctgtaattccatcacaatatcatctaacagttcctttgatactgatttccttgtaaacggattgaacaaatgaaaaccacctatacaaaaacatggtcggtacttctctgctttttgcatgatattaacaacgccagcatgtccacatcccataataagtactgcctgtttttctgaaataattaaattttgctcgtgtctaaaagtatcttttcccttctcatcataaagactcttattggcgggagaataaaacttatttgttttactcactgtaaatagtgataattcgtcatctattttataatcgccgtccaagagtataatttgcctgtttgatttaagtttactatcaattccaactggtattttcagaagcaatgttttgctataatgcggttcaaacgcttctttttgtacataaatatttgccgaagaattaacatctaaaaactttttcaatgcccctccgtgatcgaaatgcccatgagaaataataaccgtatctacctttgaaatatctatatttcttttaacggcattttcaaacaatgtattatctgaacctaaatcaaataaaattttatgtaactttgtttctatataaagggaaagtccatgttttgctttaagctctgacttggttgtattttctaccaatggtacaattctcataaatcctccgctacaacatctaatctattttcttgtatgtggtgttagtatatctacattctattccaaagccattctatatctggaaaagctaaatgaactaagaatgtaacaacaaacaatgcaatcaaagcaattactacataactaattattgtaagaatttttttcaatgttgcttttccgctttcaacgtccatataaatagaagcgactttctcatcagtcatatttttctctctcacgtcttgaacatcaattcctttcaccaattcatctaaagtcatattaaaataatcgcttagcataaccagccgttgaaaatcgggatatgattgtccagtttcccttagttaaagatatgaaccctctttatcagtctacttttccaataaatcggtaatatatctctatttcctgtattctttcgttctcctcattcgttgttgcttcgtgaataaggattttttctatcattgcatttaataacggtgctgtcagttcctttggtacggaatactccttgattaactcaatccacctttcagcacctatcatatcctgttccattttacttaattcttctcttaggttggttatctgctgttccagttctatctgttctttctgatatttccccgacagcatgatgaagtttcgttccgttatcttctcacaggctctatcttcgtacattttcgcaaacaagcggtcaatctcattttgtcggttctcggctttcttcaaggcacttgcctttttcttcttttcccgtattcgctctgcattgccagccttttgtatcttattcaacaccttttcttcgtcc

SEQ ID NO: 7174 - DNA, 538 bp, Unknown
  gut microbiota DNA sequence
ctactcattccggcattctctcttcttaacactccacgcctccttacggtaacgcttcttcgcagttaagaatgctcctctaccaattgacttacgtcaattcctaagcttcggtgttgtgtttcagccccggacattttcggcgcaggacctctcgactagtgagctattacgcactctttgaatgtgtggctgcttctgagccaacatcctagttgtctttgaaatcccacatccttttccacttaacacacactttgggaccttagctgtaggtctgggctctttcccttttgactacccaacttatctcgtgcagtctgactcccgtacatcatttatgcggcattcggagtttgatatctcttggtaagctttgacgcccccttaagaattcagtgctctacctccgctaaactaatacgaggctagccctaaagctatttcgaggagaaccagctatctccgggttcgattggaatttctcccctacccacacctcatcgccacccttttcaacggatgtgcgttcggtcct

SEQ ID NO: 7175 - DNA, 567 bp, Unknown
  gut microbiota DNA sequence
aaatccactgctccttccggtacagcttcttctctttaagaatgctcctctaccaattggcattcaccaattccacggcttcggtagtgtgtttcagccccggacattttcggcgcaggacctctcgactagtgagctattacgcactctttgaatgtatggctgcttctaagccaacatcctagttgtcttcgaaatcccacatccttttccacttaacacacattttgggaccttagccggtggtctgggctctttccctttcgactatccaacttatctcgtatagtctgactcccatacatcatctacgcggcattcggagtttgatattcttcggtaagctttgacgccccctaggaaattcagtgctctacctccgcaagacttgtatgaggctagccctaaagctatttcgaggagaaccagctatctccgggttcgattggaatttctcccctacccacacctcatcgccacccttttcaacggatgtgcgttcggtcctccattgccttttacggcaacttcaacctggacatgggtagatcacccggtttcgggtct

SEQ ID NO: 7176 - DNA, 115 bp, Unknown
  gut microbiota DNA sequence
cgtatgaggctagccctaaagctatttcgaggagaaccagctatctccgggttcgattggaatttctcccctacccacacctcatcgccacccttttcaacggatgtgcgttcgg

SEQ ID NO: 7177 - DNA, 248 bp, Unknown
  gut microbiota DNA sequence
gctccgactgactatattcgccctattcagacttggtttcccttcggctccggaccttcagtccttaacctcgccagccagcgcaactcgccggaccgttctacaaaaagtacgcggttgagcatgtaaagctcttccacagcttgtaaacatatggtttcaggttctctttcactcccctcccggggtccttttcacctttccttcacagtactatgcgctatcggtcactaaggagtatttagcct

SEQ ID NO: 7178 - DNA, 243 bp, Unknown
  gut microbiota DNA sequence
actccgactgactatttcgccctattaagacttggtttcccttcggctccagaccttcagtccttaacctcgccagccagcgtaactcgccggaccgttctacaaaaagtacgcggttcatctaatattgatgttccacagcttgtaaacatatggtttcaggttctctttcactcccctcccggggtccttttcacctttccttcacagtactatgcgctatcggtcactaaggagtattta

SEQ ID NO: 7179 - DNA, 15121 bp, Unknown
  gut microbiota DNA sequence
gagggaggggaacctttctgaagaaaggttcccctccctccccaatctattacagatctaaaataaccttgcaggcgacggcgacctgatagagcacctgcgagatgtccttgacggcctgcaggttcttggattccacgcgaggcaggacgagcacctgatcgccgggcagcacttccttggcgcgggggacgacttcgccgctcggatggacgacgatgaggttcgattcgtcggcacggttgctgaatccgccagcccccttgatgtagtcgtccatatccttgtctttgttccagacaatggcttgcggcatcatgacttcaccgctgatgagcactacatcggtcttctcgggaatgacgatgacgtccccgtcctcaagggcgagatccgcgatgttgcccttggtgccgaccacgacgacgccctcgggctgcacctccttggcacgggaaatgaaattggacagcatttccgcttccttggagcggatctgcgcttcatcggagctggctgatgtagcggtataggcgttctgctccagacggcgcagggcgtcttcaatggccttcttctggcggacggccacgcttttgcgcttgatgtacaggccttcgaggttggcgcggcccggttccacggcgatgtagctcatgacctcgtgcaggcgcgtgttgcggcgcacggggaaacgcgacgcgccacggatggccccctgcgcttcgaccatgatggtatccccgggacgatccgcgaggaacctgatctgatcgccgttctcaaggcgcaacgccttgaaatcgttcatgggcagatacaggttgtagggagcgccgccgcgcgatccgctgaggctgacgtgcgtggccctcggctgcggatcggcaagctcgatgagcttcgcgccggtcagttcgccgggcttgaattcaaagcgcgccgtattgcggacttcgccggaagtgatgacggaaggccccttttcgccgacaacaacggtgtcgccgtcctgaaagcggatatgcggcatggcgcctttcagtgcaaagggatagaggtcgaacgagcccacttcctgcccttggcgcaatacgcggatattgcggtagctgccgcgcttggagtcgatgccgcccgccttgtcgaggaaggcgaggatggtatcggacggcgtgcccgtataattgccggggcggggcacgaagccggtcacgaagatcgagacgggctgggtgtccatcgggcggatatacatctccacatcgaccacgcccgccgcgttgagcttgctcttgatggcctgttcaagcggttctttggcatcgatgggcaggcccgccacaggcacgcgcccgacatcgggaatggtgatcatgccctcgggatcgacggtcaggatatcgtccatcgtgcgtccgccccacaaacgcatgatcaggcggtcgccgctctgtatgaccttactggttgaactttgggaaaagtgcccttgaaagaggttggttccaaacggagcgggatcggctgccggagccgcaggcgcagccggggccgaagctgtggcggtcgccgttgccgtggcgctggcggatgcggcatcagcggccgacgccggaagggcaaacgtcatagccagcaggcaataaaggaaaaacagcagattactgcgggaaaacaagggatgcctccagaaggatggtcgaacggcgtccaaaagaggacgacaggaaacgcccctcccggcgcgccggaaggggatgcttggatgtgccgacaggctacggcgtggaaatgcccttgccccacacgcggggcatgagccgccattcgccggggttgcttccgtcgccttcctgcccgttgtggcagatcacgacgatttccgcttcatgctgcgccgaaagcagagtagcccgcttgcaggtttcgcccgctgcggaaaggaaggcgtcttcaagcgttacacggacttcgccgccgaaagtttcatcttctatgaccgccgtagcgcctgtggcgttggcgaccatgaactgggccacgggtgaaagcggttggggttccactggggggggagtgggggcgctctgccaagagcagctgacgaggccgccgagcaggatcaggccgcaaaattgaagaaatcgcatataggtcctccgaaacgccgggattcatgttcccgctgtgaaagcgtccgtcagggtttctatacgttgtcaggccgtgctctgtccactggtatggtatggctggaggagggaggacgtgaggaagattggggaagggggagaaattttctgtagaaggggacccccacgtttatcccccttcccaaaaacccatcccccacttcaaagactttcaacgttatcgaatccctgatgaaggatggttctatggctggaagagaggggcgtgccgtttttgtttaaaaaggcaagaatgtatttatacttttgcgttgccgggagacgaaagcctccgaaccgatactgcgcggttcccgttgccgtcattgccccttgcaaaagtcttgggagggagaggggaggcgtttgaggaggggagagggggcctttgtccagaaaggttccccctccctctcctcaaggcttaattctttccagccatatccacgacccactgatgaagacgcaggtcatcggtcaactcgggatggaaggaggtggcgaggacgttcccctgccgcacggcaacggggaacccgttgacccgggcgagtacctccacgccggggccgatcttttcaatgagcggcgctcggatgaacacggcttcgaggggaggctgatccgttggattgccgttcgctgtggggaacgggcacagctccagcggagtcgtgaagctgtcgatctgccgcccgaaggcgttccggcgcacggaagcgttcaagaggccgatgcgcggctgcccgggatgatcgaggatgtccgagcagagcaggataagccccgcacacgtgccgaatacgggcatcccgctccggatcagctcgcgcacacggtccatcatgccccattcgataaggaacttgcccatgaccgtgctttcgccgccgggaaacacgaggccggagagaccttcgaggtcttcccgcgtgcggatttccacggtttcggctccgcagaggcagagagagcggacgtgttctcggaaggccccctgaatggccaacacgccgatgcgcggagcggacgttgcggccatcggtttaccagccccgttcctgcatacgctgttcgggcgcgatggtcgagatttccaggccgggcatggcttcgccgagatcgcgggagacttcggcaagaatcttgtaatcattgtagtgggtcacggctgcgacaatggccttggcgcgcttggccggatctgtggacttgaagatgccggagcccacgaacacgccatcaaggccgagctgcatcatgagagcggcgtcggcgggcgtggcgatgcccccagcggcgaagttcaccacaggcagacggccttcggcgcggatcttgagcacgagttcgagcggcgcgccgttttccttggcgaagttggcgacttcctcttcgggcagggcgcacagggcgcggacttcgccgaggaccatgcggcagtggcgcacggcttcgacgacgttgccggttccgggctcgcccttggtacggatcatggaagcgccctcggcgatgcggcgcagggcttccccgaggttgcgggctccgcacacgaacggcacggtgtagtcgcgcttgtcgatatggaagcggtcgtcggcgggggtcagcacttcgctttcgtcgatgtagtcgacgccgagggattcgaggatacgggcttcgacgatgtggccgatgcgcgccttggccatgaccgggatggtcacggcgtccatgatgcggaggacgatggtcggatcggccatgcgggcgacgcctccggccttgcggatatcggcggggacgcgctcaagcgccatgacggcgcacgcgcccgcttcctgtgcgatttttgcctgttcgggggtggtgacgtccatgatgacgccgcccttcaacatttcggccaggccggacttgagctggaacgttcctttttccatgatctatctccttgagaagctgctgattgcgttgatgatggacgcaacttaacagcgctccggagaaccgggggagcgatccggctggtcatggatcaatctttttggcgagcgggacaatgtggattgtcatggtgacaatgcatggaggtaaaaaagaatgtaaatacagcttgatgaagtgtgacggatagtgtgtcacctcaatgtgtgtctttttaaaagagaacctgtgctcccaaaagacctgcgaacagggattcaataagcacaaagctctttggaaagagaggggtggggtttggggaggggagggaaaagtgtggggttccccctttcttcagaaaagttttccctccccaatggctctacttgtcttcggccttgccttccagttcggcaatgcggaactcgacatcctcccagcgctggagagcggcggtctgctcgtcgtcaagctcggagatgcgcttggcggtagcgttgaatccgtcgggatcgcgcgcgaagaagccgggatcgttgagccggtcttccagcgtatgctgttcgtcttccagcgccgccatcttgccgggcagggcttccaattcgtccttgagcatttgaagctcgcgctgttccttgaaggtcagcttgcgcgggccgatcttggccggaggggccagcggcttgggtttcggcttgtcggtgtgggcagccacaggctcggggcgctggcgcagccagtccgtatacccgcccacgtactcgcgcacctgcccgtcgccttcgagcgccagtgtggtggtgacgaggttgtcgaggaactcgcggtcgtggctgaccatgagcaccgtccctgaatagctggcgagcagctcttcaagcagttccagcgtttccacatccagatcgttggtgggttcgtcgagaaccagcaggttggagggcatggtgaacagcttggcgaggagcaggcggttacgctcgccgccggaaagcgtgtgtaccggaaccctgagccggtccgattcaaagaggaaatccatgaggtagctggccacatgtcgctgctgcccgttgatggtcacggtgtcgttgccgttcgccacgttgtccatgaccgatttttcaggatcgagcgaggagcggagctgatcgaaatagctgacttcgagccgtgtcccgtgccggatggagccttccgtgggttcgagttcgccgagaaggaggcggagcagggtggtcttgcccacgccgttgttgccgatgagcccgatgcggtccccgcgctggatgatggtcgaaaaggcgttgaatacgcggtagccgtctgggtaggcgaatcccgcctgtttcgcctcgataaccagcttgccggagcgttccgcctcctgcgcgagcatggaaacgacgccctgacgcgacacgcgggccatccgttcggaacgcatggcctgcaacgcgcggacgcggcccatgttgcgggtgcggcgggccttgatgccttgccgtatccacgcttcttcctgcgcgagcttcttgtcgaaggccgcggcctgtttttcctcggcgtcgaggcgttcctcccggcgttcgaggaactggtcgaacgtgcaggcataactgtagagctgggagcggtccacctccacgatccgcgtggcgaggcggcggacaaaagcacggtcatggctgatgaagacgaaggttttgacccgccggacgaggaaatcttccagccacgcgatggtcttgatgtccagatggttggtgggctcgtcgagcagcaggttttcggaggcgacgagggcgcgggccagcgccacgcggcgcttgttccctccggaaagtgtggcgaagtccgcctcgggatcgagcccgagctggttgatcgcctcaaggatgtcgccgtggcgttcccagccttccccgctctggaggaggtcgcgggccagcgccagtttggcggcggagagctgatcctcgcggcccgtggcaatgagatgggcggcggccagcgcttcgccttccttgccgagccctgaggccaccacgccgaagaccgggccgctccaatgatcgggcacggcctgcggcatatgtccgaacgtgacgcccggcgtgcggacgatggtgccgccgtcgggcgtgaggtcgccggacagcagggccatcagggacgacttgccgacgccgttgcgcccgacgagacaaacccgctcaccctgctccacatgcaggtcggcggtatcgagaagcgtcttgccgcccagattgagcgtgacgccctgtaaactcaaaagtgccatgaactccctcgcaggatacgcgaaaacggatcgcgggaacgtttgttgcgtaagaaagagcgcggcgggaacgcttgggggcctttccggtcggcccggagcgcgccgcgcggcgctgacggtacggattctgccccgaaagatatgccgcttccttaaaagaagcaagggaatggccctgatgccgttcctgccgccatgtcgggcgtgatgatgcggcgcttgttccatgattcttttgacaccgaaaaactctgaagagcaccccgcgttgccactgccttttttttgaggtatggtcatggcaaatgtccttggctgttctgtggggagtggctctgttcggaagccggggaaacgaacgttctcatgggtggatgaggaaatcatgaaagtgcgcaatccctttgctggtctgttggccctgttttttgtggtcgcgtggtgcctgagcggctccgcagcgttcgccaagccccttgtgcctcttcgcacggcatggctcggcgagcatgaaacgtttttggtctggtacgccagagaaaagggatgggacaaggctgaagggctggatctcgaattgctgccctttgaatccggtaaaaacgtcattgacgaaatgcagtcgtccaattgggccattgccggcgttggcgccatgcccgcgctgaccgcttcgttgagcagccgcctgtacatcgtcggcatcggcaacgacgaatccgcttccaacgctattttcacgcgtgccgacagccccatcctcaaaatgaaggggtttaaccccaactgcccggaagtgtacggcaatcccggatccgtgcgcgggaagaccttcatcgtccccaagggcacgtccgctcactacatgttgagccgctggctgcacgtccttggcctgaacgagcgtgacgtcaacatcgtcgacatgcagccgtccgaagccatgaaggcgtttgccgacggccagggcgacgccatcgcgctgtgggccccccagacctttgaagccgaaaagctcggcctgaagactgtagcgcactccagcgactgcaatgcccgccagcccatcctgctcgtcgccaatatggattatgccaacaagcacaagggcgacatcgtggccttcctccgcgtgtatctccgcagcgtggacatgatgaagaagacccccgccgaggaccttgccgacgactacatgcgtttctacaatgcgtggaccggcaagaccatgacccgtgaggaagccatccgcgacatcaaggatcacccggtatacgctctcgaccagcagcttgatatgttcaagcagagctatgggaccagcgaactgcgtgaatggctgcacgatatcgtttccttccagaacgagaccggcgaactggatcggcgtgacttggcccgccttgagcgcctccattacgtcaccgacatttatctgaaggctgtgaaggcacccgccaaaaagtagtttttcgcaccgaaaaatgtttttgaaggtggttccgggatgttgcgttccggaaccactcttgtttgagaaagaggaggcgatttttgtgaagttctgtttgactttttccgtttgtttgagaaaaatcgccttccgtcttgtttcttcccggaaaaacgcaggctgcccgtgttcttttcgcgcggcccgtttttgtgtgtccgtttaaccggagcggctccgtggccgttccggtttcatctgtgtgccatacgggtaacaggtcggtatcaaagtatgtttttgaaaaatgaagggatcttgagctttttcaagccgtgtaggaatacggttgtggaaaagtttttcacaagccagtgcataacaagggcccctcatatgaaaacccttgtctcccaagggtaaagaaaacatcggagaagtggcggtattgcaaaaaggcctgtcattacgggtaacttttttatcctcctttgtgggaagccttttgcgccccgacgggcagaaactccgcgaatctgctttgtcacaggacaagtcaaacgctagaagaatcggatatgaaaactcagtggctcaaaatctgtgaagatctgcaaaacaggctcaatcccggcacctacaaggtttgggttgcgcctctcaccgccgaccttgaaggggaggggaagatccgtctgtccgcccccaatggatttgtggcgacgtgggtacgcgatcgcctgctgaacgacatttccgatgcggcttccgccattttcgggcggacgatggagatcagcgtggttgcgggcaatcctcccgccaagccgagccgttccgttccggggcgtcctgccgtctccgttgagggtgagcccgctccggcccgtcgtccccgtacggctcccgcgccccgtccggtggccgctccgtccctgctttcttccgctgccgagcagctttccctgcctatcaccatgcccgtgaaccagtccgtcccgcacaactggcggtacgcgttcgacagctttgtggtcggccccaccaatgacatggcctatgccgcggcgcgcaacatggcgcgttccggtgccgccgtggataccttgttcctcagctccgggccggggctcggcaagacgcacctcacgcaggccgtggggcaggctctgtgcgaggccagcaaccgctccaatcccaaggtcgaatatctgaccgccgaagagttttcgagctgtttcgtgcaggccctccagtcgaggaccgtggatcgcttcaaggggcgtttccgcgacgtggatttgctgctccttgaggacgtgcacttcctccagggcaaggaaaagatgcaggatgaggtgctttccaccatcaagtccctgcaggaaaaggggagccgcgtcgtcctgacgagttcctttgcgccctgcgagctgcggaacgtggacaacagcctcgtgtcgcgtttctgttcggggttcctcgccggtattgaaaagcccgacgccagcacgcgccgccgcatccttcaggagaaggcccgccagaacaacgcgctgttgtccgatacggtggtggatgtgctgaccgagcgcctcaccggggatatccggcagttggaaagctgcgtgcataacctgctgctcaaggccaagctgcttggctgtaccatttccgtggaaatggcgcaggaaattctggcgcagtacagccttgacgatccttttgtggatgtggattccattatccgcaaggtgtgcgaaggttttgggctctcgcccgagcagttggcctcccgcagccgcaagcagaatctggtggtggcccgcaacacgattttctatctcgcccgcaagcacaccgagttgtccttgcaggacatcggcgacaaattttcccgccggcattccacggtgctcaagggcatcgcttcggttgagcgcgagctgcgccgcgagtcgccccttgggcgtcagattgccggcacgctggctttgctggagcggcgttaggttgtattgggaaaccggggaagggaaagcctttctgaagaaaggctttccccttcccttgtccggcttcctcccgccctttccaaaggcttttgactttatcgaatccctcattaagggggcgggttccgtgaatggttttttgaaaagacaagggcatcccgttggatgcccttttgcgttacggcgttagtcgattaagggagcgaaacgaccgaaacatgcaaccactcgcttgcgggtagctgctgattggaaaacggaggaactcccttcagccttgcctccccattttgtaaaaaagtcttgggaaggagagaggaggggggaggaaaacccttctccaggaggctttcctctcccctctcccgattttcctctttccttttttcactccacaggcggattccaaccgctgtctccgcccgcgccggtggtggtaatgaagcggactgcggagaccctgccatccggggcgacgcgggccatgatgcggaaggtcgtgggcttgccgtgccgccgtacctgaatatcgtcaacccagccgatggtcgagccgaagcgcagatcgctgaatacgtattctgtatatccctcaaggggcccctccagcggaatttcagcctcaagggcggggtagagggcaaagcgctcgtacgctcggaacatgcggtcctttgcggcaagctcggcccagagcggctgcggcggcttggcgtaggcaatgaacgtctgaggctcctccgtgaataccgtatagcccgccacgtcccagacgctcccgcgatccagaatgagcttccagtggaaaggcgtgaaggcgtcgggtacgagatgcacggcgcgcacatcatcccagaggccctttccacgctgcccgggagccaaatcctcactgagaagctcttgggtgaaaacgtcgggcgtgtaatggctgtccttgagatgcgcttcaaggcccacccgtgtggccagcgagccgagcggatagaggatggtccagagcagcaggcctatcatgacggcgcgccgcttccgccagaatatgagcccaagggccaacggcaggagaagcaacgggtctacgataaacagcgcattcaaacgtaccctgtagtcgctgaacggcagaaagacctgcgttccgtacgaattcatgcagtccaaaaaaatgtgatgcagaatgagcaggtaggccgtgagccatgccagcggcagcggccagccgaatggcggagagtcgtcggggacttttgggacgcgccagcggttcatcagccaggggatgagggcaaggagcaaagcgagccccaaaccgccgacgaacgaatgggtgattccccggtggtattcaatgtattgcagcggggtgcgggtaaagaagacatccatatcgggagaagccgctaccagcgccgcccatgccggaagccaccagcggcgttttcccggcagggcgtagccaatgacggctccgctcaaggcatgtgtgatcggttccatagcgttccttatcttgcaaaaaaagaaggggaagggctttttccgtgaaaagcccttccccggtgtctcgccaaatggtgcggcgtatcacagcgttttatgccgagcgcacgtgccgcatccaacaggaaaataggctcggattgcccttgcgcaagccgctacccccagagagccggccagcgtcaaaagcgactaagggagtacgggggatgcgttgtgggcggcgttgtgggaatacggtttttctagaaaacaagagccattgcggacatcaatgctgcgaaaaggcaacgctgccctgaccaagcagatcgtgcatgtggaccatgccgagcaggcggcgctcttcgtcggcgatgggcaataccgtgatcgctttgctttccatgagttcaagaagcgtggcgaccgtatcgctttgggtcccgcagcggggagaaggcgtcatgacggtgctgaccggggcctcgggattgagcgtcccacggcagacggcccgcctgacgtcgccgtcggtcaggatgccgctgatcctgtgttcgttatcgagcagaagcacggctccgagcttgccttgatccagttggcgcagggcttccgacaagaggcttgtttcggaaagctgaggaaggccctcggtccgcatgacttcgctgacgttgagcttcaggcgttgccccaggctgcctccgggatggtagcgcaggaaatctttttccgtaaatgattttagctgcatcagacaaacggccagcgcatcgccgagggcgaggaccgcagtggtcgaggctgtgggggcaagcccgtgcgggcaggcttcacgggggacgcccgaatgcagcgtcacgtcggcaagacgcccaagggtggagtcctcccgccccgtcatggcgatcaggctggtgccgagcgatttcagcgcgggcaggatggcgttcagctccgccgtttcaccggaattggagatggcaatgatgacgtcgtccttgcggaggctccccagatctccgtgggctccttccacgggatggagaaagaaggccggcgtaccggtcgaggaaaaggtggcggcaagcttgcggccgaccaagccggatttgccgatgccggtcacgaccacacgcccggtgcacgccgccagaagccccagcgcaaggacgaggggggctttttccggcgtccgggcgttgagccggtcccgcacggcggcgagcccggcgatttcggtattcagaacgtcctgcgcgagcttgatgagcgcggcgggtccggtatgggaacgtacggattgtgtcatgggaaaacgtccttgaagcggcatggcgtgccgccgttacaagagaaaaagagggcgaacaggaagcatagaaaaagaatggcccgcaggcaagctggcgggggcggtcatctctcatgtggagaacaatatttctcagcctgttgacgatataagtcggttcacgtactcacgaaagaggctgttccgtccgtttttcccctcctcgcatccttcttttacgatatggaagcctttcacaatattgcaaggcgaagcccgttcgggtatccacctctctctaccatttcatttgggagtcccctattatggatattaaggaagtccgcgccaacgccaaagagcgcatgaagggtttttgccgtgtttgtcccgtgtgcgatgggcgcgcctgcgcaggcgaaacgcccggtatgggcggcatcggaaccgggagcgcgttcaagaacaatgtggccgcgcttgccggcgtccgtctgaacatgcgtctgattcatgaggtcaagaagcccgtcacggaaacggaggtgctcggattcaggttgcgcctgcccgtgctggccgctcccataggggggacctccttcaatatgggcggggccctttccgaggcggaatatgcgcgggccatcgtatccggctgccgcgaagcgggcattgtcggctgcgtcggcgacggcgcgccggatgaactgcacgaagcggggaatgccgccatcaccgccgaatgcggctgggggattccgttcatcaagccgtgggaaggcgaggaactggagcgcaagatgtacagggccgcagccaccggaacccgtgtgctcggtatggacatcgacgcagccgggctgattgccctggcccgcatgggacgccccgtgtctccgaaaccgtgcgcagaattggcagccatcgtggatcgttcgcatgagcttggtatgaaattcgtactcaagggcatcatgacggtcgaagatgccatcgccgccgagcgcgccggatgcgacggcatcgtggtttccaaccacggcgggcgggctctggatcatacgccggggaccatcgaggtccttcccgccatcgccgcgcaggtcaagggccgcatggccgttttgatggatggcggcatccgtgacgggctcgacgtgctcaaggcgttggccttcggcgcggacgccgtgctgattggccgtcccttctgtctcgccgccgtggggggcggttccgaaggcgtgaagctgacggcggatcatctttacaatcagcttgtgcgcagcatggtgttgacaggctgcccgtccgtccgcgaagccgggcgccacctcgtcagtacggcccctctcgcctaatccatacggagttttcatgaaagtcagtttgcctcaaagaaacaagctcgctcagtccatgttgtggaacctgttcctgctgactgtcggcgctgttttcttttctctcggcgcgcaggctgtggctgcgcatcacggcttccttaccggggggattttcggtgccggtctgctcggctggtatacgaccgggctgtttacgcccgcgatctggtacctgttgatcaatataccgttgttcttcgtgtcgtggttccaaatcgggcgccaatttttcttctacagcctgtacggaagccttgcgaccacgatcatcagtgaacttatcacgtttcaggtcccgattcaggatcacttctacgcggcgattacggcgggcgtcctttgcggtacgggtaccgggctcatgctgcggacgctggggtccggcggcggcctggatctcatcggtgttatcctgaacaagcgctggaacatcggcatcgggcggtttaatttctgcttcaacgcggtgatgttcctcgcttctatggcgaccatttcccttgatatggtcatcgtgtcgttcattcaggttttcgtggcttccgcgactatcgaatacgcgctccgtatgggcagccagaggaagatggtctacgtggtcaccgatcggggcgaggcgctgtgcgaggcgatcatcgccgaaggctacggcggcgcgaccgtgctcaagggcaagggcgcgtacagcggcggcgaccgcgagatcatccttaccgtaaccaacaatatcatgttgcggcgtctggagaaccttgttttcgccattgacgacaaggccctcttcatcgtggagaataccttctacgtttccggcacccggtatccgcggaagtcgattatttaggagaacccgccttgggaaggaagatgccttttttcaaaaggggcccttcctcaaaccacacctccatcctcctcaaccttttgtaatggcagatgatggttgctgtgacgcggatgtcggctttaccggagtccccctgttttgctccagaagagaaccattttccggatgccataaacaaaagagcccttcaggaag

SEQ ID NO: 7180 - DNA, 7352 bp, Unknown
  gut microbiota DNA sequence
gggaaactttctttagaaagcttccccctcccttccccaatttcctttcttactcggcttcctcaatccactttttcagcggggtttccatctcttcgcggatggcggcgagggcctcggcactgtccgcttcgaagcgggtgacgaggacgggctgggtgttggacgcgcggacaagcccccagccgtgggggaaattcacgcgcgcgccgtccagctcgatggtgtcgtagagggcgcgaaaatgggctttcaccttttcgaccacggcgaacttggcgttgtccgggcaggggatgttgatttcgcgggtggcgaaggacgcgggccagccggggagttcggtcatgggcttgtcctgcgccgagaagagggcgacaaaccgggccgagccatagatggcgtcgtcgaagccgtaccagttgtcggcaaagaacatgtggccggacatttcaccggcgagcggagcgccgacttcctgcatcttggccttgatgatggagtgcccggtggtccacatcatgggggtgccgccgtgcgccttgatgtcgttgaaaaggcggctggagcacttcacgtccgcgatgaccgtggagccgggcttgcgggtcagcagctcacgggcgtagagggacaggacttcgtcgccgaaaagcaggcgcccgtcgggatcgacgatgccgaggcggtcggcgtcaccatccagcccgatgccgagatcggccttttcttccttcacgcgggccatgagcgcctgcatgttggcctctacgacgggatcggggtggtggttggggaaatcgccgtccggctcgcagaacatggggatgaccgttgcgccgagtttggtgaggatgtccgcgcagatttcaccgcccgcgccgttgccgccgtcgagcaccactttgaccgggcgggccagcttgaagcggctgaggatatcttgcttgtacgtggggatgatgtcgatgcgcgaagccgtccccgtgccctcggcgaaggcgccttcctcaaaaatggccttgatcttttggatttcttcgccgtgaatggtggactgtccggcccataccttgaacccgttgtattccggcgggttgtggctggcggtgatcatgacgccgccctgccggttgaggtgcttgaccgcaaaatagagcgcgggagtggggaccatgccgatgctgattatatcggtcccggtggacaggatgccctccacaagcgcgtcgtgatacgcgggcgaggagtggcggcagtcatagccgatgaccgcgctgctgatgcccctgccggccagataggtgccgcaggctttcccgagatgggttacccattcggcgttgaaatccttgtccacgacgccgcgaatatcataagcgcgaaatacgttgcctgcgttcatttttttcctccggatgtgcccgttgcccgttgtaaggcgtgcaaagtgtgtacggcatgttagaaaaagagaggcgttgagtgcataaagaaccgtatcggccggttttcatatgatgcggccttgatgcgtttgagattggagtggccgcggccctttttatagcagacaccgcctccgcccgcaaatgagaaggaaaaaggcttggcggacggcaacaggataatgcgtgccttctggtcgttagaacggcgaaagtcgcgttcttggaagaaaaaaactaaatgaacttgaccgtctgtgcaggatgacctatattttgtaaactctgaatccatttggcaggcaatcccggaacggacggatcccgcctgcgcccggatggatttgcccccctccgaaggggacgtgcgatgcccggcctgtgccggtgcgctccgcatgttccggcacggaggagtttttctggccatataaggaatcttgatgaactgggactgggacaagctccaagagaaacggcagaggcagaactggggtaacagcaataacaacagtaataacaacaataataacaataagaacgacgaagagccgcctttcggcagtgggagcggcaacggcggcggcaaggggccggactacgagaagttctccgacgccttcaagcgcctgccccatctctccgcgcccgccggcggcaaggtcaagtggatccttgtcgcgctcgtcgccgtatggctgctttccggcatctatatcgtcaatcccgatgaagagggcgttgtcctgcgcttcggcaaatacgaccgcacggtcggagccggcccgcattacgcgctgccctttcccatagaaaccgtctacaagcccaaagtcacgcaagtccagcgtgtggaagtgggcttccgctccgtagggcagggccgcactttccagcagggggcgaaccgttccctgcccgaagaatccggtatgctcacgggcgacgaaaacatcgtcaacgtacagttcagcgtccagtaccagatcaagaatccggtggaatatctgttcaatgtgacggatcaggccgccgtggtcaaaaacgctgcggaagccgccatgcgcgaagtcatcggcaacagcctcatcgactccgcgctgacggacggcaagctccagatccagacggaagccacgcagcttctgcaggaaatcctcgaccgttacaaggtcggcgtgcgcgtcatagctgtccagcttcaggacgtccacccgcccaaggaagtcagcgacgccttcaaggacgtcgccagcgcccgcgaggacaagagccgcatcatcaacgaagccgaagcctaccgcaacgagctcatccccaaggcgcgcggcctcgccgccgaggtggagaaccaggcgcaggcctacaaggaaacccgtatccgcaacgccgagggcgaagccaaccgcttcctcgcgctcctcaaggagtacgagcaggccaaggacgtcacgaagcagcgcatgtatcttgaaactatggaagaaattctcagccgtcccggcatggaaaagctcgttctcccgaaggacgccgccgatcgcgtgctgccgctgttgccgctcatgcaatccgccccgtccgccgggaagattgcgccccaagaacaatcttccgggacccagcttccggaagcaaccctgagcagaccgagggggaataactgatggaaaagcgttttccctttctgatcggcctgatcatcattctggttctgatcggttcccagagcatctttatcgtcaatcagacggaaaaggcgctggtgatccagctcggcgatcccgtggacaaggtgttcgggccgggcctgcatttcaagattccgcttatccaaaccgtcgtgcgtttcgacgcgcgcgtattagattatgaggcaagggccgcagaggccttgaccagcgataaaaaggctatagttctcgataactacgctcgctggcggatcatcgatcccttgcagttctacagatcggtgcgcacgatcccgggagcccaggcccgtcttgacgacgtggtgtactcccagttgcgcgcccaggttggtcggcacagcctgaccgaggtcgtctcgagcaaacgcagcggtatcatggccgacgtgacccgccgcgcttcggacatcatgaaagagtatggtattgaagttgttgacgtgcgcatcaagcgcaccgacctgcccgccgaaaaccagcgggccattttcggaaggatgcgggccgaacgcgagcgccaggccaagcagtaccgctccgaaggtgtcgaagaagcgacaaaactccgttccgaagcagacagggaacgggcagttatactggcagaggccaaccgccgttcatccgtcatccgtggtgagggcgatgcgacggcggcacgggtttttgcggaagctttttcccgcgccccggacttctataagtttcagcgcgggcttgaagcgctcaagaagagcttcgagcaaaattcccgcattgtgattacgaacgatgaccctttcctcgcccccatcagataaccccgggggtatggagtttttcaatgacgttttttcaggaagtttatgaccgcatccgttgtgcgacgaatgccagaacccaaacggaactggccgccgtgcttgaaatacggcagtcaagcatttcggatgcgaagcgtcggaattcgatcccttccgactggtacatgaaactgttcgaaaagttcgggctcaaccccgattggatcaagagcgacaccggcccgatgttcctgaagatcgatcaggtatacacgccggtcgaaggcccgccggaagggttccacgaggaaccggcccactatgcggaccccaacgccatcagcacgctgactaaggtctattcgacgcaatgcgcgtatgaagaggggcatcccgccccggatttgcagacttcgggcaagattgccctgccgcagtcctatgtcaatgcgcagacgctcgtgtttcatatcgaatcggattcgttttccccgctggtccgccgcggggcttatgtcggggtggatacttcgcgtacgcaccccatttccggcgaagtgtacgccgtatacatgccgcatgagggcgtggcgcttaagcgcctgttcctcgacggcgatcatgaccgtttcatcctgaggacggaacagcccgcccatcccggcgtggcgttgctccctcaggattgcccggggcgtatcctcggcagggtgtcctgggtgttgcagaatgtgtaaagcataaccgggggagggcgctttttgaaaggagcgtcctcccccggacccccacccgcaaaacttcacgtttatcgaatccctgttcgcggctttccctgttggtcttttgggcctgtggagaggccgggagcagggattttatggactgggaggattggaggggcggataatgtttagaaagacgtggtgaaccgtcttttttgaagagggtcgtttccctattcaatgcaaaaacaggagagtgttttggagagttccgtgatgcggcgtactttgagcgccgttttgcttttgctggcgttggctggagcggggtgcgcgcagaaccggatcgtgtacgcgcaatccggcgtgcaagtgcagccgcctcaatatccgtcctatcagggttcgtacacgaacggcgcgatcccctcggcatggctgcccctgtaccagcgcttgcgtgccgacggtctggacggcccggatttgccggcgctcttcgcctcaatgggcacgccgtcgcaagaccccatgggccgcaagatcaaggagctgtataccaaggccttcgctcccaagccgaaacccacgccgccgtcctcaaagcccacaacgcccgcccggcccaagccgctggtctatcccggcgtgatcaccgccgagaacgtggagaaatgccgggccttccttgaggccaacaagccggccttcgattatgccgaacggacgttcggcgtgccgcgccagatttccgtgtcgctcctgttcgtggaaacccgcctcggcacgttcttgggcaaggagaaggcgttctacacgctggcgagcatggcctcatcccggcggcccgaggccatttccacgtatgtggcgcagcttcccggctccacagcggccgatcgccaaagctggattcagcagcgtatggagcagcgttcggactgggcctacaaggaactggtcgctctgctcaagaatatccgctcgtccggcgaggacgcgctggccatgccgggctccatttacggggctatcgggctgtgccagttcatgcccacgaatatcggccactacggagccgacggcaatggggacggcgtagtgaacctgtttaccgtgcccgacgccgtggcgagcctcgccaactacctcgcgcagcacggctggaacaaggccgcgacccgcgcccagaagcagaaggtcatcaagacctataaccgtatagatatctacgccaatacgattctcggccttgcggaggcgcagggatacgtggcggagtaagtttccctcctccgtccaaacgggggagggttttcgtttcgtccttcacggaattgtatccgtccgttcgccaaggcgtcacggaagcggcgtatcagttgggcctgtctctagacgggccaaacttttattcggagaatgaaaatgacgtatcgactttccggcaggctgttgaacaagggcctcatgggtgccgtggccgcactgcttctgctgatgagcctgctggctccggcacgggccgagctggttcagtttgtctatacctctgaccagcattacgggatcacccgtaaggcattccgtgggctggacaaggtgtcctcccgcgaagtcaacgcggcgatggtgcaggccatcaatacgcttcccgggatctcgcttcccgaggacggcggcgtccgggccggacagcccgtgcagtgggccgatgcggtgatctccaccggcgacatcgccaaccgcatggaagggaccgacgagcgcctgatcccctcggccacggagtgctgggacctgttcaagaagcagtatatcaacggcgtttcgctcaaggaccgtgcggggaaggcggctgaagtgctggccattcccggcaaccacgacgtgaccaacgctgtggggttctacaaggcgatgaccccggcgaaggacaacggctctctgctcgccatgtacaatcgcgcgaacaacacttcgctggcgcccgaagcctttgacgccaagcgggacaaggtgttcctgaatcgggaatacggcggcgtgcgtctgcttttcgtgcagatgtggcccgacagcgcggctcgggcatggctcgacgcgcaattggccaacgtcccttccggaaagccggtgctgctgttcacccacgatcagccggatattgaagccaagcacctcatcaatcccaacggttccggggacatcaacgccaaggacaagttcgagaatctggtttccgacgtgtccagcgttcaaaaggccaaggaaatcccggtcaaggaacaccgggagcttgcggcgttcctcaagaagcatccctccatcgttgcgtatttccacggcaacgagaattacaacgagttctacacgtggggcggcccggacaacgacatcgccatgcccgtgttccgcgtggattctcccatgaagggcaatgcgtccagcaaggacgagaagctcctttcctttcaggtggtgagcattgataccgacgtccggaagatgaccgtgcgcgaagccctctggaacgccgatcccaagcatccggcgattacgtggggggaaagcaagaccatcgggttttaagcgctgaacgttgaaagaatgtgaagatattggggagggggaggagaaactttcttcagaaagtttctcctccccctccccaaaccccac

SEQ ID NO: 7181 - DNA, 1768 bp, Unknown
  gut microbiota DNA sequence
aagtatttgaagaagaaaaagttgccggcaaaacaaaaggaaaagatgatcaaagaattagagcaggaaatgaaagaggcagctcgtactttagatttcgaaagagcagcgcagttaagagatatcttatttgagatgaaaggtgaaaaatagtcgcattgtgaaaaaataaacaaattaattgcataatgaaaataagtgtgttattttatttgcgaacatagattcaatgagttcttcggggcagggtgcaattccctaccggcggtaaaagtccgcgacccacgcaagtggctgacttggtgtaattccaagaccgacagtatagtctggatggtagaagacacaaaagtattttttgtattttttagaccccgagaagatttttcttggggttttccttttggaagagcttatccgaatcaaaaggaggtaaaaagatgaaaaaatggaatgttcaaacaattgtattaacagcgatgcttgcaggtcttgcaggagctttgatgtcattggaattttctttaccaatgatgccaccgttctacaagattgattttagtgatgtaccaagtattattgccctatttagtttagggcctgtgtcagctgctttggttgaagtcattaaattagttgtaaaagttgtgacagtaggaacaaatacagcttatgtaggtgaactcgcaaatcttttaggtattgccctgtttattttaccaacatggtttgtgtacaagaagatgaataagacaagaaaagctgttattgtttctttagtagttggaattctaattcgtaccgtattcgcatgtttctgtaatgcatgtattactttgccattatatgcaaaggccatgggtatgccacttgattctgttgtacaaatggtaggttctgtaaatccaagtattaaagatttaacttcatttattgcgcttgcgacaattccatttaacttgatcaaaatctcagctaactacatcattggatattttttgatggaaagattggcagccattcgtccaagctttaaatttatctacgaggctaaataagtatgatttgtaagtatcaagaattaacgcgtttagaaatggaacaagttgatcgggaaaacacaattgttttgattccattaggcgcattagaacaacatggaaatcaagcaccacttggtacggatacactcattgccggtgcaatgtgtgactatattgaaaaagagttaaaggacgaggacataaatttagtattgtttccagttattcctgtcggattgagtacagaacataaagacttttgtggatccattacttttaaacctatgacttactatcatatgttgtatgacatatgtgaaagtttagcgcatcatggatttaaaaagctggcttttcttgtgtgtcatggaggcaatacaccgattgccaatttaatttctagagaagtaagaagtgattttaaagtgtatccatttgtcttaaactcaggagcctttgatcatccagatgtaaaggcaacgatttctacagggaatacatttgattttcatggtggagaaatggaaacttctatggtcatggcgattgatgaaagtttagttaaattagaaacaagtgaaaagggtattcctaaaaatacagctatgaaagcccacttgtcttggcttgcatccgattgggtaactgaacaaggaaagcctattggaattggtggagatcctagtggtgcaactaaagaaaagggagaaatcattttaacaatt

SEQ ID NO: 7182 - DNA, 7869 bp, Unknown
  gut microbiota DNA sequence
ggggaaactttctccagaaagtttcccccgccccctccaaatattccaaatgccctaccgggccgtttcccccaaggcgcgaaggccgccgagcatatacgccagcatgtcttcaagcaggccctccgcatcgccggcagtggcgggaagcatgagggtgcgtagcttttccggaaagaggatgagccccatgcaggggagggcgacaagggcggttgcccgttgcatcgccggggaatccggtggaaggcccgtgatgtcccgtatcagttcccggagtttctgggatttcgggaataccgccgttgtgatgaatttgggcacgaagggcgagggcgaggccagttcgcgcaggaatatcctgatcccccagagctcggaagcgttcatggcggtacggatgatgtgcttcaggaacacacggagcttttcttccggcgtcgcctcggaagtgatgatccggttcaaatcctccaggctcagcatttgccggtgcgcctcgatcagcacttcctcgtacaggccttccttgccgccgaagtagtagttcacggcggcgccgttcgttcccgcccgttcgcagatttccttgctggtggcttcggcgaagccccgttcggcaaagaccttgcctgctgcctcaaggacaacggcccgcgttgagcggccgtcgctccgttgcgcgcgtttggggcgctgagggggattggttttgttcatcatggctttttttaggaaaaattgggcgacaagtcaaattttaaattgaaattttaatttgacttgatattatccttttcctattcttgtattcaaggcagattgttgcgagccgttcgcgaatggcgtcccggaacatttgatccgggggagggctgcggttcccgcgcccccggtttctttcattctgattcttcatgtcggaggcatccatgttgaagcgcatcattgtgattctcgttgtccttgcctgcgccgccggaggcatctggtggctgtacgacgggaagcggcagccttcggatctgctgacgctgtacggcaacgtggacatccggcaggtggatgtcggttttcgcgtgggcgggcgcgtgaccgaactcttcaaggaagagggtgatgcggtgaaaacgggggaacgcctcgcgcgccttgatgccaaaccgtatgaagaggtctttgatcaggccgccgcccagctttccatgcaggaaatcgaattgaggaagatggttgcggggtatcgcacggaagacatcgagcaggcgcgcgccaccctgagcggggcgcaggccgtatacgcgaacgccgccagcaacctgaggcgcgttgagcggctgcggcagcagaacgccgtttcccagcagtcgcttgatgaggcgcgcgcgtcctatggtgatgcgctgtcccgccgcaacgccgcccgcgaacagttgcagctcatggagagcggataccgctccgaagacgttgagcgccagaaggcggcggtggaggccgcccgtgccgaactcgcccgcgcaacgacgaatttgcaggataccgagctgttcgccccgcaggacggcgtggtcctgacacgcgtgcacgagatcggcgcggtggtgcagggcgggcagaccgtctacaccgtgactctgaacaatcccgtgtggatacgggcctatgtcacgcagccgaaccttgggaacatccggcccggccaggaggtgctcctgtccatcgacgccacgccggacaaaacgtatcggggacgcatcggctttatttcaccgaccgccgaattcacgccgaagaccgtggaaaccaaggaagtgcggaatgatctggtcttccgtttccgcgtcatcgccgacgatcccgacaacgtcatgcggcaggggatgcccgtcaccgtgacgctccgcaaggacggaggcaagccgtgagcccttccccgcaggctgtgatccggcttcagggcgtttccaaggtttttcctgacgtgccgccgggtacgcctcccgcgctttccagcctgacggcggatgtcccctccggtttggtcgtggggcttgtgggcccggacgccgcgggtaagacgacgctcatgcgcttgctggccgggctgctcctgccgacctccggcagcgtggaagtgctcgggcgcgtgcccggctccgaggcgtcggacgaagccgtccacgatgtcgggtatatgccgcagcgtttcggtttgtatgaagatctgtccgtcatcgacaatcttaacctccatgccgaactgcgcgggcttgaaggcccggcgcgtcaggccatgttcgaaaagctgctgacgttcacggcgttgaagccgtttacggatcggctggcgggaaagctttccggcggcatgaagcagaaactcggccttgcctgcgcgctgctgaccacgccccgcctgctgctgctcgatgagccgggggtgggcgtcgatccgctttcccggcgcgagttgtggaaaatggtgtccgagctcgccgtgggcggcatgtcggtgctttggtctacggcctatatggatgaggccgagcgctgcgcccacgtgcttatgctcgatcaggggagccttgtgtatcaggggccgcccgccgggtttacgggccgggtggcgaagcgcgtcttttccttcgtgccgccgtccggcgaagcgcgggcgatgctggcccgctggcagcaggagccggatatccgcgatgcgctcattcagggcaaccgtatccgcgtggtgctccgcaatccgcacgacggcccgttttcccgcaaaggtgttgaattgcatcccgtcgagccgcgtcttgaggacgcctacatcgacgccgtgggcggcatggatcagcggccttccccgtttttgcctgtgagcggcaggggtggggcggaagatccgggggagggaaggggaaacttttcaggagaaaggttatccccttccctcccccggaccccctcccttccccttcccaagattttcacacgcgggcgggaggcggggggcctttcggaaggcggggccgcctctcggccttccgctgaatcggcaggggcaggcggctctcatgcggaagagagtgccaagctgagcaatcccgccgtcgcggatgcctcctcaacagagccatcttcggcctcttcgccttcggggaagcatgggaacagggattcgataagcgcaaacgtctttggaagaggagggatgggggcctgggggaagggaggagaaagcttttctccagaaaagtttctcctcccttcccccggcggttccaccccgcaccccgctcccgccgcacagcctgtgatccgcgccgtgagcctgaccaagaagttcggaacattcgtcgcggcgcacgacatcacgttcgaggtgcagccggggcgtatcttcgggctgcttggccccaacggggcggggaagtccacgacgttcaggatgctgtgcggcctgtcccgccccaccgagggcgaatgcttcgtcgcgggcatgaacctgctcaccgctggcggggccgcacgggccaaactcggctacatggcgcagaaattttccctctacggcgaactgaccgtgcagcagaacatgcggctcatggcggatctgtacgggctggaacggggcagggtgaagccgcgtatcgaacagcttgtcgaggcgctggatctggaaacgttccgggacgtccgggcgttcaatctgccgctcgggcagaagcagcggcttgccatggcctgcgccacgctgcacgagccgcccgtgctgttcctcgacgaaccgacatcgggcgtcgacccccggacgcgccgggaattctggaagcacatcaacgccatgacccagaacggcgtggcggtgctcgtcacgacccactttatggaagaggccgaatattgcgacgaaatcgcgctggtgtttcagggcggcatcattgcgcggggcacgcccgacgagctcaagggcaaagcgcccggagcggcgaaaaacggcggtgcggcggacatgacgctcgaagaggcgttcatcgcgtatattgaggaagtgcagcgcaagggaggtcacgcatgagcaatgccgatccgggccgggcacggcccgtgttccagtggctcgcgcagcttttcgcgctcatgggcaaggagagcaagcagatcctccgtgatccgtcctcttatctggtcgcggcaatcctgcccatgatcttcctgctgctgttcggttacggcattacgctggacgccggggtcatggacatcgtgatcctcgacgaaagcaacagccagtccgggctgcaattacaggaaaatttcgctcactccccgaacttccgggtccatcaggcccggtcgcgttccgaagccgggcgtatgatgcgcgacagcgtgatttcgggcttcatcgtcattccctacaactttgaggcgctgctcgttggcgggcagggcaaggcggccgtcgcccccattcaggtgatcgtgtcgggaggcgagcccaacacggcgaacttcatacgcggctacagccaaggcgtcatcgccaactggcagcagacccgcacgcccggcgggaccatccggaagcagcccgtcgacgtggccccgcgctactggttcaacccggcggcgaagagccgctggtatctggtgcccggctccatcaccatcgtcatgacgctcatcgggaccatgctcacggccttggtcattgcccgcgagtacgagcggggaacgatggaatcccttttcgccacgcccgtgacccggatgcagatcctgctcggaaagcttatcccgtattacttcctcggcatgttttccatgaccatctgcgcgctggccggggtgttcctgtttgaggttcccctgcgcggatcggtgtttgccctgtttgtcttgtcgagcaccttcctcatgcccgcgcttgggcaggggctgctcatttccattctcaccaagcagcagcttcttgccgcccagaccgggctgatcaccggctttctgcccgccgtcatcctgtccgggttcatttttgacatcaacagtatgcccgacgcgctgcaataccttacgctggccatccccgcgcggcatttcaacacggcgcttcagacggtcttccttgccggggacatctggcccgtgttccttccgcgcatggcctttatgctcgggcttggcgccgcctttttggtcatcacgtacaggaagctggtgaagcggttggatgtgtgaaccttgggagagggtttccggaaaaagggagcccctccagcttcttgcctttctccaatgaaggggcaatgggcgccgcctgttaccggaggtctattttatgatgcgaacgcttcgccgtatccttgcgattgcgcggaaagagctgctagtgctcatgggcacgcggcagagccggttcatggtgctgattccgccggtcatccagatattcatctttgcgtgggcggccacgatggaagtgaagaacgtggacgtggtggtgatcaacgaagactcggggtactggagccaggaggtcatcagccggctgcgcggttcgccaaccttcaggcacatcacgttcgaggacgatttcaagaaggccgaagaagccatcaaccgtcaggacgtgctggtggtgatgcacttccagaacgacttttccgccaaagtggagcgaggcgtgcccgccgaagtgcaattgttgctggacgggcggcgatccaacaccgcccagattttgacgcagtatgtccagcagatcgtacaggggctggcaacggcgacgcccgctttcgtgcaggccaagccttcccgcgtcgaggtcgaggagctgaactggttcaacccgaacctcgatttccgctggttcatcctgccgaacctgatcggcacgatcaacttcttgatggggatgatcattaccggcctgaccgtggcgcgggaacgggagctcggcacgttcgaccagatgctcgtctcgcccgcgagcccggtggagatcgcctgcggaaagctgatccccggctgcgtggtcggccttgtgcacgggaccattttctttttctccataatcgggttcttcaaggtgccgtttgtggggtctgtggcggtgctgtacgtgaccatgctgctgttctcgctttcggtgagcagcatcgggcttatggtgtcctcgttcgcctccacgcagcagcaggctttcttggggtgcttcaccgtgggcgtgccgtgcatcctgctctcgggattcatgacgcccgtgaacaacatgccgatgttcttacaggatctgagccagcttaaccccttgcggcattttatcgtgatccttcaggggctgttcctcaaggatatcaccatgagtgcggcactggacagcagcgcgcggatcgccgcgatcacggcggtatccatgctgtgcgcgatctggatgtttacgcgcaaggcatagggcccgacacgttgcgtatcgattcaggaatggctataaagaaaagagcatgtcgcgcaaggcgttgccggggccccgcgaagggcgtccgggaggcgcgccgccggtagcaaagacgcatggaatagtgtacgtgagttccactcagggatcaggcgcagcccctgcccggcaggaacgccgtcgtccctccacctttacctgaggagatacgcttggaccgaagtacggacaaaagtttgtgggatcgggtttgcaacctgttcggaggccgctcgggcgactcgatcgagcaggccgtcatggaagcccgcgacgaaggggaactggacctcgccgaaggctccatgatcctgagcatcctgcgccttgacgatgtacaggtgcaggacatcatgaccccgcgaactgatttcgactgtatgcctacgggcgcacccgtgagcgaggtggcgcagtgcattctggaaaccggacattccaggttgcccatctacaaggatacgcgcgacaacatcatcgggatcgcctacgccaaggatctcatcagcctcctcgtcgatccggccaagcaccatactgcggtggacgaaatcatgcgttcgcccttttttgtacccgagaccaagatcgtgagcgagctgcttcaggagttccggtcccgcaagaaccatatcgccattgccgtggacgaatatggcggaacgtccggcctcgccactatcgaggacatccttgaggagatcgtgggcgacatcgaagacgagcacgacgcgcccaaggaagaggatatccatcctctcggggattcgcgctatgcgctgtccggccgcgcctaccttgaggatctggaagaactcggcatcaatctggaggctgacgaggtggataccatcggcggctacctgtgccttgaagccgggcatgttcccgagaagggagaaattttcgagtgcggcggctggcggttcatcgtggacgaagccgacgccaagcaaatccgccgtgtgatcgtggaacccgccacgcaggaagagagcggcgccgaatagacggatgagaaggctcccctgcaaggggagccttcgatgcaggaaaaggccggaacccagcgttgggttccggccttttccttttcatcttgcggacggttaccggcgtcctctgcccggtgttggaggttgccgccgggcagttctggaacagttttcctctgaaaatttcgaaggggtgaattgaggaatggcattccgccgctcctctccaacagaaaaagatataaaggaagcaatgagcggctcgttcttttctttccacacaacggaacttctgcgcgctgcctccccaccagtcgaagtttttgcgggtgggggctcgggggggagggcgcttttttcaaaaagcgccct

SEQ ID NO: 7183 - DNA, 3999 bp, Unknown
  gut microbiota DNA sequence
gagagggctttctccagaaagccctctcctcccttcccccacattttacatctttcccgtataaatcagaatgccgttggcaatgccgcgcgcaatggaggcgcggtatgcgtcgacggccagacgttcggcttcggtcttgttggtgcagtagcccacttcgatcagcacgccgggcaccccggaacggcgcaggacatggaagggggcggtcttgatgccgccgtcgtgggtccggtaattctttttcctgagatacttgagcgtcgtctcgtggacgttccgcgcaaggcggcgggattcctgtttctggatggtgaaaaggcgatggggcggcagcttttcccgcgtggcgcggctgcggtcgcggagggcgttttcgacggcggcgaggcgggttgaggccgaggtgcgggaaacgtcgagatagtacgtctcaaacccctgcacgccttcggacgggttggcgttgacgtggatggaaatgaacaggtcggccttgttggtgcggactttgtcggccctctgctccagcgtgatccatgtgtcggagcggcgcgtgtaccggacgttgaggccgcgcgaggacaggatcgcccccacgcgcttggagatgtccagtgtaagatccttttccctgatgccgttgtggtgcgtgccggggtctttgccgccgtgccccggatcgatgagcaccgtttttacgccgagacggaacggtttgcctctaggctgtttttgcttgcttgccttgctggcggcggaaggcgattgccgtttttctttgggcgagagcgtcgcaaggtaactggaggcgtccttggccgtattggaagaagggtattttttgaggatctgttggagcagttcttgcgctccggccttgtcgcggaggatctggccccgcagccgtgccgcccggtacaggctgtcgtcggccagcgagcttttgggatagaggcggacgagctggagataccggtccaccgagcgccgggcgtccttggcattggaggcgcagcgggccaaatgatccagcgcttcggcggagcggaacaaggccgctgagcgctctttccattttttttcgacccggtagacggtcaggaaggtttcggcaagcttttcccacggctcacgctggagccgttttttggatttttgaagctgccccatatcccggatggctttatcgtattttgccgggttggggccggcagcggcgggggcggcggatacgaacgcgaaacacaacgccagcagaatgcaccatgaaaggaacaggctgtttttatgagtaattttgttttcgtctcttggctgttgtgaggtatccatgccgtagtggggggaaggttttttgagcggttgcgtgattttcatcaagagtaccaacgggaaaaagaaaaaacaaggaaggataaccgtgaaagggtgagaaaggcggcatggacattccgggatatccaaggcacggtgagggcgccgtttttcccattgcataccggcggcgcacggtatatagcttgcggcttctgattgattgaacaaacagtattcttccgaggctcccatgctgtccatcctttccacgctggttcccgtatttggcatcatcctgtttggcatcgtcgttgaacggatgggttttttgcccatagaaacatcgggctgcctcaaccagttcgtctactggatcggcctgcccatgatgctgttcaaccagcttgcccgtatggaagcggggcagatgtcgggagccatggttgggggcatcctgctcggctacgggatcacctacctgttcgcatacgtggtcttctcgagcctgctgcggaggcgttgggaggaaagctcggtgttcgccctgctgtcgagtttcccgaacgcggcgttcatgggcttgccgatcgtggtgctcctgctgccggacagttccgaggccgccatcgtcgccagcctttgcgctgtgatgacctccgcgaacctgcttttcacggacggcaggctggaagccgggaaacatacgggcgagggccgcaagcaagtattcctgtccctgctccgttcgctgttccacaatcccctgctcatctattcggcgctcggcgcggcggtgagcctgctccatatcgccgtcccgaagccgatcctgtcgatgtcggccatgctcggctccacgtccgccccctgcgcgctgttctgcatgggcatgatcctctccaagcagatgacttcctcgcagggcttcgtaaagggatgggccaggcgccagtttcctttgcacgtgctgaaactggtggtggagccgcttttcattttcggcgtcctctacctgctcggtgtgcgcggcatcgcgcttgcctcggcgaccatcgtggcggccatgcccacggctgtggcggcttatatcattgctgaaaaatatcaggtggctacagaagactcttcgctcggcatcgtggtagatacagccttatcggcggtgagcatccctctgctcatcgtggcgttccaatactacggtctgctgtaggggggagaggcgttgccgcaggagcagcaaaacatccgccgctggctggtgcggcttacgggccccatcttcatcgagatggtgctgatcatcctgctcggcattgtggatacggtcatgctcagccagtgctcggacaacaccgtggccgccgtgggcgtggtcgtgcagcttttgaacatgatcttcctcgtctttgaggccacgacagccgggacgtccgtgctctgttcgcagttcctcggggcgcgccagatggacaacgtattccgcgccatcggcgtatcgctggccttcaatatgatgatgggcgtcatcgtcagcgccgccctctttttcggggccgaacgcatcctgcgccttatggaactgcggcctgaactcatgggcgacggcgtgacgtatatgcgcatcgtgggcgggttcgcgttctttcaggccatctcgctgaccctttcggccatcctgcggagcgctggcatggcctattatcccatgcaggtgacctttctcatcaacatcatcaacatcatcgggaattatacgctcattttcgggcatttcggcttccccgcccttggggtcgaaggcgcggccatctccacgtcgttcagccgcggcgtagccatgtgcctgctgctcttcatcctgttccgcaaaaaactgacgtttcccccctcctttctctggcccttccctttcggggtgctccgcaagatgctgtccatcggcctgccttccgggggcgaacagctttcctacagcctttcgcaggtggtgatcacctatttcgtcaacatgctcggcaatgaggctctcgccgcacgtacctacgccgtgaacatcgtgaccttttcctacgtattcgccatgtccgtggggcagggcggcggcatctgcatagggcacctcatcggcaaggggcacaagaacgccgcattgctcctcgggcggtactgcatccgcatcacgctgatgatttccttttcggtggccctgctttccgcgctcctcggaaagagcgtcatggggctgctcagcgacaaccccgaagtcgtatccctgaccgccctgatcctctgcatcgacgtcgtccttgaacttgggcgcgccgtcaacatcctgtgcgtgaacttcctccgcgctaccggcgacgccgtgtacccgttcatcatcgggcttatcttcatgtggggcgtggcgaccgtcggcggttacgtgctcggcgttacgctcggcttcgggctcgtcgggatgtggatcgccttcacgatggatgaaagcatccgcgccgccctcttctggcgccgctggcagagccggcgctggatgggcaagagcatcgtcgcccggtagatgagccttgaaagggcataaaggcgctacagaaactctctctctctctctctctctctctctctctctctctctctcctgtcgcgggaacgaactcctttcgcgcg

SEQ ID NO: 7184 - DNA, 39965 bp, Unknown
  gut microbiota DNA sequence
ggggaggagaaactttctggagaaagtttctcctccccctccccaattccctattccctttcaaatgagcccgccttttccaggtagcggcggaacagacggacggaggggcgcgaatgggcgtcgaagtcggcggtcagctcgagtcccggaacgatggcccggaccacgggaaactccagatcctcacgcgtcagctccacatagacgggggcgtgcccatgcgagatgagcacttcttccagcagccggaggttgtcggagggcgagccgagccggtaatcgggcagttcggagaggcggcgccgcgcgaggccagccggaaccggcgcggaagccgggccgttgggatacggatagggggtctcggtcagcgccgagagcagagcccctgccccggaaagccccgccccggctccgcgaaccacggaaccatcgccgcaggttacgaagctctggtagcaggggacgccgaattccgtggtcatgtcccggaaccagacatggatgccgcgccgggcgtaatccgcgagaagtaccgccaacgggtgctcgccgtccgcgagcagctcgaagcactggccgcgccgccacggtaccgtggcttcggcgtcgcgttccagtatttcagtgagcgcgccgaccttggcttcatcgagtgtgttgcccgaagccatgcccgtggaacccggcgacagaaaaagagcgggctcgtcgagattgcagaacaaccccacggcctgcaccgggacgagtatcgcgctgcccgaaacgccgcggccttccatccagtaaagaggctgatcgttgtactcggcgtcgatgggcaggccgcgcggatcgatggcggcccggccttgcgccagcagttccgcatggctggcccggacaatcggcgtggggtggaggcgatcggtgatggcgtccccgtccacggacagataggccgaagcgcgctcgaccatctccatcgagtaggacgcccgggccgtggcgatggacaggccgcgcccccatgtggtggcttccccctgcagggtatagtcgagcttgccgttgcgcacggcgatgtccacgttccagtttcgcagtagtcccacgggtgcgagcgaggattcgtgccgcatttccgttccggcgatcacgccgcaggtggccagcgaggccagcgcttccgccgccgtatgctgggccggggggcgggaccagatgggctgtccgggaacggcccgctcggcgtgaacctccgccgccgtgcgtccgtgtttgggcggctccgcgttccgcacatacgcgggcaaagggagatcgttgtcgtcgggatgcggcaggggatggtgccgggaaaggttttcttcgaacagcgcgttccatgcggcaaggttcgcttgctcctcttgcccttctttcgtgagggatttgcgggcgaagctgaggtacggcaggggggtggccccttccagccgttcaagttccccggctgagacgccgttcagcattccggcgtgtccggcgttcaggaatgccgtttcgtagagcaagcccatgagcaccggacgggaaggcgtacgcagcgcggcggcttcatccgggggcaaggccgcgatgcggcgcagcagatggcggtgcaaaaattcgtcgagaggggcggcctcaaggcgggcgagcgcatcctcaaagcagagatcttccggcggctcgcaggaaaagtatccggtcatggattcggtggaggcgtgggtatagcgataggggagggtggtcgtgggcatggctgtcctcgggaaaaagtgaaatcggcttgcgttacgttgcccaaaacggcgggaaaaggcaaacgcgcctttggtgcggaacgggctggatcccgtgttgtttcgcatggtgccctgcctttgcggaggtggacttgccgccggaacacgtggacgggtcttgacatttccgctgatatggataaaagagttcgtttcttacgtaaaaaatcgcgctccggcgcgcaggaggttatcatgagcgacgaaaaaaccctcgtgggtgccgtcaagactgagcagggcgttgaagtgaagggtatgctgatgcagcccgtcgttgaaaagtgcgaaggctgtgatcgcgttcgtacgtttgaagagcagcagttctgtggcagctacccgaaccccgccaagaagtggttcgacggccgctgcaactttgctacccacatcaagacggaaagcggcaaggccgccaaggtcaacccgttgaaggcgtccaagcgtgctgcgaagggtcgttaagccgttcggaagcgttttgctcgcgggtatgcaccgcaatttttttgagaacgcccgtctttgggaagggcgttctcccaaggcagggggaggcttcgtcttccccctttcttattttccgaagccgtacacgaggaacatatgacacgtttttctcggcttattgagtccatcggacagcagcgggacaaggtcatcgaataccagacccgcatgacggaactccccgctctcggcccggagaacggcggcacgggcgaaatgcccaaagccctgtatctggaagggctgttgcgtgagctcggcgtaacggacatcctgcgcattgacgcgcccgacccgcgggtccccgacggcgtgcgccccaatgtggtcgcgcgcatccccggcgcgtcgccgcgtcggctctggattctggggcatatggacgttgtgcctccgggagagctttcctactggaagaccgatccgtggaaggttgtcgtcgacggcgacaagatccgtggccgtggcgtggaggacaatcagcaggccatcgtttgcggcctgctcattgcacaggaattgaaggcgcagggcatcacccccgacctctcccttggcctgattttcgtttccgacgaagagacttccagccgttacggcatccactacatcctcaagacccacgccgatctgtttggccccgacgatttcgtggtcgtgcccgattacggcgtggcggatggttcctccatcgaaatttccgagaaaggccagctgtggatgcgcgtcgaggtgcttgggcatcagtgccacgcgtcccgcccgcaggaaggccgcaactcgctggtcgccgccgccgatatgattctgcacgtgcgggatctggaatccatctatgctcaggtcgatccgctgttccagcccccgtgctgcacgttcgtcccgacgcgccacgaagagaacgtccccaatatcaattccctgccgggcaaggacgtgttctacatcgactgccgcattctgccgggcatcagccacgacgacgtgctcgcctccgcccgggagatcatggaagccgtggcggagcgtcatggcgtgaccgtggatatcaccacggtgaccaatgcgcccgcgtcgcccgcaaccccgcccgacagcgaagtggtgctccgcctgtccgccggtatccgtgagatctacggcatcgagccgcactgcgacggcagcggcggcgggaccgtggccgtgggcttccgcgacatgggcatccccgctgcggtctgggccagcgtcgtgccgacctatcatctcgccaacgaatactccctcatttcccgcaccatcggcgacgcgcaggtgctcgcccggatgctgtttgattaggggatgatgaagattggggagggggaacccttctgaagaggggcttccccctccccaaacccgacccctttccctcctaaaggcttttgtattgttcgatggaggggcgggcggcttgggaggctgtttcttgctgggcgtctcccggcggcttgttgaaagggaacatttcggtatagccgggactctccctgcttctttttcaaagaatactcctttcgcgtcccctccccaccagtcgaaagtcttgggaagggtggggtacgggggagggagaacccttctccagaagggtttccctcccccgctttttcccaaggaaaagcttatgttcgattgtatagtcgtaggcgcgggacatgcgggctgcgaagccgccatgacgttggcgcggttcgggcagcgcgtgctgctgatcacgggcaatgtggatcgcatcgggcacctttcgtgcaaccccgccatcggggggctcgccaaagggcatatggtccgggaaatcgacgccctcggcggcatgatgggcctgtgggccgacagggcgggtatccagttccgcacgctgaacgccagcaaggggcccgccgtacgggccacccgcgcgcagatcgaccgcgacagctacatggaggcggcgaaggccgccctgttcgccgagccggacatcaccatctggcaggataccgtggacgaggtgctggagcggggcggacgcgccgccggggttcgcaccgagctggggcagacctttgaggccccgcacgtcatcctgaccacgggcacgttcctgtgcgggctcatccatgtggggctcacgcattttcccggcgggcgcctcggcgatgccgccgccatgaagctttcggattcgctgcggaagcacggcctcaccctgggccgcctcaagaccgggaccaccccgcggctgctccggtcgtccatcgatttttcgcaaatggaggaacagcccggggacgatccggctccgggcttcagtttttacgggccaaagcccggacagccgcaggtgccgtgttatgtgacgtggaccaacgagcggacgcacgacgccatccgatcgggtatggaccgctcgccgctgttcacgggcgtcattgaaggcacgggcgcgcgctactgcccctccgtggaggacaaggtggcgcggtttcccgagcgtgagcggcaccacgtctttatcgagccggaagggttgaacgggcaggaatgctacgccaacggcatttccaccagcctgccgctggatgtgcagcttgccatgattgccagcatccccggcctcgaacatgccaagatggtgcgtcccggctatgccatcgaatacgactatgtggacccggtacagcttgagcccacgctggaggccaaggtactgcccggcttgtggctggcggggcagatcaacgggacgtccggctatgaggaggccgccgctcaggggatgtgggccgcgatcaacgtggggtgccgcctgacgggccgccagccgttcctgccgggccgcgacgtggcctatatgtctgtgctggtggatgatctcgtgacgcgtgggacgcaggagccgtatcgtatgttcacatcgcgggcggaatacaggctgctgctgcgcgaagccaatgccgacgcgcggctgaccccgctcgggcgggagctcggattggtgggcgacgaacagtggtccgccttccggcgcaagcaggacgcattggggcggctgctggacatgctgcgtgaagtgcgggtttcgccggacgcggcgacgagcgacgctttccgcgagctgggcgagcccgtgccgaacaagtcgctgacgctggaggaagtgctcaggcgtccgtccatgacgctggaacggcttgagcgcctgcatcccggcgtgacggcttttccggaagaagtccttttggaggcggagacctccgtgaagtacgcgggctatctggtgcggcaggacgagctggtcaagcgctccgcacggcttgaggaggtccgcctcccggcggatctggattacccctccgtttccggcctgtccgccgagatcgtggaaaagctctgtaccgtacgcccgcgtacccttggccaggcggggcgcatttccggggtgactccggcggcgctgacctgcctggaaatccatctgaaaaaacgctccctgctcggatagccatgaagaggtggccgcttgaagccctgtttgccggatccggcggcgtagcctttccccggatgaccgcgcttgtgggggccgggggcaagacgacgctcatgtacgcgctggcccggcgcatggccgatgccgggcggcgtgtggtctgcaccaccacgaccaagattttcccgccggaggatggccttcccgtggttctcttggaaggcgcggccgatcccgttgccgccgtccacgatgcgctgagcgccgcgccgtgtgttgtggctgccgggcgtccgctgccggatgtgcggaagctggacggcgtatccccccgtatgcttgccgtactgtcggcggcgctgcccgaggccctttttcttgtggaggccgacggcgctgcccgtaagcccctcaaggcgcccgcggcgcatgaacccgtcctgccggagcctctgggctgttgcgtggcggtggtcggtctggacagcgtgggtcagccgttggacgacgggcacgtgcaccgttccgcactggtttgcgcggcggcggggcaggagccggggagtctggtgacgcccgcgacgctggcctgtctggtggagcaccccgaagggctgttccgcaactgtccggcggggtgccgccgtctcgtgttcgccaataagggggacgggccgggggcgcttgatgccgcttccgaagccgccgccctgtctcgttccgtggcgtggtttgcgggaagcgcggcccagggctggtgcgtcccgttgacggcgggggctcaacggacgcttggcatggagcccttccgtgatctaccatgctgagatggaaggcagagtggtgaaacaatggttcgtgatgggatcggcgtgccgttttatggcgctcgccggtttgctttgtctggcgttgctgctctccggctgcggtacgacatatatttccgcacccgattacggtgggcggtatgatacctcttccctcggcgcccgggtcgctcagaccgcgcgttcccagatcggtgcgcattaccgtctcggaggcaccacgcccaaagggttcgattgctccgggctgatctggtgggcctatcgtcagcatgggatcaatgtcccccgcgtgaccgatgcgcaggccaaggccgggtacggcgtggggcgcggcattgccatgcgtcccggcgacatccttgtcttcgataccaatcgcgggcgcacggggctccataccgcattgtacacgggcaacgggcggttcgtgcacagccccaccagcggcaagcgtgtccgtgaggacagtttggctcaggaatactggaagaagcggcttatccgcattcggagaattgtgagataaaaaggtaagcctgaaaggcaggctttttttagcaagaacctctgctccttcaatcctctcccttctctctgaatgttttcggctgcgcagaggcggcgcgggaagcgtcaagccgtttggcaatctgggatgccagcagtttttcgagtgcgccggattggcgaagggaagaaccgagcagcccgaagccgggtgcggcattgggctggcaacagatacggaagttgaggaagagagaaaagaggttccggtgagggaacgtcggaaaacaggtttcctcaccggttcaaaagcttctcactggtgctggaagccgctctcgtcgaacgaaagcggcgcgctgccgtcctcttcggcttcaagggcggcgaccttgtcttccagccattccagcatggcccgggcggtgtggtagttcatgaccacacgcgaatggatatgccgggtgatggtccgctcctcgtcattgtaaggggcgatttcatggccgaagctgccgtcgggggctatgatacgttcggagtacggcggcatcttgtcgctttcgagatagaagctgatttcgatttcgccttgcgggttgatgcccccccatacgccgtgggtatactggaggcgggtttccgggtcctgttcgtactcatagcgtatccggctgggatactgttggctcattgacggctcctttgaccttgctgaaacaaccgcgtcatgcggttttgggtattgtaggaaagtgacgggatgaagtaaagttgcctctcccgtccggcggcttcttatcaggcccgccaatattgtacggtatttttgaacatctccaaagaggaaagcatgaccgcattcacgacggaaaaaatcgatgtagaaccgtggtttgatatggaactgttcatgggcgtcagccaggagacccggcttggcggcgacgtgatggaccgtttcatgacgctgtggaagaactggctcccgcacctgaccgtgaagggcatcgacacgggcaagatcaagtatcttttggtcgctctcgacgagagcgtggagcaggatgtggacaaggcgtgggaaggttcgccgtccaacgcgttcttgtacaacgcgctggcgcagaccatgtgcatggccgccgtacacgccgtgatccccgaagtgcaggacgcaggctgcgcgcccgcccccaaacccaccgccacgctgcgcgaagcgctggaggccgagggtatcccgtacagcaacgacaaggatcccatcctgtcccgccgctatgccgtggtaacgcactatcccttcaaagggggctgtgagatctgcgtgcttcagagcaactgtcccaaggggcagggccagatggaagccacgtccgtggtccttcccggctacgagcaccctcagcagatgtgatgtggatgttatgaaattgggggagaggaaagggaacctttcccctcccccctttctctttccctccaaagactttcgactggtggggaggccgcttggagggcgttcgtttgatgggcggttggaatttggggcagcgggctcggcggagaaatcggctttggcgttatgcatgaaagccgatgggttgcgccgggctcggaaggtggccgccgttgggcggcaacagaatgaactggagtggaagacgggtatgcgcgttctgttgttggatcttgggctggaactgcggggcggccagcggcaggtgtattatctggcccgcgcgttggcccgcacacccgacatggagccgttggtggcctgtcctcgtacgggaaagctggcggagctgctgcgtgatgaaggtttgcccgttcagggcttgccgggccggagccctgccaacccgttgctgctgcgctggatggggcagcggctgcgcgattttcccccggatattgtgcacacgcacgacgccaacgccgctacggtaggcgcgttctacaagctgctgcacagcggcacgctcttgatccacagccgccgggtttcgtatccgctgcggcgtgggctgcgttcgtggaaataccggattgccgatgccgctgtgggcgtcagccgggaaatcgccgacggcatgatccgggcgggcatccccgcctcacgggtcagcgcgatccattccggaatcgatccttcccgttaccgccctcgtgaggcacgccaggatgggggcttcctcttccagagcataggcgccttcacgcctcagaaaggctacagcgtgcttgtccgggcgatggcggaactgcggaagcgctccctgcctccgtgggccgtgcgcatcgtgggcgatgggccgctgctggatcccatcaaagaagaagcccgtaccctcggcgtggatgctctgctcgcgttgcccggccgccgggacagcgtggacatgctgccggactgcgacgctctggtggtcccgtcagtggacggtgaggggagcagcggggccattaaggaaggctgggtgacgggagttccggtgatctgctcggcgctggcttccaatcaggaactggtgcgcggggacgagaacggactgcttgccgccgtgggcgatcccgtgtcgcttgccgacgcgatggcgcgttgcctgaccgatgaaagcctgcgggcacggcttgccgaggcgggaagccgatccgtgctggagttcaccgatacccggatggctgagcaatacatggatctgtaccgccgcctcatgggaaaaggcacggaatgatgctttgccaaggatatttttaacgcctctgtgatttttccgggaatttctcctgcatactctcggtacttccggtatgcttgaagcaacacgccgcacaacggggatttcgttctgcggcgtgttcggtatggctgggctgggaagaagataaagcgagggggaaagaaacggcgttctttcccccctgaggcatcagctggcggaaccggatttacctgtagatgtccacatcatccacgaggtgcggcggttctcccttgaaggccttgaccttgacgcggtcgccggtcttcaattcggtgaagggcacgtcctgatcgggcttgtccctgtgttcgagttcgaattcgctgcggtcatccacacggaacgggatcgccttgccgtcccggtccttcacaacgaaggtcttttgggcgggatcaacgctttccacagtgccgcggacacgcattttgtgatgggaaccggcaaaggccgggacggaaaaagcgacaagaacggcaaccgcaaaggcggcgcacaacgtacgtttgagcatggcagccctccttttgcaccccacgctaggaagtgccgccataaaaagccatgagtatcatcccgaacggtttgattttttatgtccattgcgggaaaacggcaggccaagcatcccgcctgccggaggagggcaccgcagggattcggtgagcgcaacacgttgggaagggagggaaagcttccttcaaaaagccttcctcccttccataagaattctcagcgagtcaaaagcaagccgtgctaaagtgccgcatcgccttcttcgcctgtacgtatgcgccaagcgttttccaccggagttacaaaaattttcccgtcgcccacgttgcccgtgcgtgcggcttccatgacagcctgaaccacgctttccgtcatggaatcgtggactacaatttcaaggcgtattttcgccacaaaatccacttggtatacggcggcccggtacacttccgtatgcccgcgttgccgtccaaagccgcgtacttccgtgcaggtcataccgtggatatcaagggaggccagtttgtctttgacattgtccagagccgagggacgaatgatgatttcgagctttttcatagtgttcccccgttagatttggtaggcgcgctcgttatgctcgttcatgtccaacccggcgatttcgggatcgggcgctacacgcaatccgactagcgtatccaccacgcgcaggatgatcaggcttgccacgtacacgaagccccacgtccccacgacggatacaaactgcacccagagctgtccggggttgccatacagcaggccgtcgacgccgtttaccgaggacactgcgaagatgcccgtggccaacgccccccatgtgccacccacgccgtggatgcccacaacatcaagcgcgtcgtcgtatcccaagcggttcttgcacagcacgccaacgtaacacactatcccgccgaccagtccaatcaccagtgaagcccagatgtccacgaatcccgctgccggagtgatggccaccaagcccgccagtgcacccgaggccgcgccgaggcttgtgggcttgccgacatgcttccattccaccagcaaccagcccaggacgcccgcagcagcggccatctgtgtggtgaccatggcatgtacggccaaatggtttgctgcaagggcactgcccgcgttgaagccgaaccagccaaaccagagtatgccgccgcccagcagggtcaaaggcagattatgcggtgcaaaagattttctgcccagacccagccggggaccaagtgtccgtgccgccgcgaggccgcccgccgccgaggccatgtgaaccaccgctccacccgcgaagtccacagcgcccatcttggccatccagccgccgccccacacccagtgggccatggggcaatacacgaaaagcagccacagtatggaaaaaagcagcattgccgggaagtggatacgctcggcatacgaaccggatatgagcgccagcgtcagtacggcaaacatgcactggaagagcataaaaagcagtggaggaatgccgctggcggctccggcaccctccatgtccacgccgcgcaacagaacatgcgaaaaaccgcctatgatcccgccgaggtctggaccaaaagcaagcgaataccccacaacgaaccacaataccggtacaatgcccatcgtaatgaaactgtgcatggtggtggagagcacattgcgtgagcgtaccaacccaccgtaaaacaaggctaggccaggggtcatgagcatgacgagccctgtgcagatgataataaacgctatgtccgccggattcatggtcctacctctcttcctgtttgtgcacccaaatatgataatgcctgtgcgttttgggtgacgttcatcctcccttaagcatgaggtgtgccgctggaatgccaattcaagcaacatattagtattgttatattttgtatttcagtatggtataaaaaatactgttttccgaaggggtatccttcatgcttctacggatatgtagaaaataaacagagacaacggcctccgtcgcgggaaccgagcagcatgaatagtcaaacctattcaataacaccatgttataaaggaaaaaagaaacacgaaaagctaccattcggttagaaaagcggcatgtgtttcagagattttctacaagtatgtattattagaaaagaggcattggtaggagccgaatcttggatgggagtggaatcaaggaaaaacaagccagccagagcgaatctccacgtcttctgccagcggggaacgccgcgaacagggattcgataagcgcgaaagcctttggagtgggaggggaggcgcggcgggggaaggaggacctttctaaaaaaaggtcctccttcccccgccacattcccacaattccttcccccttaaaaagcctcgccgccggcgaggagatcctcacggatgagcttgcggagcttgtgggccacggggccggtcttgccgtcgccgatgggcctgccctcgaaatgggtcacgccgatgcattcgtgcgccgtgccgaggatcatcatctcccggacggaatccagctcggcctgcgggatggggcggatctccacgggcatgaacgttttggcaagctccatcgccttggtcgccaccgtgccgaccagcgcgttcttgaattcggggagcaccagcgcgcccttggcgtcgaccacggctacgttggcaatggccgcttcggtcaggcagccgttcgcgtcaaaggtcagggcgacgtccatgtgcttctgcatggcctcaagcgtcatgaagacggcggaaaggtagttggtcgtcttgaggcgggcgaacatggcgggcttgaccggcacgtcgctgcggaaggcggtgaggcccttgtcgtaccatgcgtcagtgcgcaccgggacgcggtaggcggccacgtacaggctgggctgggggcactccttgagcgcgatgccgaatccgccggggccgcgtccggacaggatgcggatattgccttcgggttcgtctccggccttggctacggcgagcacgatgtcccggatttcctcgatggggcagggcagggtgagggacagcccggcggcggagttggcgagtcgccgcaggtgcgcatcaagatggatgaccttgcgctcggtgaagcggatggtttcgaacacgccgtcgccgcgatggacgagatgatcgtccagcggggccagcatcagccggggatcgcggcagatcgcgccgaaacggtgttcgtagaaagccagaatgttgtccgcgccgggacgttccagttcccggagcttctcgatccatgcgttcgtgtccagtacgggaatcatgacaaacctctttctggtggtttcaagggtgggttgtctgtgttcttactcccttcagggcgaaaagaccagattggggcacccggtttcccggatgccccaatcggaaggaacggttcgcaggaaccggacttacttcttgatgaacacggtgcgatccttcacgccgagcaggtcgcggcggaccagctcttcggcgatctggacggcgttgagcgcggcgcccttgcggatgttgtcggcgacaatccacatgttgaggccgttcgggatggtatcgtcctcacggatgcggcccacgtaggtggcgtcttcgcccgcggcgtcgaccgcgagggggtacatcttttcggaggggttgtcgtacacctgtacgccgggggcctgcgcaaggatggcgcgggcttccttggcggaaagcttgcgttcggtttcgatgttcacggactcggagtggccgtagaacacgggcacgcgcacgcaggtggcggtcaccttcacgttcgggtcgcgcatgatcttgacggtctcatggaccatcttcatttcttccttggtgtagtcgttctcaaggaagacgtcgatgtgcgggatgcagttgaacgcgatacggtggggatacacgttcacttcgggctctttcagattgaacatctggcggacttgcgtttccagttcgctgatgcccttctgcccggagccggaaacggcctgataggtggagaccaccacgcggcggatgcccgcgacgtcgtgcaggggcttcagggccacgaccatctggatggtggagcagttcgggttggcgatgatgccgttgtgcccttccagcgcttcggggttcacttcgggcacgaccagcgggcaacgttcgtccatgcgccacgcgctggagttgtccacgacgatgcagcccgcggcggcggcgtggggggcgtacttttcggaggtggagccgcccgcggagaagatggcgatgtcgatgccttcgaacacatcttccttcagttcgcgcacgaccagctcggaatccccgtaggggactttggtcccggcggaacgggccgaggcgaagggaacgacctcagtggcggggaagttccggctttcaagggtcttcagcatttcacggccgacggcgccggtagctcccacaacagcgacaacgagttttttttcagacatggtatcctctatcctcgaacaaaaaaggaaagcctcggagcatgtgattttcgcaaggcgttcgacgttcatctaacgggttgccgtcgctgtcaagtccgttggagcgcttttcacccgaaatccgtatccttttttgatagcatttcgggcattcacgtgtgattgggcaaaagccttttggatatcaaagggttccgggctttccgcatcgaggcgcgcggaaggggggcgcggcgcaggccggttgccctttttgacataaatgttatttctatcgcgccggatcgggaccccgtttctccgcgcctggggccccaaaacacgggaacggcgttagagtcgcttgccagccacggtgtttgttcttatagtttgaccgtaaagtaaaggcaatctacgtcgtcaggatacaatccggaagatttccggccccgtacgctgacaaggagtattttatggccactcgtctttctcccgctgatgaagcgccctttaacatccagatcaagaatctggctgatgaagagcttctcgacttttgggaagaaacccagcagatcgagagcgccttgcgtgccgaatatcagcaaacggtggttcctgttcaggattatgaacgtcttatcgtgctggagctgcagttgcgttcctgccagcgccagaagtcctgcggagcctgatcatctcttgaacacatccgtttcggcccgtccggcgccggaacgtcctaatggcataggaaccctccccttgttgcgggagggtttttggcgtccatgcccctgacgatccgcgtggcgaaattgacggtccggcacgcttccaagaatccgcacgcggcgtggaacaatcggctttccttagttacgctatccgtgtcctgtggcgttgcctgccgctaggcgctttctttttggccgtcaatggctgcttcaccccgtgttcccttcataaacgaaaaggccggaactccccttgggaggagccccggcctttttatttttatggacgttactgcgcctgctgaggcgtgtggtttttgtgttccttgattttcgtgacttcctcggccaccgccttcttgagatccgcagaggtattcgggttatcgagcgccttttggagctgctcgaggcccttgtccggctgttcgaggtagtaggcgtagaggatgccgaggctgtagcgtacggaaggatcttccctggcggcgacgaccttttcgaggctggcggcggcttcggcgttgcggttctggctgtgctggatgatgccgagcatgtagagcggctgcgtttcgttgggcgcggccaccacggcgcgcagggcgaacgtctcggcccgctgccagtcctgcgtgtgcatgaagtgctcggtcaggccgacgagggcttcaaggtccgtggggtttttctggagtttctgcatcagggccatgacgccctgctgcgtggcttcgtccatgcccgcgcttgtgggcatctgctgccctgacggcgcggcggcctgcgtcccggtggtcgtatgggagaccaagccggggttggccgagaagtaggacagggtggacacgagcatgagcaccagtccggccgtgatgagcagcaggatggagcggcggttctttccgaaggtctgatcagtcattgcgcagggtctccagctgggtaaggcggcggttgagggcaatctggttgcggagcaggaacgcaaggtaggcgccgagcccgatccatacggcgatattcgcgtacatgagccaatccatgtcggtcatgaggggactccttaagtaacattaaggtttgccccacccttcctaagacttttgactggtggggaggctacgctcagggagtcctgtaaatgaggaaaactcccatgtaacctccggaacccaaaaggcgaaagtttttggaggaggggggccggggggatcttttttcaaaaaggtcccgcctccggttctttctctagattacaactcgccatgaacggcgaggccgtcgaggcgttctttctgcttgatctgtaaagtgcggaggccgacgaggcccgcccagacaagcccgaaacaggcgacggcggcgatggcggcgatcttcatttcgggttcaagcccgccggacttgttggcgaacacggcgggatggatggaacgccacagccgtgcggacaggaacaccagcggcacgtccacgaaggccacgatgccgaccaccgcgcacaggttcgcctggcgctcgcggggcatgtccatcttgcgcaggacgaggtagcccgcatagaggaaccagaggatcatcgtcgtggtcaggcgcgggtcccacgtccaccagacgccccacgaatggcgcgcccagatggagccggaaacgagcgccagcccgctgagcaccacgcccacttcggcggcggccccggccacggcgtcccagtggcggttgcgcgtcttgaggtaggccaccccggacacgcagacgaggaagaagctcacgaaggaccaccacgccaacggcaggtgcgtgtagaaaatcttctgcaccagtcccatcgtctgctcgacaggcgcataccgatagataagcacctgacaggccgccatgagcacgccgccgagcacggcgcaggggagcatccatgtgtatcgcatgagattattcgtctcctgaaaagacaaaggggaagaggacaagcccggcggcaaggaacacggcgtcaaaggccacggcgatgccgagccatgattccacgccttcgggcagcgcttcgctgaatcccccggcgcagacgcggatacccgccagcaggatggggatgatcagcgggaaaagcacgatggacagcagcgactcccgcgcggcctgcccttgcgacagcgcgccgagcagcgaaccgagcgacgccatgccgatgtcggtaagaacgagggcgagcagggccagcggccagccgtccccgagcgactgcccgaggaacacgatggtcgccggaaggaagaggaactgtgccgtcaggatgatgcacaggcccgccgccgccttgccgagcagcacggactggaccggcgtgggcaggagcagcagcccggcccgcgaaccgttggcctcttcgagcccgtacagcatattaaaggataagacctgacagaacgccgaagacagccagaagatcgtggcagccccttgcccgctcatggtctccccggtttcccgggacaagctgaacacgaagatgagcagcagcccgagcaggagcgcctgcacgagcccggccccgcgtgaaagcacgaggcgcagatccttgcgggcaatgaggcaggcggctttcaacatactgcctcctcggtgcggacgccttcatacccggaggcgggaccacagtagccgatggtcctgttctcaatggcgatgatccggtcggcgcgcttggcgtccccggctacgtcatgggtgatccagacgatccccgcgccccgatcgcgggatgcggcgatctcccggtgcaggatggcgagggaacgcacatcaagcccggtgcccggttcgtcgagcaagagcaatgggggcgactggaggaggatgcgggcgaggttcagccgctgcgccataccgcgcgagaaggtcccggcccgttcttcggcaaagggggccagttccacgcgggccagcgcttcggaaagcgtcgccttgtccgtcgggttcccgtgcatcccgctccagaacgcaaggttctcgagcgcggtcaggccgggatagatgaacgtggcgtgcccgagatagccgagcccgccgtcctcgcaaaaccgttcgacggtgcccacggtggggcgggccagccctgccatgatcttgagcagggtggtcttgcccgcgccgttcgcgccgaccagcagcgtgaccgtgccgggatgcacctcaaacgagatgttcctgagcacggcacgggcgccgaagagttttccgattccggcgagcttcagcagcatcagttttcccggccgttgcggcgcctgaagctgacgaacggcagcaggcacatcaggatgccgccgatccacagccagttgaccagcgggttggagctcaggcggaacaccgcccggttctgctggtccaccgccataagggttgcgtagaattcattgcccagcgaagggatgaccgcggcctcggcgaactgcatctgcccccatttggcgtagacgcggcgctgcggcgcggcgatgccgatgagcttgccgtccttgcggacttccagctcgccttcaaggaagatgtagccggcgccttcgccctcatacaggtttttgaaggtgacttcgaactggccgaccttcacggtctcgcccatagccatcgtgggttcggattcgatcttgtacgggccggagaaggcgatgccgagcgcgatgagggccaccccgatgtggatgccgtaggcggcgaagctcggggcatggctgtatacgggcctttcgaagagtttcaggctcatgctgaccagcgcggcgacgctcgccgacgcgccgagcacggcgacgggcagggtgtagccgagggaatacatcgcggcggccgcgccgatgaaggagcacaccacaaggaggagcttgcgcatgttgcggacgccgccgttccagccgagccacgggcagatgctcaggatggcgaccatcgcggcgaacaggggcatacagactcggttgtagaagtcggcggtcaggcccaccgcgccgccgtggtcatgcccggcctcgtcgaggacgacgtcgcgggcgaggcccatgacggtctctttccagaaggcgctgaacacgggccacatggtggcgataaggatgatcagcgaaagcgccagcaggagccacgaggtcaggataaggaacccttcgcggctttcgatcccggccagttcgcccgtgtcggaacgccgcgcgagcagggcgatccagaaggagagggcgacggagatgaggatgaagaggagcagagggacgcccacgccgccggagccgaaggcatgcacggactgcaccacgccgctgcggacgaggtaggtggcgaagaaggccgagatggtggtgagcgccatcaggaagacgttcacgccgtgcagcttgttgcggcgcgtctggatgagcatggtgtgcagggccgccgtagcgatgagccacgggatgagggaggcgttttccaccgggtcccatgcccagtaaccgccccagccgagttccatgtaggcccaccagccgccgagcacgatgccggcggtgagcatggcccatgccgccagtgtgaagggccgggccacatcggtccatgccgcttcatcggcctgcctgcggctcagcgcctgagcgagggcgaggcagctcgggatcacgaatccgccgtagccgaggaacagcagcggaggatggaagatcatgccggggttctggagcagggggttcagcccgttgccatcctgcggcacggcgtggttcatgaggaaaggattgttccacgtcacgaggatgagcccgaagaagctcatgatgccgaggtagaagacccagtaccaaagccgcgtatcgggggtcaggcttttataggagcgggtgagctggaacagcccgccgcagatggctacggaaaaagcccagaacaacatggagccggcctgtcctgcccagaaggccgtaatgcggtagaagagcggcagcagccggtcggtgtagctcgccacatagaccagggagaagtcatagctcgccagcgcatatataaggatagcggacgcgatgatgtagcagcccgtcaggcacaggttggccttttcgacaaagccgaggcccggaacggaggtgcggcgggaggccttgcccgtcgccggggccgtccttggccacagcgatttgacggcccatgccgctccggcgagtgcgcagagcatggagagcgcgagaaggacgaaagcgaaataatacatggaagctccaagttgtccgggatctcttcccgagagagtggggcgaaccgtaattacggctcctgtacgtacaaaaaagccgcgccgcccgcgtcatacggggcccgccgcgctaggcggcaggccagccgaagattcggggcagggcggcgttcagcctctgttttccttttgatatttggaagggcacttggtcatgagcgttttggcctgaaacgaaccgtcaggccggagccccccttccacaatgacttccgcaccggccttgaaggtatccggaatggcgcccgtgtactcgacccacagcgtggtggccttgttttcctgatcctccagccggaacttgacgtcacggccggtttcggagcgcgaaaggccgtcctcggcaacggtgccgaagaggcgggcggctttcagtttgtcggagggggtagcgagcgcttcggagacattgaggaaatagacgctgttttcggaaaagccggaatacgcaagatagccgacgcctcccaaaaacaggagaagcgccacgagatagacgttcttgccggatttttttgccatggtggttcctgttgtgctttcctcctcacttccatgctgccgaataccagcggggagggcaaaagtcaaatcacttccggcctcaacacgcattcccgcccgttgatttttcactcttttttgtaccgcggcacttgtttttttcggcacatgaaggatgtttttccggatatttcaaaatgatgcataaaaacatctatcaggattatttcttaaaatctaacacttcatttgatgcatttattcaccaatgtaccttttttttgtagagctgatgatgcaaatttaaaccgataccttttttgcgcaagcagtatcggcggtttcggtacgtgcggtaatccatttcaggcaaaggagaaaaaaagtcgaaaacaggctgaaaacgaatgaaggcaagggaatacgctaaaataatggcacagattgtgctctttagggacaacaaacaggggcaacaccaacgcatcccaaggagcatccatgaaaaccacagaacagatcgaacatgataaaaaccttcgccgcgtcgtcgtttcctcactcgtaggggccgtcatagagtggtatgacttcttcctgtacggcgttgtcgcggggcttatcttcaatcatctgtacttccccgaattcgacgaccgcatcgggaccatgctggcgttcgccaccttcgcggtcggctttgtggcccgtcctttgggcggcctcgtgtttggccatttcggcgataaaatcggccgcaaaaaggtgctggtgcttacccttatgatcatgggcacagggaccgtggccatcggatgcattccttcgtatgccagcatcgggatttgggccccgatcctgctcatcttgtgccgtgttgcgcaaggcctcggcctcggcggcgaatggggcggcgccgtgctgatgtccttcgagtcggctcccgcgcacaagcgcgctttttacgccagcctgccgcaggtggggctttctctcggcctgctgctggcctccggcgtcatcggcttcttctccgcagtgctttccaacgaagccttcatcagctggggctggcgcatcgcgttcatcatgagtgcggggctgctgttcgtcggttcctatatccgttcctccgtgcatgaaaccaaggacttcgcggaagccaaggccaagatgccggaagtgaagtaccccctgctcgacgccttcaagcgttatcccaagatgatggtggcctgtatgggcgcccgcctcatcgacggcgtggccttcaacaccttcgcggtattctctttgagctacctgacccagacccgcgggcttgagcgttcttccgccctcgcggtggtcatgatcgcctccgtggtcatgtccttcttcatccccttctggggctatgtcgccgaccgtatcggcaaggcccgcgtgttcggcttctgcgccctgctgctcggcatcctcggtttcccggccttctgggtgttccataactattccgacaactatctttatgtctgcctcgctctggccctgccgttcggtgtcgtatacgccgccgtgttcgggaccatgtcgagcctcttctccgacagcttcgacccctccgtccgctattccgccatttctttcgtctatcagttctcgggcatcttcgctgcgggcctgacgccgatggtggcgaccatgctcgtggcttggaatggcggcgagccctggtatctctgcgcctatctgggctccgctggcctcatcagcgccgcctgcaccctgtggatccggcatctcaacagaaagggctttcctcctgctttgcctgttgagggtgaaacccccgtttcggaaccgctcatggaaggcgaatccgcctagtagggcaggggaatgggtatggaatcggggagggagatccttctgaggaaggtcgttctcctcccctccccgacccccacccctcctcaaagacaagggggcggccagccgctcccccctgacaaataaaaaggtacgcggagcaacggtgatgcgggagatatccgcagtgtccgccctccgctttctccccaaggggaaggccccgtccgcagtagcgggcccgccccggagaataaagcctttgagaaaccgcttgccggacattctcaggacacaagaaaagcccccggggatattccgggggcttttcttgcttcagggaagataaaaatctgaaagcctattccgagtagggcaccgttgaacaaaacggacagcactcggaaaaatttctgaaaaaagctcttttcctttttccagcaaatgggactcctgccgcgcagcctcccccgattcttcttcctttcccctattccttcgcggcgtcggcgcgtgcggccttgagggctgcgttctgctggttgcgggcctgcgtcagggcgctgcggcgctggcgggcggcttcgcgcagatcggcaacggcatcggtctcgtcgacgatttcccggccgagcatctcttcaagcacgtcttcgagggatacgacgccagccagcccgccgtattcgtccagcacgatgaaaagatggagccgcgattccagaaattccaaaagcagcttgtccaccgtctggttctcaaggacgaaacggacgggctgcatgatatcgaacagcgtcttttccccctgcccctgagagacatagcgcccgatgtccttgcggagcacgatgccgacgatgtcctcgttgtcgtcgccgtagacggggatgcggctgtagtgccagatctgggggtggttgtaggcgtccttgaccgaaatgtcctcctggagggagaaaaccatcgtgcgcggggtcatgatctcgcgcacatgctttacgtccagcgagaggatgttcctgatggcgttctcttcatattgttggatgcgcccggtctggcgggagaggctggtgatcgcccggatgtcgtcttcggtggcggaagggccgctctggggcgaggccacgaggcgcgtcaacatgcttgagaaccagatgaacggcttgaagatgaggaccataagccggagagggcgggccatgccgctggcgacgccgcaggcgtgggccacgccgagcgttttggggaggatttccccgagcgcgaggatgaggatggtcagccccgccgcgaacagcgcggtattgtccgcaccgagcacattggcggcgacggcgcccgctatggcggccccggcggtgttcgccaccgtattgagggtgaggacggcggcgatgggctgatcgatgcgggaacggagctggtacagcagctcgcctgtggcggacccttgcttgcgcaggttttcgatataggtccaggggacggaatagagggccgcttcggtcatggagcagatcgcggaaatcagcaccacaagaaagacggtgagcagcagagtgatcatgatcgggaccttgccgggccgtcggccccggctgttgaaagggatatggagtatgggagtgtagccttgacggtggcggaaggcaatgcccctattcggcggaagggcagggctgctgccggatacggggcgcgatgccctttctccattttttccggaaagagaaaaaacggggaagtagccgaaaaggacaagaaaacccttgacgtcctaggcttctttgtatagatatgcgtttccccacttgatgtgggtcatccctgtgcggcagggaagggtggatgcactgtccatcctgctatgtcggccatcaggccgactttgacatttgcaggcgtcactgattgccgaaaggatgtcaagagccgttagagctgtgggaatccctcacgaatctccagctgtaaaggtcttgttaaggggcgagagcccttaggtgaccctgcgggactacctgtcttattggatgttcatccaatacaggccaggctggcgaaacatgggttgacttcattatggaaatggagagcagtcggagtgacgccggaatggccatccctcctcgtcccaatctcccgcgtacataattgaagtctgcacgtaaccaaaaggttcgtggcgacccacgtagctgccgtctggtctttgccagggttggccgaagcgttcacgtacatacgctttggaaccggccttttcgaaggtcggctgctgtgtggaggttcggttcgtttcgttgctctttatgaacgataccggacaattgttgccagataacggagtagacgcaatgacgacagtgagcagtgatcgtatccgcatcaagctcaaggcttacgattaccgcatccttgacaaggctgtggcggaaatcgtcgatacggctcggaatacgggcgcgggcgtggcagggccaattcctctgcccaccaatatcaataaattcaccgtgaaccgctctgtgcacgtggacaagaagtcccgtgaacagtttgaaatgcggatccacaagcggcttatggacatcctggaacccacgcagcagaccgtggacgccctcggcaagctcagcctgcctgcgggtgtggatgtggaaatcaagctttagcgaggaatgtcatggctgagaaaatgggaattctgggtcgcaagcttggcatgacccgcatcttcgctggagacggttctgccgtggctgtgacggttgttcaggctggtccttgccctgttacccaggtcaagaccgctgaaacggacggctacaacgctctgcagatcgccttcgaagaagccaaggaaaagcatgtgaccaagcctatgaagggtcactttgccaaagccggaacggctctttaccgcaaggttcgcgaaatccgcctcgacggtccggccgcttacgaagtgggcgccgtgctgaccgcggacgtgttcgccgccggcgacaagattaaagtaactggtacgagcctcggtaaggggtaccagggcgtcatgcgccgctggaacttcaagggctccaaggacacgcacggttgtgaaaaggtgcatcgttccggtggttccatcggtaacaacaccttccccggtcacgtgttcaagggcaggaagatggcgggccactggggtgccgaacaggtaaccgtgcagggccttgaaattgtggacgtgcggacggaagacaacgtcatccttatccgcggttccgtgcccgggcccaagaacggtctcgttctggtgcgcaagcagtaggtagggagagaaacaatggctgtcgtgaaagtatacgatcaggacaagacggaacagggcgaactgaccctgactcccgaagtgttcgaggtcgctgtgaggccggagattctccacctcgtggtgcgggctcagctcgctgccaaacgggcgggcactcactcgaccaagacccgggcgatggtttccggcggcggcgtgaagccgtggcgccagaagggcaccggccgcgctcgcgccggttccaaccgttcccccgtgtggcgtggcggcgcgatccttttcggaccccagccccgcaaatacgattttaaggtgaacaagaagatccgcaagctggccctgcgcatggcgctctcttcgcgcctcgccggtgacaacctgctcgtggtcaagggctttgacctgcccgaagcgaagaccaaggtgttcgccaagatcgcaggcaatctgggcctttccaaggctctcatcatcgctcccgaagaatcgcgcaatcttgtgctttcttcccggaacctgcccggcatcaccctgaccaccccggatcagctcagtgtgtatgagatcctgaagcacaagcagctcgtgcttctggaaggcgccgtggaacccgttgaaacgcggctgaaataagaggttggccatggatcatacgcagattctcttgcggcccgtggtgaccgaaaaagcgaccttcctgcgcgatggcgcgaatcaggttgctttcttcgtccaccccgacgccaacaagattgagatcaagaaggccgtggaaaccgccttcaatgtgaaagtgactgacgtgaacgtggttacccgtaagcccacggaacgcgtgcggaaccgcaaggtgagccgcgtccccggatggcgcaaggcctatgtgaccctcgcgtccggtgaaaagatcgagttctttgagggagtgtaaacatggctgtgcgcaagctgaaacccacctcggcgggccgtcgcttccagacggtttccgactttgaggaaatcaccagaaccacgcctgagaaatcccttacggaaggtctcaccaaaaaggctggtcgtaacaaccatggtcgtgtcaccagccgccgtcgcggcggtggcgtgaagcgcctgtatcgtatcatcgacttcaagcgcaacaagctcgatatcccggccactgtcgcccatatcgagtacgacccgaaccgtaccgcccgcatcgcgctgctgcactatgccgacggtgaaaaacgctatatccttgcacctttgggcgtgaagcagggcgacgtgatcgtgtccggcgaaaaggccgacatcaagcccggcaacgcgcttcccatggcccgcattcctgtgggtacggtgctgcacaatatcgaactgaaccccggtcgcggcggtcagttctgccgcgccgctggcacctatgcccagctcgtggccaaggaaggcaagtacgccctgttgcgtatgccctccggtgaagtccgcaaggtgctggctacctgcctcgccaccatcggccaggtcggcaacatccagcacgagaacatctccctgggcaaggctggccgtaatcgctggctcggtcgtcgtcccaaggttcgcggcgtggccatgaacccggtcgaccatccgctcggcggtggtgaaggcagaagctccggcggccgtcaccccgtttccccgtggggtatgcccaccaagggctacaagacccgcgataagaagaagccctcgtcgcgtctcatcgttaagcgccgcggccagaagtaggagctgttatgcccagatcactgaaaaaaggtcccttcgtggacgaccatctgatgaaaaaggtggaaacggccgtcgaaaccaacgaccgccgtgtggtgaagacttggtcgcgccggtccaccgtcctgcccgaaatggtgggaatcacctttgccgtgcacaacggcaagaagttcctgcccgttttcgtcaccgaaaacatggtgggacacaagcttggggaattcgcgccgacgcgcaccttccacggccatgccgccgacaagaagaccaaggccaagaaataacgggtgccaatcatggaatcgaaagctactgccaaattcgtgcgcgtttctccgcgcaagaccaggctggtcgcccgcaacgtgaagggtatgcctgttgaggctgccatgaacctgctgcgcttcacgcctaataagcccgccggcgtcattctcggtgtggtccgttcggctctcgccaacgcggaacacaacgccagcatggacgtggatgctctggtcgttaaggaaattctggtgaacgaaggccctacctggaagcggttcatgccgcgcgcccagggccgcgccaccaacatccacaagcgtaccagtcacattaccgtgatactcgcagaagggcaggaataagtcatgggtcagaaagttcatccgtacggattccggcttgggtataacaagaactggcagtcccgctggttcagcaagaaagactaccctgcctttgtgtatgaagaccacgaagtccgcaagtatgtgaagaagctcctctacagcgccggtatctccaagatcgagatcgaacgcgccggaggcaagatccgcctcatcctttccaccgcccgccccggtatcgtcattggccgcaagggcgtggaaattgaaaagcttcgcaacgacttgcgtgccaagttcggacgcgagttctctcttgaagtgaacgaaatccgccgtcctgaagtggattcccagctggtggccgaaaacatcgctcagcagcttgaacgccgcgtcgcgttccgtcgcgccatgaagcgcacggtgacgatggcccgcaagttcggtgccgaaggcatcaaggtgacctgctccggtcgtctcgccggtgcggaaatcgcccgcaccgaatggtaccgcgacggtcgcgtgccgttgcagaccctgcgtgccgacatcgattacggcttcgccgaagcgcgtaccacgtacggcatcatcggcgtcaaggcgtggatctacaaaggtgaaatccttgacaaagaggttgaaaggtaatgctcgctcccaaaagagttaaattccgcaagtggcagaaaggccgcctgcgtggtcccgctctccgcggtgccaccatcgccttcggcgatatcggtttgaagactgtggagcacggaaagctgaccaaccagcagattgaagccgcccgtatcgccatgatgcgccacatcaagcgcggcgggaaagtgtggatccgcgtgttccccgaccatccggtcaccgcgaagcctctcgaaacccgtcagggttccggtaagggcgccccggtgggttggtgcgctccggtcaagcccggccgcatcctgtacgaaatcaagggcgtcagcctcgagctggccaaggaagccctcacccgcgccgcgcacaagctgccggtcaagacagtgattgtggtgagagagggtctgtagtatgaaagcaaaagaactgaaagaactcggcgtggaagagctcaaggccaaactcgccgaacagcggcaggaactttttaatctgcgcttccaacatacgaccgcccagctggaaaagacttcgtccattcccgccgcccggaagaacatcgcgcggattctgaccgtcctgaaggaaaaggaatagcaccatgtctcaagccatggaaaaccgcaagggccgcatgcttatcggtaccgtggtcagcgacaagaacgacaagaccatcgtcgttcgcgttgagaccctggtgaagcatccgctcctgaagaagttcgtgcgtcgccgcaagaagtttaccgctcatgatcccatgaacgaatgcggcatcggtgataaagtgaaaatcgtggaattccgtcccatgagccgcaacaagcgctggcacctggtgactatcctcgaaaaggccgtgtaggagttacgtcatgatccaggttgaatccacgcttcaggttgccgataactccggcgccaagaaagtggcctgcatcaaggtgctgggcggctctcatcggcgttacgccaccgtgggcgatatcatcatggttgccgtcaaggaagccatcccccacagcaaggtgaagaagggcgacgtgatgcaggccgtaatcgtgcgcaccgcgaaagaagtgcgccgcgttgacggttcctacatcaagtttgactccaatgccgccgtgctgctttccaagcagggcgaacccgtgggtacccgtatcttcggacccgtggcccgtgaactgcgtgccaagaacttcatgaagatcgtgtccctcgcgcctgaggttctgtaggagtcattgtcatgaaacagtttcgtatccgcaaggatgacaaagtaatggtcatcgctggcaaggatcagggcaagatcggcaaggtcttgaaggtccttcacaagcatgactctgttgtggtggaaaaggtcaatgtggccaagcgccacgtgaagcccaacccctatcggcgcgagcccggcgggatcgtggataaggaaatgcccatccacgtctccaacctcatggtcgtgtgccccgcctgcgccgctcccacccgcgtgggctaccgctacgcggaggacggcaagaaaatccgcttctgcaagaagtgcaacgaaacgctgtaggtgaaccaccatgacccgtcttgaaaacgtttaccgcgagaaagtggtcccggtattgcagaaggagtttgcgtacagctctcccatgcagattcccgggattgtcaaaatttcgctgaacatcggcctcggttctgccagccagaacaacaagctgatggaagaggccatgaacgaactgtccgtcattgccggacagaaggccgtgatgacccgcgccaagaagtccatcgccgcgttcaagctgcgtgaaggcatgcccatcggttgccgcgtgacgctccgcaaggaacgcatgtgggacttcctggacaagctcatgaacttcgctttgccccgcgtgcgcgacttccgcggcatcccggatcgtggcttcgacggccgtggcaacttcaccctcgggatcaaggaacatgcgatcttccctgaaatggaagccgaccgcatcgaaaacccgaagggcatgaatattaccatcgtgaccaccgccaccacggacaaggaaggcaagttcctgctcgagcagctgggcatgcctttcagaaagtaaggagttaggatagtgtcgcgtacttctcttgaagtaaaggccgcccggaaacccaagttttccagccgcgcctacaaccgctgccccatctgcggcagaccccacgcttacatgcgtaagtttggactgtgccgtatctgcttccgcaatatggccctccgcggggatcttcccggcgttcgcaagtccagctggtaaccgtgaaagggtataaggagaccattcgatgatgactgatcctattgcagatatgctgacgcgtatccgcaacgcgcacttggccctgcacaaggaagtgagtgtgccgagctcgaagatgaaggaagccattgctgccatcctcaagcaggaagggtacgtcgatgacgtaaccgtggaagaccgcaacatcaacatccagttgaagtacttcaagggcaaacccgccattgaaggtctgaagcggatgagcaagcccggccgccgggtgtatgtgggcgcccacgaaatcccccgcgtgcagaacggcctcggcatctgcatcctgtccacttcgcacggggtgctcgctggcgacaaggctcaccagatgaaggtgggcggcgaacttttgtgtgaaatctggtaggcgggtgtagcatgtcgagaatcggaaaactgcccatcgccattccctccggtgtcgaggtgaaggttggggctgatgtcgttgaagtgaagggagcgaaggctgcgcttaccaccccggtgtgcgaccttctttcctatgaagtggccgacggccacatcacgctgacccgcaaggccgagacgcgcgaatcccgcgctcagcacggcctgcgccgcaccctccttgccaactgcatcgagggcgtgaccaaagggttctccaagaccctcgaagtcatcggcgtcggttaccgtgttgctgtgaaaggtaatgtgatagaacttcaggtgggcttctcccaccctgttctcgtggaactgcctgctggactgtccgcgaaggtcgaaggtcagaagctcaccatcatgggcgctgacaaggtcctcgtgggcgaaatggccgctcgcattcgccgcatccgcaagcctgaaccctataagggcaagggcatcaagtacgaaaccgaaaccatcctgcgcaaggccggtaagtccggcggcaagggtaaataatcggggcgcgctatgagcactatgaccaagaatgaagccagacagcgcagaaagatccgcatccgcaaaaagatttccggtacggccgaacggcctcgcctggtgatcttccgctccaacctgcacatgtatgcgcaggtcgtggacgacctcaccggcgccacgcttgccgccacctccaccctggttctctccaagggcggggaaaaggtcagctgcaacaaggctggcgctgaagcggtaggtaaggaaattgcccgtctggccaaggagaagagcatcgaaaaggtggtcttcgaccgtaacggatatctctaccacggcaagatcaaggccgtggccgatggcgcccgcgaaggcggcctcgagttctaacccggagaggatagcactgtcatggaacagaatgaactgggtttcatcgagaagatcgtctccctgaaccgggttgccaaagtcgtgaaaggcggtcgtcgcttcagcttcagcgccctgatggtcgttggcgatggtaacgggaacgtaggattcggcctcggcaaggctcaggaagtccctgaagccctgcgcaaggccactgaacacgctcgcaagaacatggtgaaggtgcccctgatcgaagggacccttccctatgaaatccttggcgagttcggcgctggtcgcgtcatgctcaagcccgcctcccgcggtaccggcatcatcgccggtggcgccgtgcgtgctgtcatggaagcggccggggtgaacgatgtgcttgcgaaggccatcgggaccaacaacccccacaacgtgctgcgggccaccatggccggcctcgctgccctgcgcagcgcggacgccgtgagcgaaatccgcggcatgaaactggaagcccccaggaagtaagcgccatgtctgaaattacgatcaaactcgctaagagccgtatcggctgcacgcccaaccagaagaagactctggacgcgctcgggctgcgccgccgcgaaatggttaagaccttcccggataaccctgccgtccgcggcatgatcgccaaggtgtcccacctggttgttgaggttaccaaagcatgaatctgaacgaactctatcccttcgcggaagatcgcaagtcccgcaagcgcgtgggccgtggttccggttccggcttgggatgtacgtccggcaagggtaacaagggtcagaacgcccgcgctggcggcggtgtccgccccggctttgaaggcggccagatgccccttcagcgccgtctgcccaagcgtggtttcaagaactatctcttcaaggtcgaatacgaagtgatcaatatcgctcgcctcgtggccgcctttgaaggcaagagcgaaatctcccttgatgacatctacgatcgcggcctctgccccttcggcgctccggtgaaaatcctgggcgaaggggaactctccgccgccatcaaggtggaagcgcataagttcagccagtccgctgcggataagatccgcgccgctggcggtgaagtcaaagaactggaagtggaagggtaggtgactcgtggctcttggtggtgcggataaccttgcccgttcgcctgaactgcgtacaaagctgctctggacgctgggccttctctgcgcgtaccggatcggggtgcatatcccggttccgggcgtcgacgggggggccctcgcccacttctttgaaagcgtggcaggcaccctgtttggtctgttcgacatgttttccggcggcggcctgcggaacgtttccgtgttcgccctcggtatcatgccgtacatttcggcctcaatcatccttcaactcctgcaggtggtcagccccgagctgaagcgcatggccaaggaagagggtgcggcaggtcgccgtaaaatcacccagtacacgcgctacagcacggttcttatcaccatcattcaaggcttcggcatcgccgtgggccttgaaaccatgtacagccccggcggcgttcccgtcgtcctcgaaccgggctggaccttccgcatcatgaccatgctgaccctgaccgctggtaccgtgctcatcatgtggctcggcgaacagattacggaaaagggtattggcaacggtatttccctgattatcttttcaggtatcgttgtgggcattcccggtgctctggtgaagtccttccagctcatcaagctgggcgacatgagcctgttcatcgctcttgccctcgtgattttgatggttgcggtgctcattggcgtcgtcttcatggaacgtgcccagcggcgcattcccatccagtacgccaagcgccaggttgggcggaagatgtatggcggccagtccacgcacttgccgctgcgcgtgaatacggccggggttatcccgcccattttcgcgtcgagcttgttgctgttcccggccacgatggcgaacttcgacatcgcggattggctgaaaacggcggcttcgtggtttacgccttcttccattctgtataatgtgatcttcatcgccctgattttcttcttctgcttcttctatacggccatcatcttcgatccgaaggatgtggccgagaacctgaagaaggctggcggcttcatccccggcattcgccccggtgaaaagacgcaggaatatctggacgctgtcctttctcgcctgaccctttggggtggcgtgtatatctcggttatttcagtgcttcccatgctcctcattgcggagttcaacgtgccgttctatttcggcggtacgagtatcctcatccttgtgggtgtcgcaatggacttcatgtcgcagatcgagtcccatctcatctcgcgccagtatgaagggctgatgggcaagacccggattaaggggcggagctgatcgtgaagaagtaccgcggcgttttcctcaaaaatgagagggaaataggccttctgcgcgaagcgaatagaatggtcgcgatgattttggacgagttgggcaggcaggttcgccccggcctcccgaccatgcacttcgaagagatcgtccagaacatgtgtcgcgaattcaaggtgaagcccgcgtttcagggcatgtacggttttccgtacggcctgtgttgctcggtgaatgaagtcatcgtgcacgggttcccttccgaagacgtcatcctcaaagaaggcgacattgtcagctttgacgtggggaccgtatatgaagggttctatggggacgcggcccgtaccttcgccgtgggggatgtttcccccgaggcggcccgcttgctgcgggtgacggaagaaagtctcgccctggctgtggccgaagcgagatccggtaatgaactcaacgacatcgctggcgctgtgcaaaaacacgccgaaggtgccgggttccatgtggtaagacggtttgttgggcacggcatcggttcgacgttgcacgaaaaacccgaagttcccaactacgttgtgaccacgaaaccggcgttgccgctcaagaccggcatggtgctgtgtattgagcccatgatcacggtgggaacaccggaagtggagattctggacgacaagtggtcggcggtgacccgagacaggagtctcgccgcccattttgagcattgtgtggctatccttccgggtggaccccagatactggaccttccttgaagaaaaccatgtcgtgcattgacagcatgtaaaaaaagagctaaggcttcctgttccggcagtatttttgtgctgccgaggaaacctgtggagagacttgtcatgaaagtcaggccatccgtaaaaaagatttgcccgaagtgcaaagtcatccggcgtaagggcgtactcagggttatctgcgaaaatccccggcacaagcagcgccagggctagccttcaggagaaagactgtggccagaatagctggtgttgacctgcccagaggcaagcgcgcggacatcgcgttgacttacatctacggcatcggccgtgtaacggccttgaaaattcttgacgcttcgggcgtcaactggactcgcggcatcgatgatctcaccgctgaagaactgaacgaagtccgtaaggaactcgaacagagctacaaggtggaaggcgacctgcgccgcgaaatttctatgaacatcaagcgtctcatggacatcggttgctaccgtggcctgcgtcaccgcaagggcctgcccgttcatggacagcgtacccacaccaacgcccgtacccgtaagggtccccgccgtggtgctgtaggtaagaagaagtaaaggaaccttccggcatgaccagcttccgtttcggcggactgattgtgcgaaacgttcactgatacgaccggatacgcccggttacggaagcaaatcatggctagaccaaaacgcgttgccaagaaaagagaaaagaagaacgtgccccttggtgtggctcacatccaggcctcgttcaataatactatcatcacttttaccgatactcgcggaaacaccgtgagctgggcgagtgccggacagagcgggttcaagggttcccgtaagtccacgccctttgccgcgcaggttgctgccgaacaggccgcccgcaaggctcaggacaacggcatgcgcactgtgggtatctacgtgaagggaccgggttccggtcgtgaagccgccatgcgcgcgatcaacgccgccggtttcaaggttgccttcattcgtgacgttacccccattccccacaacggctgccgcccgccgaaacggcgtcgcgtctagtcgcgctcacaggaggacaccgccttggccaaatataatgatgccaaatgtcgtttgtgccgtcgtgaaggcacgaagctcttgttgaagggcgaccgttgcttcaccgacaagtgcgcctttgaccgccgcccctacgcgcccggtcagcatggccgcgcccgtaaaaaactgagcgactacgccgtccagctgcgtgaaaagcagaaggtgcgtcgcgtttatggcgttctggaaaagcagttccacggttacttcgtccacgccgatatggcgaagggcgtgaccggcgcgaacctgctcgctttcctcgaacgccgtctggacaacgtcgtgtaccgcctcggcttcgccaactcccggactcaggcccgtcagttggtccgccacggcgtctttacgctgaacggtcataaggtcaccatcccttcccttcaggtgaaggttggcgacagcgttgaagttcccgaaaagagcagaaccatccctgttctcgccgaagctcaggaagccgtggcccgtcgtggctgcccctcctggctggaagtggacgctcccaacttcaagggtattgtgaaagcactgccgcagcgcgacgacattcagttccccatcaacgagcacctcatcgtcgagctctactccaaataagcgggggcttacatgctcttcagacaaggcaacaggcttatcaattcacgcaactgggccaaactcgttcggccggaacagattgtgtgcgacagcgatcccaacgataccatgtacgggaagttcacctacgaacctctcgaacgcgggtatggggtcaccatcggcaatgccttgcgtcgggtactgctttcgtcccttcagggcgcagccttcgtggctgtgaagatctccggcgtgcagcatgagtttaccaccatccccggagtgctggaagatattacggatgttatcctgaatatcaaacaggttcgcttgggtatgacgactgacgagccccagcatctgacgctttccgtgtcgaagaaaggcccggtgacagccgcggatatcatgaccaacgccaatgtggaagtcttgaacccggaactgcacatcgcgaccctcaccgaagacatggagctcagcatggagttcgaggtgcgcatgggcaagggctatgtgcccgctgatatgcacgaaggtcttccggacacgatcgggcttatcaagctggacgcaagcttctctcccgtgcgtaaggtggcgtataccgtggaacaggcccgcgtgggccagatgaccaactacgacaagctgattcttgaagtgtggaccgacggttccgttcttcccgaagacgctattgcgtatagcgccaagattattaaggatcagatttcggtcttcatcagctttgatgaacgcatctccggcgaaagcggaggggaaggcggcggcagcgccgacatcaacgataacctcttcaaggggatcgatgagctggagctgtccgtgcgggcgaccaactgtctgcgcagcgccaatatcgccactgtcggcgagctggtgcagcggcccgaagccgaaatgctgaagacgaagaactttgggaagaagtcccttgacgaaatcaaggccgtgctcgaaagcatgggactcgatttcggcatgaagatcgacaacttcgagaagaaatatcaggaatggaagaggaaacaacaccatgaggcatagcaattccggcaaaaagctcggcagaacgccttcgcatcgcaaggctctgttccgcaacatggcttccgcgatgatcacttacggcaagatccgcacgacggaagtgaaggccaaagaactgcgccgggtggtggaacctctgatcaccttggcccttcgcaacgatctgcactcccgccgtctggcctatgaaaccttgaacgaccacaagctcgtgcagcgtcttttcgacgtggtcgctcccctgtttgccggcgttcccggcggctacacccggatcaccaagatggcgcttccccgtaagggcgactgcgctcccatggcaatccttgaattcacccgccagcctgaagctgcggctgaaaagaactaagtccggcctcacacccggcccgcttcggcggaatgattgactgattcctcctgtacgcaggtgaggatatgaaaggccgtctgaaattcaggcggcctttcgtggtgttggacaaaaagaaaactgggggagaaaactttctgaagaaagttttc

SEQ ID NO: 7185 - DNA, 5391 bp, Unknown
  gut microbiota DNA sequence
ggggaggggagagggaaactttcttcagaaaatttccctctcccctcccccgattcttccagcttttcctccctctcccgtgcttgcgccccggaaggagagtggttacactgtgaaaacatgccattaacccgtcaggagagaatcctgaggagaccactatgaaaaaattgctttttctggcggcgctgaccctgtgtgccgcgcccgcgtatgccgcccccgatcgttttgaacagatggataaggacggcaacggacaggtggattgggaagagttccaggctgccgtcccaggcatgaagcgccccgccttcgacacgatcgacgccgacaagagcggcggcatctgccgcagcgaatgggacaacttcatgaaatcccatatgggcggccagaagggaatgcctcccgccggaatgggtatgccagcgggcatgggcggcaaagccatgcctcccgccggagccgaaaagggcggtatgcccatgatccagcccccggcgcagcagggcgaagcccccggcatcgtacccccgaaaaactagctctcaaacggaacctcgcggtttcataaacgccagccgccctctgaaggcggcagcaaaggattgttcatgaacatggatgcttcctccacggaaacggcttcctccacaccggaaaacagcgtcggactggattttctgcacgtccgcatcaatcaggacaacgcctccgggcgcttcggcaagaaagtccacacccggttccctcctgagccgaacggctatctgcacatcggccacgcgaagtccatctgcatcaacttcgggttggcgcaagagtacggcgggctgtgcaacctgcgcttcgacgataccaatccggtgaaggaagataccgaatacgtggattccatccgtgaagacgtgcactggctcggcggcgaatgggacgatcgggaatattacgcttccaactacttcgatcaattgtatgcattcgccgagcagctcatccgtgacggcaaggcgtatgtggacagccagagcgccgaggaaatccgcgccagccggggcacgctgacgcagccgggcacggaaagcccataccggaaccgttccatcgaggaaaacctcgatctgttccaccggatgcgcggcggcgagttcgccgacggggagcatgtgctccgcgccaagatcgacatggcctctcccaacgtggtcatgcgtgaccccacgctgtaccgcatccgccatgccgaacaccaccggaccggcgacaagtggtgcgtctatcccatgtacgactttacacactgcctgtccgactcgctggaaggcattacgcactccatctgcacgctggagttcgtcaacaaccgcgagctgtacgactgggtgctcgacgcgctgaacgtgtaccacccgcagcagatcgagttcgcccgccttggcctgacctacaccgtgctgtccaagcgcaagctcatccagctcgtgaagggcgggttcgtgcgcggctgggacgatccccgtatgcccaccatttgcgggatgcgacgccggggatacaccccggaagccatccgtgacttctgctcgcgcatcggtgtggcccgcgcggaaaatctggttgaatacagcctgctcgagttctgcgtgcgcgagcacctgaacgcgatcgcgccgcgcacgatggccgtactcgatccgatcaaggtcgtcatcgagaactatcctgaagggcaggtggaatggttcgacatgcctttcagtcaggacggcagcgtggaaggcagccgcaaggtgccgttcagccgtgagctttatatcgagcgggacgacttccgcgaagatccgccgaagaagttccaccgcctcttccccggttcggaagtccgcctgcgttatgcctactatgtcacgtgcaaggacgtgatcaaagacgcggacggcaacatcgtggagcttcgctgtacctatgatccggaatcgaagggcggggccacgcccgacggacgcaagatcaagggcaccatccattgggtttccgtgccccacgccgtatccgccgaagtgcgcctgtacgagcacttgtttacgtccccgacgcccggcaatacgcccgaaggcgtggagttcacggatctgctgaaccccgactccatgcgtgtcgtgaccgcgcaggtcgaacccgctctggcggaattccccgccgggtcccgcgtgcagttcgagcgcctcgggtatttctgtgtcgatccggacagcaagcccggtgcgcctgtcttcaacaggactgtgacgctcaaggattcgtgggcgaagatcgaaggcaaacaataaagaaaagagatgaaggctcctgtttatggagcgtccttataggcatgaggctgaaagggggctgtgcggcgggattccgtttgcgcggcctccttttttggggagaaggctctagccctttgcggaaaggtttttgaggcaggggaatccgtagggcggctggccgttggcgcgttgggagggacgggcagccgggagacgcaaacgtgctttgtggaaacggcatgtttggcgcgaagataaaggatgaagatattctttccctgagtgaaatcagggactgtgcttttcttttgaagcctgtatgatgaagccttgcgggggaagcgcctccgtgctagagcttgccccgcatcttgcgtataacttttttgacaagccgtgcttgccgttttttagaggccgcgtcatgattctcgcccgattgattcgtgtctgtgcgtccgcgctgctgtgcgcaggggtctcgttgttccccggaaacgcttccgctgatggcgcggggacggtggtggacggccgcgccatcttgaaaatgagcaaggggagcaatctttgcgcgttgacgtttgacgacggcccgagcagccacacggaacgcctgatggagatcctgcgggagcggggtattcatgccacgttttttgttgtgggcaaacaggtcaaataccaccccgagctcattgtacgccttcagcaggaagggcacgaaatcggcaaccacacctattcgcacaagtcgctccgccacctttccgttgacgcgcaacggagcgaaatcctgagtgttcaggaattattgcggaaactcggcgtgcattcgcgctacatccggccgccgtacggaaattttgacgccaacactgtggcgatagccaaggccgagggggcggacatcatgctgtggtccatcgacagcatggactggtccaagcgggcgagcatcgaaaatatgaagacgctcatcagcggccagaagctgcgcggcgttttcctgttccacgatacgcatgagcagaccatagaagccctgcctgaaattcttgatcgcctcattgcggacggctgccagtttgtgacggtttccgagtaccttgcggccttgcgccaagatgccctgcccgaaggtgtcaacgtggccgcccccgcgattcaggagaacccgcatcagccggttcccccgcagggcacccaagcggagcgggaagcgccgcagcagttgttccagcccggcgacgtgcatgaagtccgccagccgatggccccgaggccgaaggcggcggagacccccggagccgagcagatggccgggcattctacgaatatgaacgatgccgaaccagcggccttgcggacgtcgatgctgtaacgccagagagggtgtacaaaaaaaggaaccgaagttcccttttttcatatcatgcgttgacggttgggtctatttgccgcaacatttcttgtacttcttgccgctgccgcaggggcaaggctcgttacgtccgactttgggcgtttcgcggcggtacgggtcctggccgtggacattgccgtccacgtagtaccagcggccgtcttcacggcggaagaaagcgtcctcacgcagggactggggcataccgttgacagaatagcgtgcttcaaaggatacttcaccggtctcgtcggtttcggcgccgtccttggtggagaaaatttcaaggccttcccactccacggcttccgaccatttcttcatgtcttcatgatcggcctcgtcacggatgctcggatgcaccgtttcgttgaggtaatcatacttgccgagggtgtgggcggcatagcgcgaacgcatgagcgcttcggcggtgggggcggtttcgcggccttcgatataggtttcgcagcattcttcgtaggggcggccggagccgcagggacacagggacatggggttcctccgggataagacaggcgtgcggcctgcgtgtagtgatgtggggactggttacggtttcgcgtcctcggagtcaagcccggtctctgaaaccagaacagcccgcgtaaagcgggccgttatgggaggaagaaagtgatgaagaaagaagaaaggaattactttatctatagcaatgtgcgtgccaacatcgcgtaaaaatcgttttttctgtttttgacaagagttgtagtgtattacgggaaagtcaaaaaagcgttcccccgcggcggggtgtcataatttgtacccgcccggacaaccccttggtatccggcacgtgggaaccaaaaaattttaccacaggagatccgtatgcaagccatcagtatcatagggttcagtaattccggcaagacgacgctcatttcccggctttccgagtgtctggaagcccgaggcctcaaagtcgccattgccaaacacacccatcacgaactggacaagccggacacggataccgcgcttttgatgggcccgaaacggaccattgtggggttgagcaatacgaaggacggcaagggcgaagccatgatccattgggggcatccgtgcttcctccgggatttggtccctctgctggatgcggacatcctgctggtggaaggaggcaaaaccatcggctggctgccgcgtatcttgtgtttgcggaccaccccggaacttttgacggcgcttccggaaggctgcaaggctctgcgccccgagctggcgctcgctacgtatggggacaacaagctccccgggctgccgtcgttcacggccgaagatctggatgcgctggtcgatctggttcttgagaagggctttttgttgcccgcgctggattgcggagcttgcggggaagcggactgtaccgccatgacgcagcgcatcgtggctggagagaagacgcccggcgattgcgtggccgcgcgcgggagcattgaagtcaccgtcaacggtcagtccgtggggcttaacccctttacggcgcagatgctttccggcggcatcaaggggatgctcggtgcgctcaagggcatggttcccggcggtgaggttattattaggatgaaagggtagggatgcagatgtggggagggg

SEQ ID NO: 7186 - DNA, 5530 bp, Unknown
  gut microbiota DNA sequence
ctcttccctttgatttgaatccaatctatagcctgctgttttttctgtcaatataattgtgatttaaagaacgttttcttttccattttccatcgaaaaacaacgaccccgtgccattcataacgtatttccccttactctcccgataccgtccatctgcggcaatgcgctatcctcctctttccaaagaagttctaaaaatattctgccatcaccaatggcctctgaacagttccgatacaatgtcgacaaaggaaaaactgcctccgcattcttttttccaaacgaaaaacgccggggaaagctccccggcgcccttcattgctttagaggggccatgcctagaacagcactccgcccaacacgacggtcacaaccgcaatcgctatccacgacagcaggataaccaggggtgccgtcttccagatgcttcccgaatccgaccactcgttgccgtgcaggagcgcggcgctggcgctggcggcgggcgtcaggaaggcgaggtgtacgcccatgacgaccatgatgagcggcagctcgggggccacgttcatgcttgaacaatagctgaagatgacgggcatgagggccacgccgacggcgccgttgttcatgacctgcgtgagcgcggtggccacaaagccgatgaacagcgcgaacacgacgggagaactgccgccgaaaatcggctcgacgatcatcatgaggaagttcgtgatcccgctctcctgcgcggccatggccccggaaagcggctgcaccacggcgagcaggaggatgatgccccacgcgacgccggagtcgatcatggccttgaacttcagcaaaggcttgccgtccaccttgaggaaacacatcacggtgacgaggaacacgcagatccccgtgttgccgatggacttcaggaatttggaaatgaacaggtcggcgggcaggaagttcgggagcagcagcagggcgaccagcgcgaagaggaaacagaggatgagcttctgcaccttgctcagcttgagcgcgccgtcggtgtccagcttgctcgcgtccagcttcttgagcttttccatgtccggcttgaacacgtacttgccgagcgcgatgaacaggagcgagcacagcacacaggaacaggccgcgatgagcatgtacttggcgtagtcgatccccacgccggacatggtctcgtaggcgctgaacacggtgagggccgcctgcttgaaggggatcagggacatacccacctgcgacgcgaagacgatgccgaacaccatcatggtcggatagccgtcccctttcttgtagccgcatacgtcacagatcccgtacaggatactccagccgatgatggcggcgggcgaagcgctggtcaatccgccgaggatgaacatggaggccaggaacgtaaaggtgaatacccacggcctgcccgcaacgaacttccgggtgatgaaccacaaggagatgaaccgcgacaggccataatggttgatggtcgcgcagaacacgaagatgaagaacatcatcaccacgatgggatcgccgaagctgcggttgagcagcgctacgggcttcatgccgcccaccagcatgagcgcaagcaatccggccatgctcggccagacgatgtcgataaagatccagccgtacagcaggccgagaaaaaccccgatcagcctcatgccgagcgccgtcaacggctcgacaggcggcagttgaccaaagccgaacatgatcaacaggcaaagaaaagaatgcacataatacatggcatcgcctcttgccgtcatctgagcattcgcggacatggcgtcatccttctttcgattcggttacattcgattctggagaaacggaggagggaacctctcggcgcaccggccttctcatggagaggaggatcatccccgctcggcacgattccccggcacgccccagcatttcccgtgggacaggggcttccctcatgaggaaagcccccgcgtcctcacacctgcatccgcaatgggaacgagaagccgatggccccgcaggggcagctggtacggcagttggcgcaatgccagcattcgtccccaaaggccacttccggacgatcccgctcctcaagatgcttcagctcaagcacatagccggggcaatcgtccacgcacgtcccgcaccccttgcaatgcccgcagtgcatacagcgcgcagcttcgtcccgcgcctgttccggcgtgtagccttcgttgatctcccggaaggacagcccttcccggatgccctgacgctgcggttcggcccgcccgtactgcgccaccccgtagatttcctcaaagggcaccacatagggaggctgagatgcggcgagacggtcgcgcgcctcgatccggccttcttcattgatgatatagactctggagttttccccggtcaggtaggcatgaacgccgaaagcggccctgcgccctgccccgacggcccctgcgatggacgacggccccgaagacacgtcgcccgcggcaaacacaccctcaagcgacgtcttctgggcggcgtccgccacaatccactggcgcggagtacactccggcacttcaccctcaaaaaaaccgaggtccgtcttcatgcccacggcgaaaatcacggtgtcgcaggcaaggacatgctccccaccgggaacagggatgagcgacaggcggccctgttcgtcgaaacggcattcctgcacatcgaaatagtccacaccggaaacgcgatcgccgtccttgcggacgccggacatcgtacagctgttatggacatggacaccttcccggcgagcctgttccagatcctcttccggggcgcgcatggcgccttccgcctcaaggcacagcacatgcacatcggccgcgccgaggcgccgggccgtgaacgcacagtcgaaggccacccctccgccacccatgatcacgaccgtcctgcccacgtcgggacgctggccgagcgcggccttgcgcaggaattccaccgctttgaggccgcattccgcgttgggtatgggcaaggcgttctctttgggcgtgccggtggcgacgacaacggcatccgaggaagcacgcaattccgcgaaagaaatgtccttgcccacggtgacgttgacacaggcgcgtacacccgtttccagtatccagccgatctcgcggtcaaccacgtcgcggggcagacgaaaatccgggacggcgtagcggggaatccccccaagcacggggccggattcgtacacggtcacgtcatgcccgaggagggacaggaaataggccgccgtcatcccggcgggaccgccgcccaccacggcgacatgcttgcccgtttccggcgcgcgggtgaaaggttcgatgcccttgggggcgtgatcgtaggcggcgcgttccagcgcccgcgtgttcacgcagccttccagacgatcccggttgcacttcgcctgacagaagtgggggcacacccgcccggtcacgccggggaacgggtttctggcgcgcagatagcgcaacgcttcaccaaagcgccccttttccacaagggactgcatcttctggatcgggtttcccgcaggacaggacgcctcgcagggagacgtgcggaactggtccttgaggctgtcgcccatgacgatgggctgttcgatttctcggctatatctcgggggcataaaaaactccttggcgctcagggcgcattcgacgacatccgcgcatcggcctcccctgcgggagacggcgcgccatgaaccttacagaagcggggccttgccccactgatagaccgggccattctcgccgcgcatcagcaggagcggcttcgccatctcgggattgatctcgggataatcggtcaggcggtagacgcagcgccccgactccttgcgctccatggtggcctgaatggccagctcgcatatggtgagcacatccttcgcctcgtggcagcgcatgagatcgcgcagcgtatcggcgtgcagtcgggaagcctgatcggacaggaagcggatcttttccagcgcgcgggccatgccggtcatggagcggcggaatcccatgtaataattcatgacattgcgggcggcctcttccagttccttataggaaagcgtctcctcgtttccgagcggcgcgaagatttcgtcacgcacgcgggcggccagagcctcgtccaccgcgccagccgcggacatgccggacgccttcaatgcagcctgcctgcccgcctcgaacccgccgcacatcgcgccggaacagtagaggaagatgctgccacagaacaggccgggcacggacgtctcaaactggtcgttcacggcgatggtcccgccgaagatcagttcgccgatttccacttcgaggagcttgtgctggaagtcggtaccggtgcattccgcccagtcgccgaacgtggccttgtcgccgggcatcaggatgtcctgcagctcgcgaaccacggcttcgtccacataccgcatatccatatagaaaggcgggccggacccttcgagctgttcctggaaggtgccctgaatctggttgttgcgcacgccgttttcccacatggggtcgtacttgcccatgaaacgctcgccgagggcgttgatttcgtgcgcgccggagctgttgatcccgttcatgcccggacagccatagcccttgggcagcatggtcgcgcgctggtaggtatccagctccgtcacggctgccccggcgtcgtaaccgagcacaacacccgcgctggtgttgtagggatacatccacacgttgtaaggattgtgcgtggagttgtcggtgccgcgcgtagcggagcggccctgcgccgacacaaccgtcttcgcacggatgatgtagaattctccggtactcacgttccagccgagcgcgccgcaggccttgccgccgtctgtgaggatcttgaccgccatcacgcggtcgagcacatccaccccgctctcccggacgatccgcgccatcacgcgcttgatggtcatgccgttggcgatgtgcacccaccacgtccccggctgcccgaagccctgcgtgcggtggtagcggccgtccggcgtcctgccgaatttgacgcccgccgcctccagcttttcaagcatgggcctcatgtgggcgtaccagccgttgcgcagcatggctggggtccagccgttcaaaggcttggcgtagaacttgatcagatcctcggcggcatcgtgcgcgacgccttcctcatcgaggaccgccatatagtggtcattcccgccgccgatgcagccggagctttccaacttgcccttgtccatgaggaggacgcgcaacccctgctcgcgcgcgccgagagccgcgccgcagccggacgcaccggagccgatgacgagcacgtccgtttcgatgagcgtaccgagaggatgagttgaggtattcatggttccttcctgttgtgaggttctctgcgggggcgggccgcgccgaggatcggcggcatcccacgcctccttttgtgaaaaaaacatcatcaaaaacacttgtattgtcaa

SEQ ID NO: 7187 - DNA, 1466 bp, Unknown
  gut microbiota DNA sequence
cgaaagaatgaaacgcccggaacaaaagttccgggcgtttcattctttcgggccgtttctgatcgcgccggatggtttttattctaagagaggccttgctctccattttcccttgctcttttttgcgcctgatcttttggaaaggcagggaatgacagccgggaaggaataggatagggggagaaaaacacggaggttgctcatatggtggcgatgcggcgcaaggatcggcaggtgtccgatgaagaggcgatggcgtatttgaaagctgcggaatacggcgtgctgtccacggttgggccggacggcgaaccctacggtgtgcctttgacgtacgcggttgaggaagacggcaaggggcttgtcttccactgcgcgcgcgacggctacaagctggcctgttttgccgcgaatccacgggcgcattttgtggcggtgcaggaaacgaatgtgttgcccgaagaattttccattgagtacaagagcgtcatggtctccgggcttcttgaggaaattgaggaccgcgaagagaaagtccgctgtgcgcaggttgtgggcgacaaatattccaccatcagctcggaagagtacgccaaccgcgccgccgacaagatccgggtgttccgcttgaatatagagcatatttccggcaagcgtctcgtcaaggccggagagcccggcatgggttataaaaaagggtagcaaggatacagcgaacgaggaagaggccagccttttcctcgttcttcttccggggagatttggggcaggctgtctccctttgcttttagggaaacgggcatctcacacaggattctgtgcgctggctggatgagagggctttttttcaagaaagatgagcgtcagcgctggggatacggctttttcggcgcagcgggtgtagccgttgcgctcatacaggcaaagattgcgcaggctcttgttgctggtgaacagttccagccgtggcgcgggacagtttttttccagttcttggagcagacaggagccgaggccgtttccttgatgttctggatgtaccatcagttttccgatcagcagcgtatctccccgcaaagtaccccgaacggaccccacaatcttccctttctcatcaaccgccttcaagaatatgccgcttctgaattcttccttcatttcctcaagcgtctgcatgagcggtggaatggaaaaatcgttgagcagcctcgcctcgccttgatacgccagccgctgcaactccagtattgcctccaagtccgcttcctcggcttgaacgatatggtgcggtgtaaccgccttcaaacagggcattggaaaatccttttggaatggtggacaagccgcgttgctttgcctttgccgaatggcaggcgacacaacgttttttcgcggaaagccgacaagagggattcgataaggtcaaaagtctttgaagggggagggatggggtttggggaagggag

SEQ ID NO: 7188 - DNA, 16840 bp, Unknown
  gut microbiota DNA sequence
cccccccccgcatgtcggaaaaagtccggcacgcatcgtatcaaagaatataaaagccggcaaaacatccgatagcatagagtataggcttacgggtgccattcatcaagcggaaatgccgcttgatgccggaagttattccacaaccgttcccgttgcggagggatacggttcttgggcggaggcagcagggcggtatcctcaagatgccgcccgcttgttgtggtcaagagacgcttggcttgctgatgtgcccgctctgcgcggtagagccgggtgctctgggggtatgatcggcccgattgaaaaggtttctccgccgggcgaaacagggtggcgggtttccgcgtatggggtggcgtcgggagctgcacaatgcatccagccgaaagaggtgtccacttcgggggggcgggccgccctttccgcttcccgattctgaataacataccatcatctccgcaagttgtttcgttcttttgccatgtgaagaaaagatccttgctgaatgactccattccactcaaaacctttgtagctcaagggttttcggccaatcggagcgttcatttttttatcataaaaaagctaatgaacatatagtattatactttataaacggccctgttccggcttctcgattcctccggagctttcgtgaaaaaaatcggaaaaggtgaaaagtgtctcttgggagacagaaaatgtccctgaaatccgtattgtgaatgcaagaacaaggtcgcacagcgaccctccaaccctctctacggaaggaaccgccatgaaagaagaccgcaagatcaagaacgtcgtgctgatcatgctcgacacgctccagttcaactaccttggctgctacggcaacaaggttgtgaagacccccaatatcgatcgcctcgcccgtcagggcttcctcttcgaaaacgcctacagtgaaggcctgcccacggtgcccgtgcgccgcgccctcatgaccggccgcttcaccctgccttacggcggctggcagcctctcgctcctgacgacaccaccgtcgccgacatcatgtggggcaagaacatgcagacggccctcgtctacgacaccccgcccatgcgcctgcccaagtacggctattcccgcggtttcgacttcgtgagcttcaaccccggtcaggagctcgaccacaccagctttgccgatgtgccgctggatcccgcgctgaagccggaagactacacctcccccacgatggttttcaatgaaaaaggcgaagtcatcgacgacgacagcacgcagctcctcgacgaaatcggctgcttcctgcgccagcagcagttccgcaagcccgaagacagctatatttcccgcgtcatgacggatgcccaaaactggctgtccaaccgccgcgacaagacccgccccttcctgctctgggtggactcctttgatccgcacgaaccttgggacccggaatccgtgtggaagggcgaaccctgcccctacgatcccgaatacgtcggcaacccgctggtgctcgcgccgtggacgcccatcgagggccgcatcacggaacgcgaatgcgagcacatccgcgccctgtacatggaaaagatcacgcaggtggacaagtgggtgggcgaactgctcgactccatccgtgctcaggggctctgggacgaaacccttattgtgctgatgtccgaccacggccagccgatgggcgaaggcgagcacggccacggcatcatgcgcaagtgccgtccctggccgtatgaggaactcgtgcacgtacctctgatcatgcacgtccccggcatcgaaggcggcaagcgcatcaagagtttcgtgcagaacgtggacgtgaccgcgaccatcatggacgcgctcggggagctcggcacgccgcagaaggcgagcgatttcggcttcccgacctacgacacctcggaaatgcagggcatcagcctcctgcccgtgatgcgcggcgagaccgacaccgtgcgcgactgcgccatcgccgggtactacggcatgtcgtggtccctcatcaccgaggattactcctacgtgcactggctggtgagcgaggacgtgaaggacagcgtggactgcatcgccggttccggcaccgaaatgaaggaagaaatgtggacctgcacggctggcgcgaaggtgcaggtgcccgatcatgatgaattgtacgaccgcaaggccgaccccttccagctcaacaacatcgcggatcagaatcccgacaaggcccgcgagatgctccagcagctcaagctcgtcatcggcgaaatccgcacgagctgaggataggaagaaagggagaactgggggaagggtttcccctcccttccccccacccccaatccctccccttcctaaggtttttgtttttagcgaacccttgttcactgtgttggggaggtgccggatccttgccgggctgcggggcttccttttccatatatctcactctattccatgcactgcgcggagcgcatatgacaactgccgttgcgaccaacaagctgtccggaaagtggataggctggctgacgagcctgctcggtggcctctttgtggcttggtgcttttatgacccgagcacgccgaaagtgaacctctactggttcgggacgatcatggcgatcggcatgttcgcctttgacctgctgccgaacttcgtcaccgccgtcctgctcctgatgtactacatcctgacgggcatcgcggccccggatgtggctttcgtcggctggaccacccccatcccgtggctgtgcatgtgcggtatgctcatcggcgtgctcatggaaaagacgcgcctcgccaaccgtattgccctgttcaccatcagccgcgtggggaccacccccattcgcatgtacatcgcgttcctgctcgccggattcatcgtcagcgcgatcatccccgacgtcatcacggtcgacatcctgttcatggccatcgccaccggcatgtgccagagcctcaacctgtccgtgacttcccgttccgcgaccaccatcgtccttgccgccttcttcggcgcgaccatctcttcggctgcctacctgcccaacaacacgggcatcatcggcctgctcatggtcaaggacatgggcgtcccgttcacatggctgggtttctacagcgaaaatctgccttaccagatcgggcacgcgctgctggcctataccatcctgcaccttttcggcgggcgtgagcttggcgagcacatttcccgctgccgcgcttgtgccgaagcggaactcgccactctcggcaagatgagccgcgacgaaaagaagaccctcgtcctggccttgctcgcgctggtggcttttatcagcgaaccgtggcacggtatccccggctacttcgccttctgcagcatggtcctgcttgggttcacccctatcttcaacttgatggaagccagcgatctcaagaaggtgcagttccccatcctgttctttatcgcgggctgcatggccatcggcattgtggcgggaaccctcggcatccccgcatggctggccgggaagctggtgccctacctccagcagatcgacagcaatgccggttcgtccatgttcgcctattgggtgggcgtcgtcgccaacctcgtgctgacgcctgtcgcggcggcaacgtccctgagcgtgcccatggccgaaatcgccacctcgctgaaccttgggatcaagcccatcctgtacagcttcctgtacgggcttgaccagttcttcctgccgtatgagctggccccggccttgatcatgttcgcgaccggatacgtccgcgtccgttaccttatcggtatcatgctgacgcgtatggttttggccagcctgatcgtggcgttcgtcgccacctttatctggcctatgatgaacctgtagggaggggtgaaaaggaggaaacatgaaccgtttcggattctgcaagcaggaaggcccggttttccgcatccgggatctcaacagcccgtggcgttcggtcctgcatctaggccagcgtcagatggtaggcaagtcctaccagtgggaagacgatcccgaaacctccaccttctcgtttttggagaagggcagggtacggctcctgaatctttccgaaacgggcaaggagcgcatcgtgctctatatcgagccggggtgcctcttccgcgaaatcgtgttgctgcatgtttccccttcgcatcccgcgtcgctggtggcgctggaaccctgtgaagtctataattttccccggaccctgctggacgatgccgaattcgtgcggcgccatccggcgctgatgagcaatctggtccactcgctcggagccaaggccggggccttttacagccagataaccgaaagcgtcgagctggacccgcagacgcaggtatgccggtatctgcaccggctggccgatgagcgccggacccgcgtggtcaaccccggcgtgtcgcagtccgagctggcccttgtgctcggcttgcatcggagcacggtatgccgcattatccggaccctgcgcgatcggggcgttctagggcactttacccggtgttcccttgagatcctcgaccgcgaagccctcgcggagttgtgcaacccgagcgagggaggaaaataagatgaaccggggagagggagctttcggggagtacccgcacggtttctccctccctggatacaccgccttcccacacattttcgaggaagggaggcggcacggaggggaatctcctttcgtgacgagagaaccgcatgaaacccattggagtgacattatgatcgagatcatcaccgaagctgactacaaggatcgccttgccgcgacgcaaaacggcgtgctgctgttcttcaagaagctctgcccgcattgcaagaacatggagaaggtgctcgagaagttcggagccgccaaacccggcatcgcgctgtacggcatcgatattgaagagaacgccgccgctgccgccgcgctcggcgcggaacgcccgccgacgattttcgtcatcaagggcggtgaggtcaaagcttccaaggtcggcctcatgaacccccgcgaaatggccgcgttcttcgagaaggcctaagttgccgaatggggggaagggggattcgagaacggtgcgctgatgcgcgctcccccttcccttcacattgtctttttctcttgtacatccgttacgatgaaggcttcgataatcgcttgtttttgccaatgattgcgtgagccgaatccccttcggcggcaaggcatgggcaaaggcgggccggtcgtcgcgtcgtttgtctcggaaaaggcggcggttcccgtgcgggaaagccgtggcgtcatctcctcaccagccgaaacgttttgaggtgggggccgggaaggaaggctttttataaagggccttttcctcggcaaatcaggagtttccatcaggagcttgcaatggaagaacgtacttgtgacatcatcgtactgggcggcgggcctgccgggatgacggcggcgatctacgcgaaacgcgcgaacctcgatgtggtgctcctcgagacgaatgtgacgggcgggctggtgaattcgacgtatacggtggagaattttccctcctatcctgagatccacggtatggaactcatggaaaagatgcgcgaacatgtggatcacatgggcgtggaagtggaggaagtgttcgaagtcaccggccttgagcttggcgaagacgagaaagccgtgcatggggacggcatcgtttacaaggccccggcgatcattctggcgacgggccgcaagcccattgcgctggacgtgcccaccgaatgcgatcagatgcacttctgcgcgatctgcgacggcgctccgtacaaaggcaagcgcgtgctcgtggtcggcggcgggaacagcgccttcgacgaaggcttgtacctcctgaatctcggcgtcgccgagctgaccgtggtggaaatcatggatcgcttcttcgcggcggaggccacgcaggacgccctgctcggcgatccccgcgtgaagggcttcaagacgaccaaggtcgtggacgtggaagtcacggacggcaagctgtccgccgccatcctcgaaaacgcgcagaccggcgaacgcaccgcgctgcccgtggacgggattttcgtcttcctcggccagtccccgaacaacgaatggttcaaggatgcgatcgccctcgatgacaagggctacatccttgcgggcgaagacatgtctaccaatattcccggcgtgttcggcgcgggcgacatcaaccacaagccgtaccgccagatcaccacggcggtcagcgacggcaccatagccgctctcgccgccgagcgttggttgcgcagccgcaagaaataaggttatgtatgactccgggggaggatgtttggggaaaggcgtcctcccccgccatgccgtccgcatgaacgggcggcggggagagacgttcccggggggacgcacgcatattccatccgcttgaatacccctctttatcctcagtaacatgcggttaaagagcgtgtagctgggtgtcgggatatgtgtccaaactcccccttccggtttgcgccgggagggggagtcttttgtgtaccgagctgttttttccagaagcggggcctgaacccgtgcctcggcaaacggaaagggattttacgggcggatgaccttgtcggccagtgcgaggctggtcacgacatccagcatgttggtggtctgtccggcctgcttcgcctcaaggaggccgtagaaatcaaggcaggttccgcagacgaggacgtccgtccccgcgttttccagagccttcaggctgtccagtgcttttccgggggtggcggcgagcttcacgccgccgttcagcagaatgacgcgccacaggctctcccccagctcgggcagggtggccaggaaattccccatcagtttttcgcccagctcatcatcgccgcgcccgaaggtttcggtggtgatgaggaccaacgtcttgccgggcgtaagggttgcggcggcgggttccggctcggtgacgcggcatccgcacgctgtggcggaaacgcaccacaagtcggctccttcctgccgtacttccacggaatagccgttgcggccgagaaagcggcccacattttccgaagccgccgtattgtccacaagcacgcgcagcgaggcgggtttttcttcttccagcatcctgcggcagcggatgactggttcggggcaggccaacccgcagcaattcaattccttggtcatgtgactatccttttctgttttttcatgaagcggccgccgtccgcacaaacggctggacggcgcttccatgccgccgagaggcttagttgagcatttcgaggaaggcttcgatccggaccttgagctgttcggtatccgcctccgagtagtccgtcacgatctggaggaacggcagatccagttcctcacgcacgaactttttgacggaccacgattccacatcgtacgtctggcatccctgccaggtgagatcgaccacggcgtccgcctggaacgcttccgtcagctctcgcagcgccgtgtagcggttggggttgggcgacatgacggagcatggcgtgtcgagataccgtccggcgagttcggtcagcggatcggcggtttcatccatcatcaggcgcacttttttataacaggtgcagttgtcgatgcagacgatgctcgccccgcactcttcgaggagctggatgaccttgtgggagcccagccccgtggggacgcccgtgagcaggacgcggggcgcgtccggggaaacggccccgtcactcgccccgccgatctcggcggcgatgtcctgaaggagcgcgatggcctgctcgtagtcgggcatgaaggaagcccggaaacagatgtccagcagatccatgcccgtcaggggcgacggtttgcgcttggcaaggtcaaggacatccttgagggctcggcggagccggttggtcagccggacggcattccgcagatcgtccgtggtgatggaaacgccgaaatccttttccagcctcgcggcgagcttggcgtactgggcgcgccagtagtccttggcgtccccgtcctgaatctgcggaagctggagcagtacgaccggcttgtaggcggccagcagttcgtacatctttttcttgccgtcgcaggtggtgtccgccaccacgatgtccgaggcggcgagatagggacagctgtcttggagcgcgaaaccgaaactgctcttgatcagcgggcaaagggagcgggggagcatggtttccgccaccgggatggaatcgtttttcgtgccgcacagcgaaaccggaatggctcctgcggcaagggcgatttccagcggcgaatagatgcagtactggcccacgacctttttccccgcttctttggcttgttgcagcgccagcacattgcgcccggtgatgtcgcggaaccgttcgagacttgcgtatgccatgaaagttctccttcaaggtatggtggtgaagccgttcagatgcgggcggcaatcaaggccgctccgatggctccgacgagttgcggatactcgggcacgttgaccgggacgccgagttcttcggaaagcagcctgctgaacgaagggcttgtcgccagcccgcccgtgaacgtgcattcgccgcgcaagggtatgcgggcggcaaggccccgcatacgccgggcgatggagcggaagacgccggcggcgatatcggcgggtggcgtaccccgcgcaagcaggccgatgatttccgtctccgcgaatacggcgcacatgctggaaatggcggcgggctttccccgtccggcggcttcaccgagttccgccagctccatgccgaggatgccggaaaggacctgtagaaaacggcccgtgcccgccgcgcacttgtcgttcatcagaaaatcctgcaccgagccgtccggggccgtactgatgaccttgctgtcctgccctccgatgtcgagcacaacgcccgttccggggaagaggtggacggcaccgcgcgcgtggcaggtgatctccgtgaccactttgtccgcaaagggcagggaaatgcgcccgtatcccgttccgacgatacgggatgccgcgatcccgcccgcgtcggcacaggcggcggccagcgctttttccccggcctcgcgcgcgttccagcctgtgggcaggacggccttgcccaacagcgaacgcgattggggatcgaagataacggctttggcggctacggagccgacatcgacaccggctacaggcatacggctctccttatgggggcggcgtcggatacggaacccttgggggtggcgggagcccgcccttccgtccggaacgggcagaggctcttcacgggcgtgcccatgtccatatgcttctgggcacgaaagaaagcggctccggaagaactcttcgaggcaggggtatcaggaaacgccgaggggcttaccgttttcgacaagcgcgtagttttcccgatcggcgaaaggcttagggcagacgcattgagcttcgaaggccctgtccttggacacggccgcgatgggcggggagtggcgtgccgtgaaaacgaggccgcctcaaaggagggaagctcggccgagggtttcccgagcaggccgtgtgcggtaagcccggcaaggggtgcccggcggaagggtgcgaacatggacatttcccaatgcttgttgtgtatgaacgctccgaaaggattccggagccttcgacgcggcagcgaaacgtgtaccgcgcacgagatacaaaaaagcccgtatgcaaccatacgggaaaagcgatgggggaatgtccgtcaggaaagaaaggcgggaggggatgccgctatcagcacaccgccaactgtgacggggacatacagccccaccgcagacggcgtcaggtcatgcctgaaatctgatggcggaaacgagacatggggtacctttgctcagtattttcataaagcaataatcgctggccattggaatgtaaagggcgtttagcgtttgattttcatagatgacggatgggattgccttttccagttcggagtgcgtcatttcactcccttgccctggctgtttatcgcctcctccggaataagataacggacagcaaggttttctgggcgtatccttggaccacgaaaaacaggcaagggagagcaaagggaatacgcctaggccgttagagggcttgagagagaacgtttctggagagttcaatggatagtgccatgatagcttcgcttctttcatacgggaacattgcgatcaaactggctgtagggctgatcggttttctttgggtgctgcggacgaccaatcgctgccaattggcacagatgaccccggtcgaccttataggcaatttcgtgatgggcggcatcattggcggtgttatttataatcaggacataactaccgtacaattcataatcgtattggcgatatggcaacttctggtattaggggtaaatgccctgcgcatacacacggagtccggtcagaagatgatagtgggaaggcctactcctgttgtgataaaaggcaagtatttacaggataaatttgaactcttgggtcttgatatcgctgattttgcgacattatccagaatccagggcgttcactccctctatgatatatggaatgcgcagattgagccgaatgggcaggccaccattcagaaaaaagatgcccgcaaaacatcaaatatactcataacgaacgggacaatagatacaggcgctctggaaatgatggaaaaggatgaaggatggttgaaaaatgaattacataaaaggggatacgaatcgtataaagatatcttttttgccgaatggaatgaacttattgatgatgaaaggggaaaagccggggaactgtatatcgttgagcgcacggaaaaaagagattgaaaaggatactgccggagaggaatgcccttcaaggtgacgccatgcggaacatcccgaggagtttttcctatccggaagaggagatcacgccatgtccgtgccttgtacggatgaagcctccccgcgctaccggcgggatggttcagggaaatgcgtagcggaaatgtaaaatccggcccgcgatatggccttactcactccgggcgagcagaaaatgttccggcaggatttcccgccattccccgctcagatccgccgtttcatgcgtgtaggggatgatcttttttgagcgttcgtaaacaggatccggtacgggaatggcggagagcagcgcacgggtatagggatgcagggggttcccaaaaagctctttcgccggggcgagctccaccagcctgccctcgtacatgacgcccacgcggtcgcagaggtaacggaccatcgacaggtcgtgcgcgatgaacaggaacgtgaagccatgctgccgctgcaagtgctgaaagagggacacgatttgcgcctgtatggaaacgtcgagtgacgcaacgggctcgtcggcgacgatcagttcggggttgacggctatgctgcgggcgatggcgacgcgctggcgctgcccgccggagatctcggccggaaacttgttgccgtagctggtgtccagcccgacaagcgtgagcagtttgtccacttcggcccgcaaccggaccctatcgggataaacacgattgataaccaagggctccgcaatgatgtcggcaaccttcatgcgaggattcagggccgccgcagagtcctggaagatgacctgcatattgcgctggatatctttcttgtgctcccggtaggagcgcttttccgagatcagaaagtctttgaagtaaatctcgccttccgtcggggtataaatgcccataatggcgcgcgccaccgtcgacttgccgcagccggattccccgaccagcccgaagatttccccctttcgcaagtcgaaagaaatcccgttgacggcgtgcaccgtcagggacttgttgatgggaaaatgctgcttgtagtttctgacggataaaagaaccggattcttcaatggaccataccgcggcgtttgatggtgacgggaggcgtgaccgcgggcgccctttcatccagaagccatgttgcggcgctgtgggtttcggaaacggggaacatcggaggcatccgctcgtaatcgattttcatggcatactgattgcgttcggcgaaggcgtcacccggaggcggatcaaggagcgtcggcggcatacccggaatccccctgagctccccgttttccacggcctgagagggaagggcgcctagcagcccccatgtgtacgggtggcgcgggtcgtaaaagatttcctcggcggtcccgatctcgacgattttcccggcatacatcacggcgacccggtccgcgatgcgggcgaccacgcccagatcgtgcgaaaccagcacgatgccgatgccggtcttgcgttggatatcacgcagcaggtcgagcatctgcgcttgtacggtcacatccagcgccgtagtgggttcgtcggcgaagaggatgtgcgggttcagggccagcgcgatggcaagcacgcaccgctggcgcatccctccggaaaaatagtgcggctgcaagagcatccgctgggctggatcgtcgatgcccacgcggtggagcatctccacggccagtttttgcgcatcttcccggctcattttgcggtgtttcagcacggcttccgtgatctgcttcccgatggggatcgtggggttcagcgtggtcatggggtcctgaaacagcatggaaaacagggaaccgcgcagcttgcgcatctgtttttcggtatacggggcaatgtccttgccgtcgatgagcattttgccgctgatccgggcattgccgggaaggagtttcatgaccgatttgcacaaaacggacttgccgcatccggattcgcccacgatggcaagcgtttcgccgctcttgagggacagcgaaacgtcccggacggcctgaacggttccgtcgggcgtgtcgaaatgaacggaaacgttttccagttccaatacggtgtccatgtcttcctcggtgctccgaaaaggcagccggggccgcccggatgtcccggacggccctgctgcgtgcggttagcggttcagcgtccagtcttcgatgttccacatgacgcccacggcatggtggccgagaacgcgcgcggtatcaagccccttcagcccggcgatgctgacgtagttgccgttcaggtacgcgaccagcaggtggccggggcgttcggcataggcttcctcaaactggccgtagatggccttgcgctgggccggatcttcggtggcgcggccctttttcagcagttcgtcgaccttggggttggaataggccatcgtgttgtcgctggctccggtgacgaaatccttgtagacgccgtccgggtcgaattcggcggcgaacccggcgaggaacccgttgtacccggccttccagtcaaatttggtgacgaggacgatctgcatgtcgaccccggctttcttcaattcgttggcgatgaccttggcgatgtctacgcgctcttcctcatagtcccggacctgaatcgtgaacgagaacttctgcccgttgcgctcgtagatgccgtccttgcccttcttccagccgagcttttccatttcggcggcgaatttcttgagatcgtaggggtagatgtccgcggccttgttgccgccgtaggcgttcatctggatggggctgaacgcagggaacccctggccgttcagcacgcttttggcgatggcgtccttgttcagggcgtagttcagaacgccgatggagtcgccgttccgcttccagaagtcggtatggaaatccatagcggcggaacggtagtcggcggtggcgaagtcgatgttcttgtagccgtccttgccccggaacgtgtccgcatacttggcgttcagccacgccagatccgcttccccggactggagcatgagggccttggtgctttcgacggcgacggtcttgtagacgatccggtcgatgttcggcaccttgccgtagtagtccttgttcttttccagaatgatcatgccgccggcggtgtcccattccacgaacttgtaacgcccggtgcccacggggtgctggttggcgggggcggtgttgatgtctttgcccgcgaacaggtgcttgggcaggatgccgatggtgaagttgtccagcatggcggcgttgggcttggacaaggtgaagaccacggtctgggcgtcaggcgccgtgatcgacttgatgtcctcgtagttgctggtgatggatgaggccagcgtcttgtctttggtcagcgcttcgtaggtgaacaggatgtcttccacggtgaggggcttgccgtcgtgccatttcacgccgtcgcgcagcttgaaggcataggtgtgcgtccctttatcataggtgaagctctcggcgagctcgggaaccggctggcccttggcgtcgtacttcatcaggccggaaaaaatgattgtgggcagttcctgatggttgttgagcagggggttgatggtgtcctcgttttccccggcgtagacaagggtgttcgccatttcgtcggcggcgttggcgggcattgaggtgagacagagcgcaaggcacatgaggccccagcgaaccgttttcaagaccggagcggtcaatacgttcctcttcacgaagttctccttttcggattgtcgtaggttgcctgtatttataaaggcgacctgtggttacaggttgcttggcccttggttgcttctttttcggaagtaatggccgatgctggtgatgctcagcagcgtaaccacaaggaaaaccccggggatgaggatgacccaccacgagttgaggaggagcgcccggtcggccaatgccaacatgctcccccatgagagcacgtccacaggcaggcccagtccgaggaaactcaaggtcgcttccatcgccatgctggtgctgatgctggaaatgaccacgaacatgatcgccgacacgaagttcgggatgaggtgcttgcgcatgatgaagggaaaccgcgcgcccatgcagcgcgaggcgaggatgtactcgctgttgcggatctgccggacttcgctccggacaatgcgggacagggcgaaccagccggtgacgccgatgacgagagcgatggtgagctcgttcggtttgcccatgagagaaaggatcagcagcagggacagaaggaccgggacactttgcaggagttccaccgcccgcatcatggcgctgtccaccacgccggaggcgactccggacaggcagccgtagaaaaccccgataagggtaatgaccgcggcgctcatcagcccgatgaagatggaagccctgccgccgtaccagatgatcgagtaaatgtcccgccccagagagtccgtgccgaaccagaattcggcattgggagcctcattgacgttcatgagaaagagttcggcgggatcatggttgatgatcaggttggaaaaaaggcagccgagggcgatcacggaaaacacggcgacggagagggtgggcttgcctttcagccgagcccagaagccttttttccgtatggcgggctggtgcgccctgtacccggccccgacgatcgtgaaggcatcgttggaagaggcgtccatcagcacacgaccccgtcagaagacttcatgcgcggatcgatgacttcgttgacggcctgcgcgacaaggctgctcagcatgaccatcgccccggtgatcagcaccatgagcatcagcaggttgtagtcatggtatttggcgctggatacggcgagcaggccgatgcccggatagttgaatacggattccgccacataggtgccgctcaggacgtgggggatggagatggccatgatgctgacgatggtggggagcacgttccgcaggcagtggctcagcaggacccgtgtccttccgagccccttggcccgcgccagcagcacgtaatctcggcggatttcatccagcagcttgttgcggatcatgtaagcgtaataccacaggtggctcgccaccatgacgatgagcggcaggacgaggtggcgcaggcggtcggccatatcgccggatttcccgatcccgtaggcaccgctgctcggcagcagtttgaggttgacgctgaaaacgagcaccagcaccacgcccatccagaaggcgggcacataaaaggctaccgtaccgatgcggcagacgaaccgatccatgaaagtgtcctcgaaccgggcgcagaagagggcaagcgcgatggcgagcataaagaccagcgcgtaggcgatgccgccgagcatgagcgtattgccgataagcggagaaacgacatcgaggacggggcgtttgtatttcaaggagatgccgaaatccccctgcatgacgttcccgatccatttggcgtactgcatccagatggggccgttcagccccagccgttcccgtgcggcgtccagttccgtggtcgtcatggactgcatggcgtcgccgtagaaggattggagaggatcgccgggggtcaggcgggatacatagaaaacgatcagcgacaacagaaacatcatggcgatgaacaccagcgttttccgtgcgagagaagtcatcagttgtctgctgttcatagtctgccttccttggagcgcgatccttcggactgttccgagatcctgtttcgtaacacgttgttttcttagatgtagagtatagtgttacgcgtataaaaaatgtaatacgaggtataccggccaccgccgacggtgtcaatgagaggtcttttgcatcaagcgggcacgggcttcgggcggatttcctccatggccataaacggattacatcctgatat

SEQ ID NO: 7189 - DNA, 1436 bp, Unknown
  gut microbiota DNA sequence
ggctggtagtcaggagggcgtttttcccctaaaggggaagactgtaagacctttttccactcttctggaaaagccttttctccatacgttgctcccagcaaggctccataaatagccatatccacaggaaaagtgtcttctacacaggaaaggataccttctgttaggggtttagcatgtaataattggtaaaaagcattttgcagagaacaaatagctccttgatagggggcatttggggggctggttgacgccctaagaagggcttccaatacagttttttcctggttttcggacttaaaaccccattctattgttttttcatagagttcttcaggggtccctgatttcaaagcaaaaaatacggcaactgcgtaaatctcgttggtaaaaacgcatatggggtcgggatgggttatcttaacgttaagggcacaccaatgtattacttgcgttaactcgcagttcctcccaaaacaggctaacacggctgtcctgagcaacgtgctggtcttttcgcctattccggtaagaatcggcctgttttccttaaatggccttgagagcatccacgtaaggtaggcgtagtaaacggcttctggcttaaacattttttctttaattaaagagttcgccaacgccaaggccagttcgatgccatcatcaggcttccacgtgaaaggaatattccaaacaaggctggagaaagcgttttcactgggagaatactcccttgtgatagcgttcagccaagcccctgccgccattcccaataaacaaccttgaacgcgctctaaaacacctttttgtgtatgactgtctgtgtagcgagttttagtggttacgttatctattggaagcttaatactatttagtaacgcattccattctttggctaattcatcaagtcgtttttggtcttcaaggggatttcctgtattaacggaatactgctctagccattcatcaacaagctgtgactgctctaaaaagagttttttttcatcctttaacagggggggaccttaaaaagagcttccctcctatgggattccccctttcttattctttgttcatccgttacagcctgaataattgcttttagctccttattttccattgtttttaaccaagttaaaagcataagagtcgatgttctcacaggaaactccctttttcctagcttaatccatagttggttgctatgtttttaagatggactttcccaacgcataacatatccaaggaaggttagccacggaaaaagggagtttagtaatatacatcaagaatagatttttattataacatgctaaaatttattgtaatatcaagataagatacaatttttactgcacccaagagtttagtgacaacgcgataagcaatctcctctctctttctttttttctctatctacatattattaattatat

SEQ ID NO: 7190 - DNA, 13761 bp, Unknown
  gut microbiota DNA sequence
ctatatttttttctatacgggcacctcattttcataatttatcgtataattacaaataattacataagcaatacggtagtatgcgccttctctaaagaaaattggccattccacaaaaaaagacgcgcggaaaaaccgcgcgccgcatattcatcctgactaccaactagtgtaccgaagccgccatgctcgaaaaacaattgagtgtccgagaaatggcaaacggagtatccgcgataaactcaaggcatgttggagacagtcgttttgcaccgggaagcatacagaaaagatctgcatggtaggtccggactgtggaaacctgtacggaaaacggccctgcaagtttcaacggcttgcatgagacattccgcagggccttttgggcggccacgtgtaaggccttatggaccaccccaatcggctgatgaacagctgccctcgtactcaacgcccgtttcacagtcacgatctccgcattggggtaaacggaaacagcttcttcagcgagccggtcgtcaccgctgatcagacggacgggaacatcgtactccccagccagcaatccattcagataatactcacccacaggagcaccgttgatgcggacctcggcgaacgccgatccgttgatggtgtgggccagcacgccatgagctccggcacgcgcgtgatatccgatcagaaacaatccatcccacggaccgcaatcaaggccgcccatcataccaaacaggcgcggctttccagagaccaggcacgcacccggatgcagctcttccaacaggatattgttgtattgcccatgcccgtcagccacccatatctcggtagctccgccttccaatgcaccttcgacggcggcattgacttctcgggtcatgagcagccgcgcccgttcgtactcgccagatccggggctcgtctgctccgggctcataaccccgctgataccttcaatatccgcagaaatcaaaatgcgcatcgttttctccgtattccgaaccagagctgttgcggtttttagctccgtacgatatcacgccattccggcaaaacttcctgaatggagggccgtctatggccatcgcgcccgacaaacggttccgcaaaaaacagggctttgaaaatagcttgttcggtcgcctcggcggcagcctgaaacagtcggtccatccagccgtccggtgcatgaagaagcggcacggcggattccgccaactgcgggagatgctggctggaagaaaaggcaatggctacgtctccgctgccatgtccaaaaagagagcccgtccgtgcaaggccattcccagcccgccgggccagccgtccgagctgcaatacatccagcggcgcatcggtcgccagcagcatgatgatgctgcccttttccggtgcagcggcgagcacggcggcttccgcaccgatacggtccagccgttcctgcaaaagatggcccacgggacggccagccaacaggcagtgttccgctttgccgaaattggagagcaccaacgcgcctaccgtaaaggcctgcccaccgcactccgctattcgggaggccgaaccaatgccccccttgagatggaaacaggacatgccccgcccggctccaacacttccctgcctgaattcgcgtgaagccgaggcgcaagcttcgatataatgtttttcagttacggcaagagattggatatcgttcaaatacccatcgttgcattcaagaaccagcgggttgaccgtcgaccactcccggcctacttccggatgcgcggccgccgccgcacggatctgtgccgtggcgattgcccccacggaaaatgtgttggtcaacgccagcggcgtttcgagacaaccgagttccgccatctgcatcagaccgacacttttgccgaaaccgttgaatatacaactggcggcaagcggcttttgcatgagcggatcgtcgttggggagcaccacagtcacaccggtatgaacatttccttcatccagcgtacaatgcccgacgcggatatcgcccacgtccgtgatcgcatccaactgaccgctcggcaaaaacccgacgcgggggaaatccaatccgtccatggctattcctgatcgatcttgggatcaagcgcgtcgcgcaggccatcaccgaaaaggttaaacatgagcaccgtcaaaaaaatggcgaggctcggaaaaatcgccacatgcggggccaccaccatatcggcgcgggcctcattcaacatcgctccccactcaggtgtgggcggctgcgcgccaagaccgaggaaggacaagctggcggcggtgatgatggacgtgccgatacgcatggaaaagtacacgacgatggacgagatcgtaccggggaaaatatggcgcagcataatcgtcatcggaccggcgccgagactgcgggccgcctcgacaaatgtctggcgcttgagtgacagcgtgttgccgcgcaccaaacgggcgaatgcgggaatgctgaagatcgccacggcgagaatgacgttcgccataccgcttccgagaaccgcaaccacgctgatggcgaggaggatgccggggaaagcgaacagcacgtcacagacgcgcatgaccacacggtcccaccagccttcaaaatacccggaggtcaggccaagcagcgtcccgacaaccgcgccaaccagcacggaggaaaaaccggcagtaagcgaaatgcgcgcgcccgcaaggatgcggctgaagatgtcgcgcccgagggagtccacgccgaaccaatgctggagcgagggtccagcattcaacatatcgtagtcaaagtaattttcaggatcataaggcacaagccacggccaaaagatggcgatcagaaccaacaggccaatgaagctgcccgcaaacagcgtcatgcgctgccgcttgaacttgcgccagaattcgctccacggagtacggacttttgtggggccggatgagactgatacgttgttttgcatactcatatcacttgaagcagattcgtgggttgatgacggcatagaggatatccaccagcaggttgatcaggatgaattcgagcgaaaacaggagcacttcggcctgaagaaccggatagtcccgcatttccacggcatccacgagcagacggccaaggccgggccagttgaataccttctcaaccacgatggaaccgccgagcagaaaaccgaactggaggcccatcatggtcacgacagggatgagcgcattgcgtaggccgtgcttgacgatgaccgcccactcgctcaggcctttggcgcgggccgtacggatgtagtcgtcctgcaggatctccacaaaagacgcgcgagtgaaccgggccatgacagcggcgacgcccgcccccagcgtgatggacggcaaaatatagtgtttccacgagtccgctccgacagtgggcagccagcccagcgaaacggaaaaaatttccatgagcaacagcccgagcgcaaaggtcgggaaggaaatcccggaaacggcaagcgccatccccgcgtgatcctgccatttgttgcgctttgtggctgaaatcatgccgatgatcagcccaaagaagaccgaccagaccatgctccagacggtgagccagaaggtcgccgcgaaacgctccccgatttccacactgacggggcgcttggtccgcagggaggtgccgaagtcgcctttggtaatgatgttgccgaaataggtgatgaactgttcaggaaggggcttgtccagcccaagatccttgcgcaccagttccacggtgacctgatccgcttccggcccggcggcaaggcgcgcgggatcgccgggaagcatgtgcacaaacaggaacacgatcaccgcgaccagaaacagtgtgggcagcaacccgaggaggcgtttgagaaaatagtggagcatccgttgaaacctcgccgaagggcggaatgacgggccgggcatgacgcccggccctgacactggaattattgcagatcgatttcttcgaagaagtagttggcgtcaggcatgacgtacatgccggtcagcttcttgctggtcgcgtagagcagcttttcggtcacgaggaaggcccagggcgcatccttccagatttcttcctgcacttcggtgtacagcttggtcttttcggcgcggtcggtggtgccgagcgccttcatgatgtccgcgtccacagtggggttcttgtagtaggaaatgttgtacatggaaggcggagtcttgtctccggcgaacagcgggcgcaggccccagtcggcttcgccggtggaggaggaccagccggtgtagtacaggcggacgggcgcggtggcggcatcctgatggctttccaccttttccacgcgctggcctgcttccagagcctgaacctgagccttgatgcccacctgagcgagctgctgctggatgaactggatcaccttctggccggtggtgtggttgtaagcggaccacagcgtcgtctcgaaaccattgggatatccggcttcggcaagcaattccttagccttcttggggttgtacggccaaggaccaagcttgacggcatagtcgacgccctgcggcagcgggccttccgaggggaaggcgtaaccgctgaaagccaccttggcgagggcttccttattgatggcgtagttgatggcctggcgcacacggaggtcgtcgaacggcttctggagcatattcatgttcaggtaacgcgtcacgatggaaggcgcggcgaccagcttgaggtgctcgtccttttccagaacggcggcctgttcatacggcacggggaaggtgaagtgggcttcgccggtacgcatcatcgcggaacgggcgttgttgtccacaacgggcacccaggtgatggtatcgatcttgggcaagccggggcgccagtagttctcgttcttcgcacctttaagataatcggtctgcttccattccacgaacttgtacgggccggtgcccacggggtggaacatgatgtccttgccgtacttcttgagcgcggtgggggaaatcatgaccgcggaggggtgcgcgagctggttgatgaagggcgagaagggcgtcttcaaggtcaccttggcggtgaggtcgtcgaccacttcggtcttggcgatgttggaatacaggctgtagcgcttcagcttgttttccgggttggtaacgcggtcgaagttgaccttgacggcttcggcgttgaagtcggtaccgtcgtggaatttcacacccttgcgcagatggaaggtgtacacgagcccgtcgggggacacgtcgtaactttcggcgagcacgggacgcagctcaagcttctcgttgaagccgaacagcccttcatagaaggttttcgcgcaagcgtgggacagcgtatcgttggcatcccacgggtcggtggtggtcagggtcgaggcgatggcaagcaccacatccttggacgcatgggcctgcggagcgcacaacgccacaaccatcgtcgcggcaataatcacttttttccatgtcttacaaaaaaacatacttactcctcactgatgcgcctgaacggcgggttgatgacgacgccctgcgccatcgcggaacgtcggacaatcctgaacgtgttgaacgaactcagcgcttccgctccaataggctcgaaaggcaccctttatgcagccaagctcgccatgaaaacggagtcccgccgaaaaacgtctccctcggcgaagcactcttgaagcgcgaaacgttagacgatcctaaaaccagttcgccacctgctcttcagatacgaaatggccagggctcacttctttcaggggggccaccacgggctcataatccgctgaacggacagggcttgggatttcgccagtcaacaaggtatgcgacatggtgcgccgcgagggatccggaataggcacggcggacatgagtcgtttggtatagggatgcaacgggttttcaaagacgtcacgccgggagccaagttccacgatctgcccgaggtacataacggccacccgatggcagacgcgttctatgacggccatatcatgggaaataaagaggaaggcaatgcggaattctttttggagggccagaaggaggttgatgatctgggcacgtacggatacgtcgagggcggaaacggattcgtcggcaatgatgatttccggattcatcgccaatgcgcgggcgatacagacgcgctggcgctgcccgccggagaattcatgcggatagcggacggccatcgcgggatccagatcgacgcgctccagcagttccccaacccggcgttcagcctcctgccgggaacagaccttatggatcagcagaggttccatgatggaaaagcccactgtaaggcgggggtccagagccgcatagggatcttggaatacatactggatattacgccgcagcttttgcagctgagagccggatacctgcgtaagttcttgcccgttaaaaacaatactgcccgaacgcggggtctcaagcccaatcagcgaacggccgatagtggactttccgcagccggactcacccaccaggccaagggtttcgccgggatacagattgaaactcacctgctccacggcatggacgcggcgtttcaccttgccccagaaaccggtttccacatcaaagcgggtgatcaggttatccacactgagcacgggtccatccgatacggatggcacggaagcgacaggttcgggcatgtcgacgggcgtttcatccatgtcggcggtgcccagctgttcggcttcgggatcagtaatacgcagcagcgggaagggagcgggttcgtcagtcccccgcatggacccgaggcgcgggacagccgccagcagggattgcgtgtaggggtggcgcgggttgtggaaaatctgctcacaggtgccctcttccaccgcttccccgtggtacatgacgagtacccggtcagcgacctccgccaccacgcccatgtcgtgggtgatgaagatgaccgccatgcccatctcttcctgcagctgccggatgagctggaggatctgcgcctgaatggtcacgtcgagcgctgtcgtcggttcgtcggcgataagcagggaaggcttgcaggacaaggccatcgcgatcatgacgcgctggcgcatccccccggaaagctggtgcggataccgcttgaggatctgcttggcttcagggatacggacaagctcaagcatcctgagagcttcagcctcggcctccgcgtggctgagcccctgatggagcatgaccgcctccgctacctgtgtccccacggaaaatacggggttcagggaggtcatgggctcctgaaaaatcattgaaatttcgccgccccggatagtgcgcatgacactgtcggcggccttggccagatcgagttttccaccgttcctgcgggtgaaggagatcttccccgaggcaatggttcccccgccatgctcaatgaggcgcatcacggacaatgacgtaacggatttcccggaacccgattcacccacgatggccagaacttccccggcccgcacgtgaaaccccagatcctttacggcaacaacgcttcgttcggacgtatcgaagcggacggtcaatccctggacttccaggacgtttctgtcactcggccccattcccttctccaattcccaacctaacggtactccgccccttccggaacggtttccagagacggacgcggacaagccaacaactttagcggaacaaattcgaggctggggatttcacagggccttgccgaaccggcaaaaccacgttgggaaaatcccgcagccttcgttttcgttcgagaatatccattagaagcctaaacaaccctgttctgtcaatagaaaaaaagcactccccctctacaaaaaagggctgaatgccttttttctctttatcgtgaaaaacagaacaaaatcaccgacctcgctcatcttcacgaataaatgcaaacaacaggcggaaacgacatacagaatgaactcaccacctgttttttctacgctcaacagccttcttcctgtccataaatggccacgagcggagcctccgcccccctgacacatccccggtacatgccttcggagatgaacggcagcgtcacatgcccctttttatccacggcaatgagcccgcccgtgcctccaagctcacccacccgggccagcacggcgcgtacggcgtcctcaaggctcgccccctgatagcgcacgcgggccgctacgtcgtgccccaccaccagccggatgaaatattcgccggaaccggtgcaggaaaccgccacgccatcatcggcatagcaacccgcgccgacgatgggcgtatcccctacccgtccgggaagcttgttggtcatgccgcccgtggaggtcgccgcagccagattgccccggctatccagcgccaccgcccccacagtgcccattttcgtcttctcgtcgagcggatttccggcgaaggaaagtttactcgccgcagccgcgccgtcgtggtcgagcactgccgcgccgggctgcctcgtctgcgcctgatgcagctgagccaaacggtgttccgtgtcgaagtacgcatcgggcatgaattccacgccgtgctcgcggaggaacgccatcgcgccgtcgctggtcatcaggacatgcggagactgctccatgaccacacgggccgcccggatcgggttcttgacgccgtgcacgcacgaaagcgcgccggtccgcagcgtgctgccgtccatgatcgcggcgtccatctcatgggtttcggcactggtataaaccgcgccgcgcccggcattgaacagcgggcagtcctcaagcatggacacggccagcgtcaccgcatcaagggcggaggctccggcggccagcgcgtcccgccctttctccagaatggactgaagggcgccgcggtattcgcgctccgcctcagcggaaagggcttcccggttgattgtgcccgcgccgccgtgaatagccaaaacaggaacctgtaccatgaacgtttcctccaaaaaaacggaaaggaatctccccgaaatatggcgcattcctaccgcgccttcatctttttgtatagcccgctttgacgggataaccgaggaagggaattagtaccggcgcgctttgaaacggtgtggggctattgaggaagaggaacttttccaaagagaaattcccccttccccaaacgtatcggcgcggagcctctcattcaacctctcaagaggcttcgttttgaatccctgttgcgccttccaacgcgggttgtccttggaagaaggccttttcagaatgaacctccccgcgcacgagcctcctcagacgcaggacgccttgagcgccttgtaatcggtctttccggttccaagaaccgggatagacgccagtttttgcacacgggcgacggcggacagcccggaaaggcgcgcggcccgcaaggctgcattggcctcttcccgggtaatgtcgagcgtagtgaacaggacaatggctccgtcctctccgctttcgaccgcaagcgcggggccctgttcgccggattcttcggaacgtccctcgccgaaaaccgccgcaagcacgctctcgatctgcgggagtgaaatcatctcaccgccaaccttgacgaaacgcttcaggcgtccacggaaggtcaggcacccgtcggcagcctcgctcaccagatccccggtgcggtaccattccataccctcaaaagccacaaagggttgcttgtccgcatccacgcccagatacccgccgaagacgttggggccggacaccaacagcatacctgtttcgccgggagccacgcggcgcggttccccttccgcagacacgacggcaaccctcacggacggcagcggctggccgatggtgccgggaaggacgcttccgggacggttcacactgatgaccggggaacattccgtcaccccgtagccttcgcacaggacgccgccgggagctgcttcggcaaaggccgcatacacgctgtcggggcacttctccgctcccacgaacccgaggcgcagggaagcgagatccccagggcgggccttccgcaacatgccgtcaaggaatgtggggggagccacggtgatcgtgggcttccagcgccgggtcagggccgcaagccgtgctccttcggtggggttcgcgtagtagacggcgggcaggccgaaagccagcggcaaggcgatgttcccggtcagcccgagggaatggaacggcggaagcatggacaacatactgtcgtgcgacgtgatcttgagcacggcggcgatgtcccggcagtttgcaaggatgttcatatgggtgagcggtacggccttcggcagagcctcggaacccgaggtgaacaggatcgccgccgtttccggcacgcggcgcgggatgacggcctctccgaggcagggaatacccagcaggcgggacttgaggaacgcgccgagcttcgccgggagcgaaaggcgcttcgcgtcttcaagcgccacccagacatcggcatgttcgccgacggggaacccttgcccggaaagcctgtccagcaggcgggacgaagtgaagacgcggcgcacgcctgccgcttcaaggccgtgggaaaagttggccgccccactcgtccaattgcacatcacgggcgtctttccagccatgagcgccccgagccacacgagtacggcggcagccgaagcgggcagcatgatgccgacgcgctccccgttccccgcttttgccttgatgaaggacgccagcacaaaagcccgcatgatcatatcccgcgccgagagtgcggcagctccgtcggcaagcatgagccgcgagggagagcgcatggcctgccgaaatgccgtctccaccagattccgtccgtccgggaccgaaagggtgcgcgcctctcccgtggggaaccacgcggcgggcggttcggcggcttcacctgccgcgccgagcagtcctgccgccgcgaggatacaatcaccaaccgtgcgcagcgcttcaagctgctcgatgggctggccggaaatctcctcaagccgtacgctgacattgatgagcgacaagctgtcgatccccagatccgtggcgagcgtcgccgtatcttcgataacctccaccccgctctcttcccgcaggatgaccaataccctttccctgatggcctttggtacgtccgccaaggcagccccgtccggggtttgccttgcgggcgcgggcagttccttcggcgtggaaccgagcaggaaatggtatggtacagcgagcgcgggcgtcatgtccgcattgtagaaggtttccagcgcttcgttgagcgtgcgcagcccatcggcctgtccgggcaattccggttccgataccgatatccgcacccgtcggcgcggcataaagaatatgccgttgagcagcagttcgaacacgccccgggccaatcccttgaggatatccggagccgtaccccgcgcccagctgaacgagcttccccagaggcccgtcgtcctgacgagtaccagccgtacatccggaaccagcccgcgcaaactgtataccccccgattgccgccgagccgttcccggcccgtacgggtaagccccccggcgggatagagaaggacattcccgcccgagcgcaggactccggccacgcgttccaacgcctcacgcaccccgctctccgccgtgcgtccctcccggcgcagatccggtatggaaatggttccgatcaatcgggtcagcgtgcggatcaccggctgttcgacttggcgttcatccccgagcggcctcggcgcaaagcccgcaaggctcgtgtagacaagcgctgggtcgataagtgccggatggttgggcaggaacagaatcggacgcccatcgtcgcgggcgcgcacggcttcaagcccttccacctctatcgtatagcgcagccgcaacagcccgcggacaaacgccagcagcgcccgaaaaccgggaccatgcgcaaccgggggcaagggcgaagccgccgggaccggctccgaaaacggttcttcagggttttgatgccgcccgaaaccacgcatcacggccagaaacacacaggcaacgcccaagctgagaatgccgaggaccacatgcccgtgcgagggccgcaacaatgacaggggcagatacagttggcccgcaagcaggatgccggtgaaagaaaggcagttgtcgagcccgaggatgcgccccttgtccgtggcggcgggacggacttggataaagctggtgatcgggatgaggtagagcccgccgcacgtcccggcaagcgcgtacagcccgaacagcaatggaagccggagcgcgggatcggcagcggcgacgaacggcacaaggcacagcaagacgccgatgcccatgatcgccgggaccagcagcatgcgccagctttcgggcgtgcctctggcggcgagcagcgagcccgcgcagatgccgaccatcagggctacgggcaggaaactggtcgccgtataggacaggccgagttccgcgcccccaaggttattgatctcgagcaacagcagggtcgagaggaaatagaagaacgcttccgcccagatgacaaggtgcagcgggccatccttgcggagagtgcgcagaaagcggaaggaatcgatgaccgccgaccatgggaaagggttacggcttccggctcccgggtacgcgggaatgaaggccgtactcacaagccccccggccgcgacggtcacggccaatatcgccaccagccagcggccgaaggggtaagccgtttcgatccatgcctgatccagcgcgatcccggcgaggaataccccgaacaggatggacgccgtggttccgagcttgaacaaggcgttgatgcgggggacttggccgacgggaaacagttcggggatggagccgttgagcgccgggctgaacagcgtggagctcaggcccatgcaaaaggtcatggcgagcatccagttccagtcgagcgtcaccatgccccaggctcccgccagcatagccgcgagttccagtgtcttcgcgcagatgacgaggcttttcttggcgaaacggtcggcaagccagccgctccatgctgagaagagcacgaacggcagcgcgaataggaacgtcacctgcgattggaacaccgcgttgcccgtggtcacggcaagaagcaggccggcctgcttgaagaagttgtcgttgaaggtcccaagggcatagctggtcccgagggcaagcgcctgatatttccgattcccgctgtcggtactcatggaacgactccaaaaaggtgtgtcattgcgccgcttcggtcgcggcaagcagttcgtcggcgtacgtcttgacctgtccaagcgcatggacggcgcaggcaaggttgagcgtgtacgaaagagctctcccgtgcttgtgtgggatcaacaatcccgcctgctccaagactttaaggtggtgcaccaccgccgaacggctcagcggcaagatgtccacgaaggttttcagctcgatggattcccccggctcaaagagcagcaggatcgtttgccgtgtcccatcccccagtgctgaaaaaacttcagcgatggcggtccattcctgaggcagtccgttgaggtagtgtgtattcatgactaaataactagttttttagttataataagtcaagcattttcttcctcacgcgcgtttttctcacatatacgcttgaatgattgtatttttctctttttattatacactattaggtgttttctgttcc

SEQ ID NO: 7191 - DNA, 4756 bp, Unknown
  gut microbiota DNA sequence
gggaggagaacctttctgaagaaaggttctcctccccctccccaaactcatatccctactcgcccacacgcaactcgtcaccgtgcctgccgtaccagcagacgtcacgccagacgcggggcgaggtgtcgccttcggtgctgatgagcatgacgcgggaatcggggccgagcccgagggattcacggagcggcgcgagggcgggattgcgcatgatgtgatcgagcgcgccgagaggtgccgcgccggattcgccggagacgatgggggcgtcgccgccgcgcgctgcggcaaaaaggcgcatcccgttggccgccacgtagtcggggcaggaaacataggccgaggcgtaatcgcgcaggatgggccaccccacggtgcagggctcgccgcaggccagccccgccatcagcgtggaaagatcgcccgtgacattatgcggctgaccatccccgacaagggcggaacggtaaatgcagtcggcggcgtgcggctccacaatgatcgtcttggggagcgcatcgccaagttccgacgccatgtagccgagcacgccggacgcgaaggagccgactcccgcctgaaggaaaagatgcgtcggaggctcaagctcttcggcgcgccactgggccagcgcctccacggcaagcgcggcatagccttggatgatccatgtggggatgtcctcatagccgtcccacgccgtgtcctgcaccatgatccagccgttttcgcaagccatcttccacgcgaggcgcaccgcgtcgtcgtaattgagatccgtgatgctggcttccgcgccgtggctgcggatattctccagccgcgccgggtcggaccccttgggcatgtagatgacggccttcttgccgagctgctgcgccgtccacgctaccgccctgccgtggttgccgtctgtggcggatacgaaagtaatgggcccgagccgctcgctcacggcgggggaacagagatcggcgggcgtcagatcgtcaatggattttccgagccgttccgcaaggtaacggcccatcgcataggaagcgccaagcactttgaaggcattgagcccgaaacgtttcgactcgtccttggcccggatgttcccgaggccgagcgtggaggccagatacggcagggggacgagaggcgtgggcgcgtactgcgcgaaaccggcatggaaacgccgggcgcgccgggcctcggcggcattcagtatatccagggaagcgcctgagccggggcgcagacgctgtgcattgatgtgataaagcatgttgtccattgcgaacctcctgatgcggcggcagagtgagcgggaaaaatccgggcacatcccgggatgctccttacccaaagcaaggatggggccaacttggccttttgctatcacacccattttcaagcggatctttcagcattttcaggcagcgccattcccgaaatgagaattctcccggattgcgaacgcttttttctcattacgagaacaatatgccctgccgttccgcatggacgcaaaaaaaacgcaggctccgcgaacgaagcctgcgccatatgaagccttttcaggctaccgggccttctgagggagggaaacgtcccccctatccgccgctagtcgagcgccggggccgtcttcgggtccatcatgctgagatccagcgggtagaagaccaccaccgtcttgcggttctggaggccgagcgcgccggggtgcgtgttcaggcagaccacgaggtccttggtgccgtcgttgttcgggtcagccagcgcgaagtccacaacagagcccttgatgcggcgggtcttccactggaggccgaggcccacgccgtcccagtacagggattcgatttcaccctcggggaagaagcggtagttctcgaagaactgcgcggacaccgaaatgggcttgttgaccagcagctcccaagagccgtcctgctccagatccgaagggatcatgcgcaacggcacgaaatacttggacgggatcaggatgttgtctttgcccatgccgggcatctgcgtctgttcggcgatgccgatggccgatccggagaacttctcgtccgtctggttcagctgcgaacctttgtccgagaacacgcggaggcgttcttcatcggtcagcaccacaagcttttcggtttccttgccaggcgttccgggcagccacgcgaagttcagggcgttcacgccgctcggcagatccagcttcttgctctgcacgaggctgttgccctgcttcatcatctcatacacgccgccacgcgagaaaatacgggacgggtcgcccttctggccgatcagcgtgggcatgtagtccggaggaatgcgaaccacgttcagatagtaggggaggcgttccgccacttcggtgaaggtattccccttgaagctcaggaccatggaatacggctgcgtgtagtcttcttcgtaggccgtcaggatgatctcctcagccctgtcgcggttcaaatcgatgctgcggagcgcaagcggcatcatgcgggtgggaatcttgtattccccaagctgcacgaggcgctcgttctgccactgatacacgtaaaggcgcttttcgccgagcacgaccacttcgttcttgccgtcgccgttcacgtcggcaacgatcatgcccacggacgcataaggaagcgtctggctgcggtaacgcgtgccgtcgctgccctgatagcggaactgcgggttcaggtagacctggctctgcgtggcgtccttctggacaaagttggggttcgcctgcccggcgcttgcagccggagccgccgcaacgacgccggaaccgccgcgcccgaagacttcggcgttgatgctgtcggaaacgccctgaaggctggcgatgaggtcattgacgcgggttttcgcgcccttgcgccattccttgcccgccttgtcacggacgcgcacgtcaaggctggcgttgtcgcccatgaccgtcacgtcgccccagatgacatagtcggcaccggtggcggaaagggccttggcggcgcttcccgcgtcgctcacggccccggccttggcgagcgcggcgtcggcaacgggctggaagtgcccctgccagtagaggcgggagttcagcatggacgggatggccttttccagataggtgaacccgctggaaccgttcactttaaaaggcagcaccgcgtagctgcgcacatcggcggcaagggcttgcgccacaaaaaccagcattgtacacagcatcagagccgtacggaatatcagatgcattcgtaaactccttggaaggattcgccggttcagcccggtcgactttttttaccatactatagacttccccgtctccgcaagcgcaacgccggaaacggaaagcgccagaaactctttatcgcgttttttctaaataggatagtatgaccgacacccccgccctccgccgttcttttcgcctcgtctgcaacccgggacagatcccgtccgtcgaggcgctgcttagcgcacaaggcttcgttttcgagccggaaccgttttctccgctggcaaggcggctgctccaggagccgttcccgctcggccggagcctcgccgccttctgggggtacgtctacattcaggaccgttcatccatgctgcccccgctggccctcgcgcccggcgaaggggcccgcgtgctcgatatgtgcgccagccccggcagcaagacgggcctgctcgcgcagcttgtgggccgcgaggggctggtgctcggcaacgaaccggcccgcccgcgcctcgcgaacctgcgccgcaacctcgccgcgctcaacctcctccaagccgtgacctgctcatggcccggcgaatccctgcccctgcccgacgcctcgtgggacgccgtcctcctcgatccgccctgctccggatgggggaccacggacaagaacccgcaggcgatcaagcgctggcagggcgatcgcctcaaacccatgctggatctgcagcgcaagctcctgacggaagcgagccgcctgctgcgccccggcggaaagctcgtctattcaacctgcacaaccaatgtggacgagaacgagggccaagtccgttttgccgttgaagggctcggccttgagccgatcccgctggagccgttccccggcttcgttttcgccgcgccggagctccccggctgcgaaggcacgctccgggtggacgagggcgcctccaacgcgcagggcttttatatcgccctgctgcgcaaacccggcgattccgccgccgtgcccggcctcgcccggggaacggcggccacggcggcctaccgcgcgatccccccggccttccttgcggagttcgggctgtcgcccgccctgctccctcccggcgatctggcggtgttcgaggattccctccacttcctgcccgccccggcgctggcgcatctgcccgccgccgtgcgctggcagggcatggctctcggcaaggcgtcggcacagggcctcatcccctcggcgcggctccgggctttgcttgatcccgaacctcagcgcattccccgcctcgacgtcgacgacgtgcccgtcctcgaacgcctgctgcaaggcggaagccttgatacggggttgcccggcaaagaggcgtccctgttctggcgcgggcttcccctcgggcgtctccgactcaaggccgggcgcgccgtgtggagcgatcggtaaaagcatatttcaggaatagtaggggattggggagggggaggagaaactttcttgagaaagtttctcct

SEQ ID NO: 7192 - DNA, 20381 bp, Unknown
  gut microbiota DNA sequence
tcgccgcatagctgccgcgtgattcctcaaagggaacatatttacgggatggtttcaagtagaactacagccttctaatgctgtcagcggaacaaggaaagaggcgggcatcaacgcccggaaaggcggacaagccgctcgaaacggcggtgggtcaaatggcaaatcgctgcggccagcgcgtcgcccgtgtccacggcccaatcgggcttcacgccgagcacccgcccgaccatgaaactgacctgctccttgtcggccctgccgacgcccaccagcgattttttgatcaccgtgggttcgtagtcccgcacaggcaaatcataggccgcacaggccgcaatggccgcaccgcgagcctgaccgagcttgagcgcggtcgccgcgttcttggcggtaaaaacctgttccacggacgcttcgtccggtttcagacgaccgagcacccgatgcatttccttaaagatgaccccgagccgggaagcgaactctccgtcaagcggagggcggatgaccccgcaatccacaagctggagcacgccggacacttcgcgcaccactccccaccccgtattccgggaaccgggatcgatgccgatgatggtgatggactgcgacatgagaaaaaggagggaagagatttccgtgctccgaatggaagcacggctcggaggcgggggccccatacgctccccgggaaagactccaggagcattccaccttggagagagcagagggacgctggtaaacgccagcggttgcagatttcgggaagggagggaaaacgtttctaaagaaaagcgctttccctcccttcccctatatcttcaaaacagttcagccaaatcagtcttccagctgagccatgatttcgtcggagatgtccgcgtcggagtagacgttctggacatcgtcgttgtcttcaagcagctcgatgaagcgcaaaagcttgcgggcggtttcgagatcgacttccatcgtggtctggggaacctgattgagctcggcggaaatcatttccagcccggcggcttcgaaggcttcgcggacggcgttgaagtcggccatggcggtctggatttcccacacgtcgccttcgtcgcgcagatcatcggcaccggcttcgagcgcggcttccatcaactggtcttcggtgtacttttccttcgagaactggatgacgcccttgcgttcgaacttccagctcacacagccgttttcgcccatggacccgccgcccttgctcatcagatggcggatttcggccacggtacggttacggttgtcggtcgcggtttccacgatgacggcgacgccgcccggaccgtaaccttcgtagttgatttctatgatgtcgccgccggcatcctgcccggtacccttgcggatggcggcttcgattttatccttggggaggttgatcgacttggcagcagcaatggccgcacgcagacgggaattactggcaggatcgccgccgttcttggctgcgatgatgatttccttggctgccttggtaaattccttacctcgcttggcatcctggcgacctttacggtgctggatgttggcccatttgctgtgtccagacattgaatcctcctgaatgtttcaaaacaaggccggggcaatgttttccggctgatgcatctcaatcggggtccggcctccctcataccttcaaacaaggaagagggtcatagccgggaccgcgtgaacagtcaatcccgggcgccgtccgcctctttccccttgaagcccagcccgacgaaaaacgtttctttgctttccacgcgggaactctgaggtttgaacgaggtcacgcgggcgaaccgggggcgcatacctttgagcagctccccgacgtccggccccatgaaaatcttgaccacaaaactgccgcccttcaccagatacttttcggcgacggcaagcgcttccagacagagctcaagggagcgggcctgatccgtaaatttcgtcccggtcgtctgcggggccatgtcgctcatgacgacatggaagggccccgtttcggcgagctgccgctcaaaagcctcggagcgccggaacacgtcttcctgatggaattccacattaggaggaaaaacggtgaccgtgctctggatatcgcaggccaacaccttgccctgagcgcccacgcgttccgccgcgccaagcgaccacgagccgggagccgctcccagatccagcactttcatgccctttctgaaaatcttgaaacgcccgtctatttccttgagcttgtagacggagcgggcaggatagttttcctgtttggccttgaggaagtagtgatcacgatattctttcatagtatctccaccttgtaacccaaaaacctccaaatcaccagaggtatggagcggagggaaccatgttttttcggctctgcgcgaaggccgtgcgggcttacatcctgtcgcaatagacggaactgaggaattcttccatcgcctcgtcggcaagggcgatatactcggaaagcggaaacgccttcccacacttgggacaaaacatgtgcacctcatggcaagaccgctcaatgaacagcggcatcccgcaatgcttgcagcacaccgtcgtctggaccttacgggcacgggaaaacgaaccccacatagcatacctccaaaatcgctttggcctatacgacacggcccgattcgtcaagcggcatggcgcaccccttgcccttattgaagaatgcctgcactctctccttgaaaagagagcacagggagcggaaacgcatggaaatcaggaaacccggcgcggcggaactcaagcccgccttggctctggcatgggacgtcttcctcaaggacgcggcatccggcttttcggacgagggcatcagaacattcaaacgcttcatcgaatacgacagcatggcggcaacgctggccaacgggacaacgacgatgtgggccgcgttttccggccttgagcctatcggcgtcatcgccgcaagggaaagccatatctgcctgttcttcgtcgccggccctcatcaaaggcatggaataggccgccgactttttgagacgttccgcagccggcgccccaacctcgcgccccagacgccgctcacggtcaacgccgccccttcagcggtcagggcgtaccagcggctcggcttcgtccgcacgggcggagagcaggttgccggcggcatccggttcgtaccgatgaagcatacattgtgaggatctgacaaaaagcggcgccacaggccgccgccacgcttgcaacggacgcaatcgcacgatcggcgtccgcctttgcagggctgaacccaagaggcaggatgagccgccgagagccccttggcatccgttgttccgctggcggctttccttttcagaaaaaacgttttccgggctacagcatgttcacggggtcgatatccagtgaaatacgcaggttcgggggcgaggcgagaggcagaagcacggcataaagggcacggatggattgccagtctccagccttgaggaggcattgaaaccgcctgcgtccccgcaggagcggcagcggcgcgggcgcggggccaagaacggtcacgcctttgctctccgaacgcagcagagccgtaatccgcgcgagctgtgtcggcccgtccgcccagtccatagggtaggaaatccgcaacagagccagattgatgaaggggggatagcgccgccgcttgcgcagagcgatttcgtagtcgtaaaacccttcgtagtccccgttcttcacatactgccagcagtaatggttcacgtcgcgggtttggataatgacctgccccggcttctcgccgcgcccggcccggcccgatgactgcaccaaaagctgaaaggtccgctccgccgcccggtagtcaggcaaattgaggccaatgtccccgtcagccaccacagccagcgtcacatgcgggaaatggtgccctttcgaaagcatctgcgtgccgacaaggacctgcgcctcctgccgggcaaaagactcaaggatctcctccatgcgccccgggcggcgggtgctgtcccgatccaagcgcagaacccggcctcccggaggcagaagcgtcccgatatactcttcgacacgctcggttccctgccccatgggatggaaatgcagccctttgcagctcgggcaaggcgaagggaacggaaccgaatacccgcaatagtggcagaccagccgctctcgccccttgtggtaggtcaaaccgatatcacaatgcgggcatcgggccaccttcccacagtcgatgcagtacatcagcggagcataaccgcgccgattcaggagaatcaccgcctgatccccctgctccaccgtctgcttgagtgcggagagcgtctccggagccagaatggactcgacgcagttcatggaccggatatccaccagcctgatcgaaggcagcgtaccgccacccacgcgcgccggaagcgtggacaccgggattttcgcctcgcggaccgcgtaaaacgtcttcagatccggggtcgcggatccgagcaccaataaccctttagcctgcgcgatgcgaaaccacgccacttctttggcctgataggtaagcccttcatcctgcttgaaggaagagtcatgctcctcgtccagcactacggccccaagggacggcaaaggcagaaacagggcggaacgcgtcccgacgacaaggcacggttcgcggcgtttcgccaactcgcggaacgttttttcgcgcagggcggccgactggtatccatgaaaaaaatagagcggcacatccggcagcgcgagagaggcatcccggcgcagcttcaaagcgagcgccacttccggggccagcaacagcatggagcggccacggcgcaggcattctttggccaattccatatatacggctgtcttgccgcttccggtcacgccgaacagcaggtgcgacgcgggattcccggcatcaagatccgcacggaacgaagccagcgccgcctcctgcgcttcggaaagcgcgaaaagggcttccgatgcgggaggcaacaggttgcagccggtttcctcttccgcacaaccggcttcgaggcattgcaggccaatcaaaccgttcttgagcaaagactcgagcgccggggcgactccctgccccatttgccgcaatacttcccgccgggaaacggcgccatgttccaacaggaactccagaagctcgatctggcgcgtcgcggtcggcctcacagcccacggcggatcgcaacgcagtacacacagctcgctggcggcggcgtcttcccgtggcccgagcaactccgcccctccccgcatccatgcttcaccaagcgcagccaaaacctctactggcagcttgggcaaatccttcagcagccgtatctgcgccttgccttgcgcttccatcgtacggagacgcatctgcgtcacccgaagccccgcggggagcaccatcgcgaggatctgccccggcgtcacggcctggcgcaaagcaagctggcgcaccatttccatgtgcccggacggcagcaaaggttccttttccagaggccaaagcatgggccgagccgttaccccctccggcagaggggaaccatcgccgaggacgaccccaatacgcaacatcccccttcccagcggcacggcgaccctcaagccggggcaccacgcaaacccggcaagccactcgggaacggcataggtcaaggaagcgaatgggggcgtcagcaaagcaacggttcgaagcaaggggatatcctgaggtgttagggagtggacagcagcctatccaggaatcgctgcttgttccctctatcggttcaattcaaaaagaaacgaaaacaatacatttcaatacaataaaagaacaggaaaaaaccaccttatccggcagcacctcctgccggaggatgtgccggaaaggcggtttcccctgtttatcaaacgtcatccacaatgcctagtcgagcaattcgcgcaacctggccttcaggccgtcgcgcagtttttcatcgcgcagtccgaagtagatgttggccgtcaaataatccacccagtccccggcgtcaaaacggatgccgcccatcttcacagccaacataccgcgttcccgggccagagaagccagcgcgtcggtaagctgaatctcgccgccgtgtccgggcttcacccgtgcgagatgttcaaaaatatccggagtcagcacatagcgtcccacaatggcgaggcgggaatccaccgtgcctatggctggtttctccaccatatccgtaatgttatagacgccgggagtgatttcttcacccattacgataccataacggtttaccttgtctgcgggtacttccatgactccgataaccggcatgtcgtgttcggacgccacttggacaagctgcgtcaatcccgcgtcatcgccgatcataaagtcgtcgccgaccatgaccgcaaagggttcgtcacgtaccatctccttggcgcacagcaccgcatggccgagaccgagctgtttcttctgacgaacggacatgatgttgaccatctcggccacatcgcggacttccttgagcatcttcagctttccggcgcgttccagaacgccctcaagttgaaggttatagtcgaagtgatcttcaataacgctcttgtcacggttggtcacaaaaataacgtcttccacaccagcacggatagcttcttccacaacgtactgcacaacgggcttgttgtagactggcagcatttccttaggaatattcttgctggcaggcaaagaacgcgtcccccaaccggcgaccggaatgacaaccttacgaatattcatgtgacttcgtttcccccgcaaaaagattttgggccggtttcccccgtatccctttctttactctctcactccttccactggaaaggcgaacctcattgcaacaatatactgatatgcgcgatcaaatacttgttcgatctatacttttatcaaacaatcttgctaagtcctattccttcttgaagggcaatagaaatatatcaccctccccatcagaaaaagccgagccatgcacccggacagttctcaaaccccgtctatccgagcgctttttccacgattccggcaagctcgttggcatacacgcgtaccttgtccgcatcctgcccttcaaccataacccggcacaaaggttccgtgcccgaataacgcagcaacacacgcccacggccttcaaggccttcttcgatacgggcgacggcatcggcgatttccgcgttttcctcaaacggtatcttgtgttcgacgtgcacgttccggagttcctgcggataggggacgagcaggccggcgagttccgacagaggccgcccccgctggcgcatgatccgcaggatctgaagagcggcaaggagaccgtcgccggttgtgctgtattcacggaaaataagatggccggattgctccccgccaaggagagccccttgctggcgcatggccgccacgacatggcgatcgcctacgttggtacggataagcgtaccgccccgctccttcatgaacacttcaagcgccatgttgctcatgaccgtggccacaaggatgttgcccggaagcttgccttgctgcatgagatcctgcgcgcacagggccatgatctggtcgccatccagaacggtgcctttttcgtccacgacgatgaggcgatcggcatcgccgtccagagcaagcccaatatcggcccgcgtctcgcggaccttcgcggccacagcctcggggtacagggaaccgcagcggtaattgatattcaacccgttgggctccgtaccgattttaacgacttcggcgcccaactcctcaagggccagcggcgcgaccctatagttggcgccattggcgcagtcaatgaccacccgcagcccttcaagggacaagtgcgcggggaaactgtttttgagatacacgatgtaacggcccggagcgtccttgattttgtaggcacggccggtgttcgcgggttcgggataattccagtcaaaattcgggtccagcaccatttccgtcatgcgatcttcatcggcatccgggattttgaacccttcggcgtcgaaaaacttgatcccgttgtcgctgaatggattatgcgacgcggagatgaccacccccacatccgcccgcatgttggtcgtgagaaaggaaatcgcaggagtgggcagggggccgacaagaaagacatccatccccgccgccagcaagcccgccgccagcgcgttctcgaacacatatcccgaaaggcgggtatccttaccgatgactacgcggctgcgtcggttcttgtcccgatagaacgtgccagcggcaagccccaggcgcaaagccacttccggcgtcataggatacttgttgacccggcccctcatcccgtcagtcccaaaaagacgaacgctcatcaactactccaagatctcttttgttatagaacagcggaacagaccgcttattcactcggatgccgggaaatcgacacggtttccgggctgattttcaggacgcgcccgccttggggcacggcaacctgaagaggcgcgttcacggccccgtcttccgcaggcatcgccgtatcggacgggacggaaacctgaaattgcgcgaggtacccggcatctttgaccatcgcctgagggacggaaaccatgaggttggcccgtgaaggctgagcgcttacattgggattctcaccctcaaaaatgatatcgcgctgcaaactcagggtacgcctcttcacatcgattttccatgtcaccttaacgacctgcggattgagctccacagcgggcggggcaagcaacggaacctcttccgagacggccttcccttccgccccgagatccaccgggatctccgcctgtatctccttcatggacgcgatcacgcttgccggaccgcgcacggtcacttgcggcgggtcgaccaccagatctttcagccttaccgacgaggcagcgggcgaagctctcagcgccacttttacaggcaggttcgtttccatgatcttgtccacttcaagaatcatccgggatggcgtgacttcaagcacctcataggcccgcagttccggcggcttgttttcccccgtcgtcagcgggatcacgttcttgcccggcgtcacgccggacagatccatcgtataggaaatttcccggttggtcatggaccgcagcaattcctgtggaccgcggaggcgcacgctgactttattgagctggcctcccgtcacgatcaatccggtcggcaaccccttataatcaaggcgcacctcaaccacgcgctcgatttgctcacgcgcgttgagcgtataccacaacccgagggcaagaagaaaggctaccaagagatagcgccagttgcctttctgggggtctttagtgttcgataacattgttcagcgtctctttcagttgttcggcatcgggcataaccgccaaatggcccttagaggccacgctcacttcgccgcgttcctctgaaacgacaatgaccgtcgcatcgctgacttccgtagcgccaagcgcggcgcggtgccgcgtaccgaaattctggcggtccatctgcgccagcggcaggatacaccccgccgcggcaatgcgccctttgcggatgatcaccgccccatcgtgcagcgcggtattgggaaagaagatggtcagcaggagctcccgggatatccgggcgtccagtactaccccgcccttcatcatgtcgccaagctgcaccttgccttccagaacgatgagagccccgatgcgccgcttggcgaagtattggcacacccagacgagatcgccgaccatatttgacggcgcggggcgtttcttccacgagaggtattgcgtccccatcgcggcaagagcctgccggatatcatcatgaaacaggatcacgatgacaaggaacagcgaaccgaacaggttctccagcagccatgacaaggaatagaggcctataaaatgcgagagggcgtacaccgccaccagaacgaccagaccgatgagcgccgaaaacgcgcgcgttccccggataagaagcaggatgcggtataaaagcagcgttacgagggcgatatccagcacgtcacgccaatagaaagacaggaaatccatgatccggctccaaaatgagctttacagggtacgccggaaggatcaggcgagaggcgtcatagcttcgacaagccgcagcgcttgcgcgcaaccggcaacgtcgtgaacgcgatggtaagggatgctccgtgcggccagcagcgcgacagccagacgggtggcttcggcccgttgttccagttcgaggccaaggatctcccggaacatggatttccgggaaagccccacatacaaggggcggcccagcgaagcaaaccgttccagccctttcaggatggccacggtgtgatccttattcttaccgaacccgatgccgggatcaagtactatccgatcctcgggcaaaccggccttgaccagccgtgccagatgttcctcaaaaaaggccagaatctcctccaccacgttcccgtagcgggggttcacctgcatttcgcgcgggctgccctgactgtgcatgagcacataccccggcttgtattcggcaagcacgtcgagcaacgccggatcggccacgcaggccgacacgtcgttgatgatgtccgcgccgccttccaatgccgcccgggccgtcccggccttcaacgtatccacggaaaggaccgcatcaggccgctgctcacgaaggcgcgccacaaccggcatgagccgggcgatttcctcaccttcgggcacgggttcggcaaaaggacgggtggattccgcccccagatcgagcatcccggccccttcgtccaacagacggaggccatgagccacggcgttacgcggatcgatatactttcccccgtcggaaaacgaatccggcgttacgttcacaatgcctatcagacaaaagggggcagggttcaacaccctcccccctcgaagaatccatttgcgttcgttgttcacgctgctgtcctaataaagctgaatgccccgacatccgcaggatgccggggcaagccgtttactgctgtttggtttcgtcctgcgttttctcgcccgtcccgccatcctgagacggttccgcttccagcttgaaggtttcaccccccgcgtcagcggaagcaggggcgggagccgcaggttcctgcttcgcggcactgccgtccgcatcaaacggcggcagcggttcgcccttgacgagcaaatcaatatcgtcgccggtgatggtttcgcggtcaagcaaggccttggcaagcgcatgcaggagattgatgttttcctgcaacagcttgtggcagttctcgcgcgcggtctccaccagcttcttgatctcggcgtccacgatgcgggcggtgtcttcgctgtagttgcgcgcatggccccaatcgcggccaataaagacttcctcgccctgctcgccgatggtcatggggccgacgacatcgctcatgccccattcgcaaaccatcttgcgggccatgcccgtagcgcgctcaatgtcgttgccggcaccggtggtaatcgtgtcgaagatgatttcttcggccacgcgcccggccagcagcaccatgaggttgttctggagaaacgccttggagtagccatgacgatcgccttccggcagctgcatggtcacgccgagcgcacgcccgcgcgggatgatcgtcaccttgtgcacggggtcggtcccgggcagcagcttggccaccagagcgtgaccgccttcgtggtacgcggtgatccgcttttcctcgtcggaaaggataaggctgcggcgttccttgcccatgagcaccttgtccttcgcatattcgaaatcgcgcatgaacacggtatcctggccaaggcgggcggcctggagggccgcttcgttgaccaggttctccagcgccgcgccggaaaagcccggcgtaccgcgggcgatgacttccagattgacgtgcttatccagcggcgtacggcgggtatgcacttcaagaatcttcaggcggcccttcacgtcgggcgtggggaccacaacctgacggtcaaaacggccggggcggagcaacgcggggtcaagcacgtcgggacggttggtcgccgcgatgaggatgacgccttcgttggactcaaaaccgtccatttccacaaggagctggttcagggtctgttcgcgttcgtcatgccccccgccgaggccagcgccacgctgacggcccacggcgtcgatttcgtcgataaagataaggcaaggagcgtttttcttgccctgcacaaacaggtcacggacacgcgaagcgcccacgcccacgaacatttccacaaagtcggaaccggaaatggagaagaagggcacgcccgcctcaccagccacggcgcgggccagcagggtcttaccggtaccgggagggccgacgagcaggacgcccttgggaatgcgcccgccaagacgggtgaacttgcgcggattggagaggaaatcgacgacttcggaaagttcttccttggcttcgtccacaccggccacgtcatcgaacgtgacctttccctgctcctgattgagcatacgggcccgggaacggccaaaggacatggcacggcccgctccgccctgcatctggcgcatgaagaaaatccacacgccgataagcagcagcatggggaaccacgacaccaacagggtcatgtaccacggggagtcctcgacaggctcggcccggacttcgaccttctcggcaatgagtttatccacaaggccgggatcgttggggacgtaaatctggaacgatttgccgtcggtcgttttcccggtaagggtattcccctgaataaccacctcggacacttcacccttggcggcctgacgcaggaattcactgtacgtcacgctcggctgggacgaatgctgaggctggctaaacaggttgaacacaatgaccatagccagggagatgaccccccagagcatgagattccgcgtaaactgattcaaaagttacctccgtatggcccggcagcgccaaaccccgccaagcctcgggcacagtgtaagttctctttgagcgtttgacaacggcagacgggttattcaggaaaaagctttccttatggggggtctccggcgtcaacaattccgtatcagaaaacactatggggcatcaagaaattatatcggctcaactgtatgggcatactttttaaaaatatgtatttcaaaagagttacgtatataaggcaccaaagcgggggacacggcggacatgaaaaaaagcgaaacagccccttttctcagccaatccccgcccccccggaggtccaaagccctccgggtgccccgccgttcccttaaaaatccctctccccattgattccaaacaaatcccggccctcgcctgagaaaccgggaaaattccatatggggaggccaagaccactccccttctcaaccgattgcattccgggaatgggaaaagaataggccagatacggaaagaaaaggcgcccgtttcaaaaacgggcgcccctcattgccggttcctaaaaaacgtctttgtatagctggctgatgatttccaggctcattgtacgtgggttcgtggcggcgcaggtgtccttctgggcatgtccgaccatcgcggggatgtcgcggggatcgatggccttcacgtaccgggcggcgagctcggtgatggtcgtggggatgcccacgtccttcgacagcgtcttgatggcggaaatcgccaattcagcggcggcgcgttcggacaggccgtcagtgcactcgcccatcatctgcgcgatgcgcacaaagcgatcgagacgggaaatcaggttgaaggactccacatgcggcagaaggatggcgttgcactcgccatggggcaggctgtagaagccgccaagctgatgcgccatcgcgtgcacgtaccccagaccggcgttgttgaaggccatcccggcaagatattgggcgtaggccatgccttcacgggcttccatgtccttgccgttggccacggccttgcgcaggtacttggcaaccaaacggatggactgttccgcgcaggcgtccgtcatcggcgtggtgttggtggaaacgtacgcttcgatggcgtgcgtcagggcgtccatacccgtggctgcggtcagggacggcggcataccgaccataaggacagggtcattgaccgcgacgttgggagtcaggaaccagtccacaatggacatcttcacatggcgttccttatcggtgatcacgcagaagcgcgtcagctccgaagcggtgcccgccgtcgtgttgatggcgatgtagtgcggcagcatgtggttgaccttatccacgccttcgtactgataaatcgcgccgccgttggaaagcaggatgcctatgcccttgcagcagtcgtgcgaggagccgccgccgatggaaatcaggccgtcgcagccgtcggccttatactgggcgacgccttcggtcacgttttcatcggtgggattcggcacggtcttgtcatagatgctgtacgggatgttgtcgccgtccagaatgtccgtaatgatcttgaggatccccgtgttcacgatgcccttgtcggtgacgatcaacggcttggtgatatggtaggtgtggacataatgagggataccgtggcacgcgcccacgccgatcagggaaatgcccggaacaaaaaaactgtgcatcttgccaggaacagacatgttcaatccttaccgtcaaaaagagatgtgaaaaagaagcctcgactggatgcgctcccacggggcggcgccgtttccggagccaccgccgcgatacggcgccatcaaggaactttgagtgcttaaccaaacacgactctcactacctcaaatgcccccggttggctaccccgaaaatgcacattttttcacgaaaagcggaaccatcacaacaaatcggaatagcgagagaaaaatcagcggaaccatcgtttggaaaggcacggtctcgcatggaagcgcttttccccgtaacgatcgctcacagtgaagcctagcccggccgttttacaccatcctcccaaacaccggcagcatcacaacgataacggctgctccaccgcgaggcaatcccaacgttccggagagtataccgattggtgtttcatgaagtaaccgcacgtccggcgaggcttacaccgcttccggtccattccctcgttcccaaaaggtgcgggccccccaaaaggccagtgcacgcatggaaaacctatccacaccaaaagaaaacccaaccccgcagcgcctgctctctccgaaataagctcggacagacacggaagacatgattttctcgcggccttcgctacgaagcgcattaccaaccgccctcggggttccacgcggctcttccggtcgatgcctcattcctctgggaaaagcggagttctggacttcatgccttccacagccatcagccttcaatgagcagacctacttccgcccctttcccatcaacaatagagagcctcacagcacgccgtcagccaaaaggataatatacaataaatatcttgaagccgtatagaatggcgcccccgccttccacaaaacgcacgtttccgcagcctggcccggctccctccggctcgccttcccgattgggccgggcataaaaaaagcgccccgatgcggacatcggggcgcagatgaatcaagccaaactagtagcgcggaggacgcggggcacggggcttggcttcgttgacgcgcagggtgcggccaccgaaattagcgttgtccaaagcttcaatagcagcagaagcaccgggttcttccatttccacaaaaccgaaaccacgagcgcggccggtttcgcgatcgctcacgagtttcacagaaacgaccgggccgtaatcggcgaaaaggctctgaacctgttcttcggtagcggaccaaggaaggttgccgacatagatagacttagccatgaaataaacctcatcaaaaaagacaccgtattcccgcgcttggccatctccaaaacaccttggaaatgacgcggttcctcatgggtgaaccatgcccgacacgacagtggaagtcaatgccctctcgaatttttatccttcttctcataaattttctgatcttctcttcagtcttcttctttgcaaaagaaaaccgataagcacttcatcagagattgttcttcccttttcacaagaaaagaggatttcaggcctatcttttgcataaaaccttttcaggaatctttcccgaagctctttcttatccttcgccgcatctaaaagataaggaaagattgcaaaaatgcacaatccttagattgaccattcaaccaatcttaatagagacttcacggccggacgggctccacgatcactcctttcctgctcacggagaccggacgtacggggatcagcgtgtgcccttccccccgcagcggtgtccgcagacggcagggcacatagcactcatccacgccgtgctggccggaggcggatccggcatcctcgttgcagtccagcgccacgagcagccgctcacatgtaagggtgtccttccagaaggcttcgcgcttggcctccaccaccgcgcgtacgcgggcggcacgctcctgccggacggccttcccgacctgatccggaagctccgccgccactgtccccggacgcgcggaatacgggaatacgtgcgcataggtcagcggcaggctccgcaccacttccagcgtctcaagcgcgtgcgcttccgtttctccggggaatcccatcaggatatccgccccaagcccgaaacggggccacagcttagctacgccctccacagccgaaagcagcgcctccggcgtataatgcccacggcgcatggccttcagcacgtccgcgctcccgctctggagcgacaggtgcaggtgcgggcagaccatgcgggtttcggcaagcgtggcgatgccccgttccgtaagctgcgcgggttccacggaactgatgcggaaacgcgccggatcgggccgggcgccgctcccccactccggagccagttctcggtccagataggacagcaaatcccaaaaatcccggcatccctcgtcacgcatggcgtactggcgcaggttgatgccggaaatcatgatctcgcggtagcccgcctcaagcaggcggcgcatttcggcaaggcaatccttcggagggcggctccgggccgggccgcgcgtcaaggggacaatgcaataggcgcacccgtgcgagcagccgtcctgcaccttgagtacgggacgggcccggcggaatccgtcgatatggaaggacgggaacgtacggtcgcgcgtggcggcgcgggcggcggcttcggcgggggaggaagggaacggcgttgcgcttcccgccgcctcctcggcgaagaggacgagcggcggcgcgtcgagcaggcgggatttatgatcctgctccacaacgcggagcacgccgggcagggcggcaagctgcttgcgggccacttcggcggcgcacccggcgataacgacgggcacgccgggcgcttcgcgctggaggcggcgtacggcctgccgtgcgtcggtcacggcattggcggtgacggcgcacgtattgagcagaatcacgtccgcctcggcgggcgcgtccgtctccgcaccgtccatgcgctgccatgcctcgcgcactgattgggattcgtactggttgaccttacagccgaaggtcaggatacagaaggtccaaggggcatagtgcatatgatgggtctcccccgcagcgcctgccggtttccggttcgcatgtacgaatcggggaacagcccaggccgtttcggccggagcggcaactcgcacgggggaaacaccagtcccctggcagggatagaaatcaggcggtctttttcttgaactggatgtcgatgatctcgtagttgatccggccacgcggggcgttgaccgtgatctcgtcgccgacttccttgccgagcagggccacgccgacgggagactgaatggaaatggtccccttggcatagtctgcctcgtccgggccgagcagcgtgaattcgcgttcctcgccggtatccgcatcctccacggtcacggtcgcgccgaagatggctttttcgctggaaagggtcgaaagatcaatcacattgaacagcgccatacgcgattcgatgtacttgatacgggcttcaagcatcccctggcgttcgcgggctgcgtcgtagccggcgttttctttcaaatcgccttcttcgcgggcttccttaatggcctggataacgtgaggacgctctttcttcagacggtccagctcctgttcaagggcctggaaaccttctttggaaatggggatactgctcatgttggaatctcctgaatattcttgcggaaaccgcccgatacaaaaaaaaacgccccccgtcgcctgcgcgacgggtggagcttcggtgcgattgccacactgctaaggtagtccatcccgacggataggtcaagcagccggaaaaacagcggcgagaaatcagcgttctttctgaacagccaccttgcgccaaggggaatgagcaggtatcaagaaggcgcggaatttattcttccgttccggagaccccccgtccccgttccgcaaaccgtctatgtcggagacatgatgctgaaacaacttctactcgctctgaaacgactgctgcgcgccttgggccccgtccttgtcggctgcatcttcttgggtgcggtctatcttctctatagggaaatcagcaaatacagcctcgcggatatccgcatgagcctggcccagatttccacgggaagcatcatcctgtccgtcctgctcgccattatcaactatatcatcctgatcggctatgactggctggcgctcaaaggcatccacaagacactccccgtctcccgcgtgtcgctcgtttccttcgtcgggcaggccgtaagctacaatttcggcgcgctgctcggcggcagtacggtgcgcttccgtttctattcaagctggggcttttccccgatggacatcgtccggctggtgctgatgctcgccatcaccttctgggtcggcgcgctcgggctcgtcggggcgattttcatgatcgcgcccccggagatcccgccggaactgggtatgcatatgccgctggatatccgccccctcggcgccatcctgttcctcatcgccatcagctatctgatcgtctgcaaattcatccataagccgatccacatcttcggcaaggaattcgcgttcccgcccttcaagatcgccgtcgctcaggctgtggtggccggggccgacctcgtcgcggcgggggcctgcctgtacgtcctgcttcccccggatgcgcacgtttccttcctccagttcctgcccacctacctgatggcgatggtagccgtggtgctgacccacgtccccggcggcgcgggcgtgctggaagtcgtgatcctgcacctgaccacggcctcgccgcaggccgttttcgcggccctcctctgtttccgcgtcatctactacctgctgccgctgctgctggccgcagtcatcttcgccatctacgaagtccgccagcaggccatacaggaatccggcgtgctgcacgacgccgggcgctggatgcgggccttcgcgcccacgatcatggcgagcgcggtgttcggcatcggagccatcctgtgcttctacgtcgtcctgcccgtcagccccgaacggctcacgcagatcagggaatggatccccctcggcatcgtcgagttcgccagcatggcgacaggcgtcgccggggtcatgctgctgttcctcacgcgcggcatacagcatcggcagcgcgccgccttccggctggccatcgccatgctgtgcatcgggattatcggccccctgctgcattccctgagctggttcgttgccctgatgtcgctcatcgtcctgctttcggtcctctccatacggaggaagtgctgccgcccgtcctccttgtggaaactgcacctcacccccagctggctgttcgccatcgtcagcgtgctggtctgttccgccgggctcggcctgctgatttaccacatggacccttccgatcccgtcctctggacctcctccgactacgccgccgacgccgcacgcctgttccgcacgttcgctgccgaagcgctccttctgatttgcatcgccgtcggctacatgcgcacggccccgatccgcaagcgctggaacgccgtccgccgttttgggagaaggaacaagcaatagattgaaccggggaggggagagggaacccttctggagaagggttcc

SEQ ID NO: 7193 - DNA, 33607 bp, Unknown
  gut microbiota DNA sequence
ccggcgcattgcgtcaccctgcgccgaacccgctgctcggttccctcccgtccaagctcggaaaaacttttatcaatataaaaccattaaccacaggagattgttatgaccatccctcagcttcatatgtatgatttgaagactggcgagtacactggcagccgtgatgccactcggcgtcccaatggcgagtatatgctggaggcgaccggtgcgacgcccgttgctttgcctgccgacattcctgcggggcacatcgcccgctggaccggggacgcgtgggaggcggtggaagaccatcgccagcatatggacgagcgcggccgcaaggaaggcgggacgccttactggcttcccggcgacacgtggcgttccgagccccggtatacggaggagcttggcccgctccctacggaggcgcttttggcgaagccggaaaagtcggccgaggagctggcgcaagaagcgcaggcgaagatcaaggggcggcttgcggcgcttgacgcaaagtacctgactccccgcacccttgcgggcctggccgtcggcgacgagtatgcccttgagcagtggcgggcgcatgaggccgaggccgaaccgttccggatccagctcgcggcgctgtagacctgccttcctcctgtactgtatgcattccgtaaacaatacaggaggatcgcaatgggtttgcgtttcgtggaatatcgccgtcggcaatgggttctcaggtaccgtgatccgtggagcggcaagcagcgcatcaagagcttttcgactgaaggcgaggcgcggcagttcgaagccgtacaggccgagatgcatatccgcgagcgggagctgatgcgccgggcgaagcggcgcatgtcctcggcatcggcgacaaaggccacggtcgcggagctccttgagcggtatgcggggacactggaaaaccccaccacaaggagcacgacgacgcagcatgccgaaccgctgacggctattttcggccaccgccgggcgcactgcgtcacttgcgacgatgtgctggcctggtgcgaagtgcagcgccagcgcggggtggggcagtccaccgtgcaccgccgcgtgagcatcctgcgggcggcgtacggctgggcggtacgggcgcgtctgctgctttccaacccgttggtatcgctgcgtatcgccaagcccaaagcccagcgtatcgcgccgccgtccgtcaaggaggcgcgcctgctgtacgacgcggcggccccgcatatccagcgggtcatcgtgctcggcatggcgaccggggcgcgcataggcccgagcgagcttttccggctccgctggtccgatgtggacgtcggaacgggcgtgatcaggatgccgaacgcgcacaagggggcgggggaggaatcccgcgacgtgccgatccgggacgacgtgcttggcctgctcaggcggtggcacgaggaggacaggcagaccgggtgcgcctatgtcattgcctataaagggcgccccgtccggagcatttccagcggctggcacaacgccctgcgccgggcgggcatcgcgcggcgcatcaggccgtatgacttgcggcacgccttcgcctcgctggcgcttgtgtacggggcggacatcaaatgtgtggcggagactatggggcacaagaacatcacgatgctcctgagcgtctatcagcatacccttttcgaacagcgcaggcgggccgtcaacgccgcgccggggctcttttcgggcacgggcgcgaaacggggcaagaaaaaacgcctcccgcccggcagggggaaggaggccagcgcgttcttcgaaccggccccggaacgccgggcggcgcctccgcacgacgcggcggcctcatggggcgttgccgcttgcgtttgcgctggaacccgcgcggcggacaggacggatgccgggattccggacgcacggcagccggacggaagcggggcgggatgagcggggattcccggcggggtggccgttttggcgcgttgccccgcttgcctgaaggtcctttgatgccggggaagcttgcggcggcaggggcggcttggggctgaacagccgcaagccacatcttggaagcacccggggcctcccgctcaggggccgcattcgcgggccgtatgccggaatccccacggcggcccgctccgccaatgcgttcatgcggtcttggttcggacagggcggggcgtcagcgccgggccgggggaggacaaaggagataggtagccgtccccatgcggggtcccctcatgccccggctggtttcgcttgatcccgcaaggaggcgatcagcacctgatacaggcattcggggtcgatcggtttggagatgtggctgttcatgcccgccgacaaggccgaaacaacatcttcatggaaggcgttggcggtcatggcgatgatggggatcgcctgcgattccggcgaatgggacgcgcggatggcggccgttgccgcgtagccgtccagcacaggcatctggatatccatgagtatggcgtcgaatgttccgggggcggacgccgtgaagatgtccaccgctatctgcccgttctcggcgcatgtgaaggacactcccttcattttgaggatttcctcagtgatttcgcggttcagatcgttgtcttccaccagcagcacgtgacggccgcgcaaactgggcgcttggccctccgtgcccggttccagttccgccgcggcggaggcgggtttcttttgcgatacggcggagagcgtatgatagagggccgaagagaagaggggcttggaaaggaacgcgtttgccccggcctcgcgcgcccgctgttcgatggacgtccagtcgtaggccgtaataatgatgatcagggtttccggcccaaccacttcgcggatgcggcgcgtggcctcgatgccgtccatctccggcattttccagtcgatgaggcagacgtcatagccgttgccccgttcgtgggcgtccacgacctgatcgagcgcctcccgcgccgtcaggacccacttggccgcaatgcccatccgccgcaggatgagggccgcatattcgcaggtgtcgaggtcgtcgtcgacgacgagcactttcatatcccgcgctatctgctcttttttctggatatggccgttgggggggagcgcaagcgggagctcgacggtgaagcacgagccttcgtgctccttgctccgtaccccgatggtgccgttcatgagcgtgacaaggttgtgcgtgatggcgagcccaagccccgtccccccgtacttttgtgaaatggaactgtccgcctgctcaaagggtttgaagagccgcttttggaaggcttcgctcaacccgatgccggtatcgcttacggtgaagcgcatcagcacgccgccgtttttgcgtttctggctgacctcaagcttgatggagccgccttcaggcgtgaatttcctggcgtttgagagcaggttcagcaggatctggttgatgcgcagggggtcccccaccagcctttcctcttcgatgccggacagcgccacgctgaagtgctgcccctgcgattccgtctggggatacatgatggagacgatggagtcgatcagattggggagatcgaactcctcgtggtggacggcgagtttcccgctttctatcttggacatgtccaaaacgtcgttgagcagcgacatgaggtgcttggaggaaaagctgatcttatggaggcagtcgactacccgcccgtggttctggatatgggcggcggcgatggtcgccatcccgatgatggcgttcatgggggtgcggatttcgtggctcatgcgggaaaggaagtcgcgcttggcggtgttggcctgctgcgcgctcgccagcgcgtccttgagcgtttgccgcgtcttcacctcgtgggtgcgatccgacagggacacgacgtaccggatggtgcccgcgttttcctttacggggtacaggtgaaggtgcatgaagcggtcttcgccggtcagggtatccttcatcgaaaagtcgcatcccttcggcgcgtcgaacggtgcctgtttggcgaagtcgtcaagcactttctgattcgctgccgaaagccgggaatgcagggtgctgatatcgttgtttccaaggccgagtatgcggtcggcgtttccgctgatatactctatgcgtttgtcccgcacatgataaatgacgaagacgtcatctatactgttgcacaggatatcgaacagcttttcccggtatgcgatggcctgtccggcctttttttgaagccggtagaaaaagaacgccacggtcaggacaacgaggatgaggaaaaaggaaccggccgtcgccatgttgacggtaagggaagactgccctacgaattcacgtatcttactgttggcaaaagagataaccgttttgagcgaatcctcaagctcgatataggcgggttccacattggcatcaatataggaaaggatctccgttttcgagtgtgaaggggaataggaaagcccttccagcaaggcattgtgaaaggcgtccgtggcattgaaaagcctttctatatctttttcaggccccagatacttttttttttattttatccctgtccatatttattttgaggaagcgctcatggacgataagggcaagttttttcttgtcgctcgtttcgctgctcagaagtttccgataaaagaacttcgtatcaagggctcgtgaatgtatttcgcgggcggtattggatacggtataaggatgtctgtatgcggtagcaactttttcttttgtctcatagagcaggaatgtactcactaaacaaaaaatgatagatactgcacatattatcactattcccaggaatgaatgacgcatattttgcatggagtccccttgcccttctccttgtcttgtgcccaatcatcaaaagtatcatggcgttatctttttaatatacaccgtagccatgatttgtgcaactcgtgaaataataaatgtatgaaacattcctgaaaagaataaaatagttttaataatagtgaattgttatccttttggggaaagaggctgtttgccgcaccaaaagatgctatgaaatgaaaaacatactatcctgataatgtgatatttactgtttttggatagtggatatgaaatggcgggtcatattctgtcagcgtgtcttatttccgatatccggcaggagatgattgggtagagggcaagttgccgggtgcgcgggggccgggataggccggagagggggcctcccttcaggccgtggggagtaggcatgggattgcaaagcgcttgaatggggccgcccccggcgggggacggatgcgggccgtgcccctgttccggcttcttgaggctaccccggcccgtggggactgatggccggcgcgtgtacgtcatgccgccgttcctgaggggcactcccgccgtgggtccggacgggcggagtttgcccgctgtccggggagggcagagaggggctggctgcgatcgccgaagtgcatcatgccgcgcacgtcagccgtcggcgtccactcttcccagacgcgctcgatggcgtcttgcagctccaagaaaaaggaagcgcccgcaagttccctaggccgtggggtgcggaggctgcatgagcctcgccctgagcaagggaacgtgcgggcgcacattcgggatggcaaaccagagtggcggcagggccattctgtgccgaaaaagggcctcgggacgccatcatatggataagactggccgcaaaacgggtaaccagtggttgaccaaggccggaaacgacaaagaggatacatacactctggtatgtatcctcttgaaatctattggtgcgccagggaggaatcgaacccacggcccgcagcttagaaggctgctgctctatccaactgagctactggcgcaaatatggcagcgacaatctataaagcaaggcttccccgaggtcaagcctgatctggcgcgttttgcaaggcttgggaagggcgggcggcatggcccggagcgggcggggcatcccggcgaagaattcacgggcggaaaggggcgtccgccattgctttcaggttgactgtgggctatcccctctgtacgcttcggcgcgtttggagtatggcctttacttttagcgaatgaaaccaaggaaaattcatgcccgcatacggagatctcgttattattgttacccccaaggggaagcggagcttgcgccgcgttgatgaaaatcaggacatgcacacgcaggacggcatcctgcgcatggccgatgtggtcgaagcgccgttcggttccgaagtctgcacgacgctcggcgtgccgtaccgcatccagaagcccacgctgaacgatatcgtcaagggcgtcaaacgccagacgcagatcctctatcccaaggatatcgggtacatctgtatgcgtctcggcgtggggccgaaccgcacggtcatcgaagcgggcaccggatcgggcagcctgaccgtggccctgtcgtggttctccggcacgaccggaaaggtgcacacgttcgaggccagggaggaattccacaagctcgcccggaggaacctggagtgggccggggtggggcagaacgtgaccatgcactgtcaggacatcgcggaaggcttcggcgacgtgaccggcgcggacgccctgttccttgatgtgcggacgccgtgggattatttgaagcacatccccgccgccgtgacgcccggcgctgcgctggcgttcctcctgcccaccgtggatcaggtcggcaagctcctcctcgggctggagcaggggcccttcgacgacgtcgaagtctgcgaaatcctcgtgcgccgctggaagcccatcgcggatcgcctgcgccccgaagaccgcatggtggcccataccgggtttctcattttcgcccgccatcaggaacgctcggcgaagtgggacgaatgccgcaccgcgtcgctcggcacccgtgaacgcaagcaggaagccgcgcgccgtgagcgtctggggctggacggcatggagacggcctccgaacagatcgacgaatagcattcccatcgtattatgaaaataacaatccaaaatctttccaaggcattcggcggtcgggacatcttctccgacttctctctggacatcgactccggtgtccgcttgtgcgtgtgcgggcccaacggctgcggcaagtcgacgctcatccgtatgctggcggacgccgatgccccggattccgggcgcatcatcatgccgcgcggctgccgtgtggggtacgtgcagcaggatctggacgaggccgtgctggacacgccgctgctcgaatgggtggtggacgtcctgccggactggcatgacttctggtccgcatgggaagcggcggcggcctccaaggacgaggccgcgatcgcgcgcctcggtgcgcggcaggccgagcttgaggccctgtacggctacaatcccgagcacaaggcgcaggccgtgctgtccggtctgggattcgacgagggcaagtggcacctgccgatcaagcagctgtccggcggctggcgcgagcgtgcaaagctggcccgggtgctggtcgccggggccgacgtcctgctgctcgacgaaccgaccaaccacctcgacatcgaggcggtggaatggctggaagatttcctcatggattacaagggggcgctggtcttcgtggcccacgaccgcgtgttcatggaccggatcgggacgcacgtgctgtacctcggcggctcgaaacctgttttccgcaaggcgacgttcagccagttcgtggaattgcaggaagagcttgaggagcagagggaacgcgaggcccagcgcctgaacgccgaaatcgagcgcaagatggatttcgtgcgccgtttcggggccaaggcgaccaaggcccgccaggccggatcgcgccagaagatggcgaagaagcttgagaaggagttggaaggcttccgcccggaagccaagcgcaaggaactcagcttcaagtggcccgagccgcccaaggccgacaagaccatcctgtccgtggccgatctcgcgttcgccttcccggacggcgtgagcctctggcctccgctgacgttcacgatctaccgtggccagcgcatcgccctcgtggggcacaacggctgcggcaagtcgacgctgctcaaaatcctcgcgggccgtctggagcgcaagggcgggacgcaggtcatgggctcgctggtcaagatgggctactacagccagcaccagacggagctcctgaacagctcgggcacggtgctcggcgaaatccggcggctttccgatccccggatgacggaagaggagctcatgagcgtcctcgggctgttcctgctcgggcagaactacttcgaccggcaggtgagcagcctgtccggcggcgagcgcagccgcctcgtgctggcgtcgctgttcctcgcgcgcgccaacttccttgtgctcgacgaacccaccaaccatctggatctcgaaagccgcgaggcgctggtcgaggcgctgaacgcctttgacgggacgctgctgatggtggcccacgaccggtatctgctttcggaagtggctgacgaggcgtggtcgatggccggggacgggatcaccgtctataaggaagggttcgccgaatacgacgttgcgcggcgcgcggcgctggcggcgtccaaggccgggaaggaaagggagaaggacgccgggcggaaggccgagggccccgtccccggcaaggcgctggaccgggaagagctgaagcgcctcaagcgcgagcaggccgagcagcgcaatgccctctataagaagatgcgccccaagcaggaggcgtatgccaagctggaaacgcagcttgaggcgttgctgacggagcagtcggacgtcgaggccgcgctggccgaccccgaggtgtacgccgacgggaacaaaacgacggaactgctgaagaagttcagccagttgaaggaatcaagcgaacaggcgctggagaagctcggcgaactggaagccgagcttgcggaactggaagcgcagcgcgccgccttgtcgatgaacggcggcggggatgaattgtaggtgttcagcctgaagagtaaggagaatcttgtggccagagaaatcaccgagcgccgccgggccaagctggaacgggtactgcgctggcgtcagaaggatctgacgctggtgttggcgaatattcacgatccgcataatgtttcggccatctacaggagcgccgacgcgtttggggttgcggcgctgcacctctattatacggatacggcgttcccggagctcggcaagaaaagttccgcgtccgcccgcaagtgggtggaaagcgtccggcaccgcagcgccgaggaactgtatgcggcgctcaaggcgggcgggcatcagatcctcgccacgagctgcacgccggaatcgaagcccctcggggcctacgacttcacgaagcccacggcggtcatcatgggcaacgagcacagcggcgttcccgccgaattgaactcgctggtggacggcgaggtgtacatcccgatgtacggcatgatccagagcttcaacgtctccgtcgccgcggccgtcatcctgtcggaagcctcgcgccagcgggtgcaggcgggcatgtacgaccgcccgagctacccgccggacgagctcgccgcccgcctcgaggcatggatagaaaaatgagccgggtctgtcattgacctttctccgttctattgggtagaagagggggaaggcttggggaaagcgggtcccccggcccgatgggaacggtcggaacatgtcctgcaagatggggaacttcatgaatcttcgcgtgttcgctttgcttggcgtcctgctgcttgccgggtgttcggggctgtccgtgcggcatctcccgagcaatccgtggaaaaatgaggcgtcccagaacatccagatgcgttacctcgccttccagtatcaggtgataccggtgggcaatgagcttggaatcgttgcggaagcctatccggtcatcgacaagctgcccgactgggcctcgtggtacggcgagatcatgctgagcgtctacgtttcggacgagtacggcagggtccttgcctccaaggacaccgtgctggttccccgcccgctgaaccgcgaagccgggctcccgcttgaagtcagcctcgatctggggacgaaccggcatcagccgctttcgatctccttcggataccgtctggtgcttacggacacgcagcccgacggcacggcggggcggcggatgctggtatcggaaagggcgctcgaaaaataggcgttccgcatatgccatacggaaaggggcgggccggtgttgacggcttgcccctttttatgcgaggagaggcggctgtttgtcccggcgagaggggcatcgtgatgccgggatgccgttttttgtgaaaacggccgtatcgtttcggatggggaagggggctcaaagggggccgggcaagggttggaaggccggaaagcggctggcggaagggtttttcgcggtatccggccctgatttttgcttgccagtgctcttatttttgagtaacattttccgattccattgatatggtcagtgtttttgagatgctgtacctcatacgagcttcccggtttcggccggaggctcgattgcgcgtttttccggcataccgcgtccgccggaaggcgcgatgcggaggggggagcgtcctttgttcacttttaaaaagcgatatgcggggttctgagatgttctcattcatcgtggtattggcttgcgggctgttcgccctctactatgcgtatgatacctccaagcgcgtcttctccgccggtaccggcacggaagaaatgcagaagattgccggcgctattcaggagggcgctcaggcgtacctgaaccgtcagtacaaaaccatcgccatcgtgggcgtgatcgtggccgtgcttctggcttgggccctttccggccttgtggcgctgggcttcgtgcttggcgcggtgctgtccggcgtcgccggctacatcggcatgaacgtttccgtgcgtgccaacatccgtaccactgaagccgcccgccagggcatgacccccgccctcaacgtggccttccaggccggcgccgtgacgggtctgctggtcgtgggcctcggcctgctcggcgtggtcctctactatggcctgctgaccatgttcggcgtggaacagaagaccatgcttgaagccctcgtggccctcagcttcggcgcttccctcatctccatcttcgcgcgtctcggcggcggcatcttcacgaagggcgccgacgtgggcgccgacctcgtgggcaaggtcgaagccggcatccccgaagacgacccgcgcaaccccgccgtcatcgccgacaacgtgggcgacaacgtgggcgactgcgccggtatggccgccgacctctttgaaacctacgccgtgaccgtggtcgccaccatgctgctcgccgccatctacttcaccggcgaactccagcacctcatgatgatgtaccccctgctcatcggcggcgtgtgcatcctcggctccgtgttcggcaccaagtacgtccgcctcggctccgacaacaacatcatgaaggccttgtaccgtggtctgaccgtcgccgctctggcttccgccggtctcatcatcgtcgtgaccttcctgctgttctggggcgctcctgaaatgcagatccagggcaagaccttcggcgtgggcaacctgctgatgtgctccctgaccggcctcgtgatcaccgccgcgctggtgtggatcaccgagtactacaccgccaccgcgttccgccccgtccgcagcatcgcgcaggcttccaccaccggccacggcaccaacgtcattcagggcctcgccgtgtccatggaatccaccgctctgccggtcatcgtgatctccatcggcatcctgttctcctacagcaacgccggcctgttcggcatcgccatcgccgcgaccaccatgctcgccctcgccggcatgatcgtcgcccttgacgcctacggccccgtgaccgacaacgccggcggcatcgccgaaatgtccaacctgcccggcgacgtccgcgaagtcaccgacgcgcttgacgccgtgggcaacaccaccaaggccgtgaccaagggctacgccatcggttccgccgcgctcgccgctctggtgctgttcgcttgctacaccgaagacctcggccgcttcttccccaacctgaacgtgtccttctccctgcaggatccctatgtcctcgtcggcctgttcatcggcggcctgctgccgtacctgttcggcgccatgggcatgatggccgtgggccgcgccggttccgccgtcgtggttgaagtgcgccgccagttccgcgaaatccccggcatcatggaaggcaccgcgaagcccaactacggcgccgccgtggatatgctgaccaaggccgccatccgcgaaatgatcatgccctccatgctcccggtcttcgccccgatcatcgtgtacttcatcatcgacgccttcggcggtcagagcgcggcgttcgcgaccctcggcgccatgctgatgggcaccatcgtgaccggcctgttcgtcgccatctccatgacctccggcggcggcgcgtgggacaacgcgaagaagtacattgaagacggccaccacggcggcaagggttccgatgcgcacaaggccgccgttaccggcgacaccgtgggcgacccctacaaggacaccgctggcccggctgttaacccgatgatcaagatcatcaacattgtggctctgctgctgcttcaggcccttgcctaagccttagagtctcaggtccattatcgcgaagcgccccggtgggattgaccgccggggcgctttgtgtttttcatacagaatagccattcaggaaggttcgtcatgctgcatatcgggtgtcacttgtccagttccaaagggtaccgccacatgggggaggacgcgctctccatcaatgcggatacgttccagttttttacgcgaaacccgaggggcagcaaggccaagaaggcggaccccaaggacgcggaagccctgcgcggcctgatggaggagcacgccttcgcgcccgttctggggcacgcgccctatacgctgaacgcgtgtgcccttgatgaggggctgcgggcgttcgcgcgggacgccatgcgcgaggacgtgatgacgctggacacgtatctgccgcatatgctgtataattttcatcccggcagccatgtggggcaggggatcgacgcgggcatggcgctcatcgtcgaactgctggacgcgatcctgcgtccggagcagaccacccgcgtcctgctggaaaccatgtccggcaaggggaccgaggtcggaagccgtttcgaggagctggggcatatcctccgctcggtatcgctgggcgacaagatgggcgtgtgcctcgacacctgccacgtctattcggcggggtatgatatcgtcaacgatcttgacggggtgctggagcagttcgaccggcatgtcgggctgggcaagctgtacgccatccacctgaacgacagcctgatgcccttcgccagccgcaaggatcgccacgcccgcatcggcgaagggaccatcgggctggaggcgattgcgcggatcatcaaccatcccgccttgaggcacttgccgttctatctggaaacgcccaatgagcttcccggctatgcccatgaaatcagcgtattgcgggccgcatggattgaatgacgacggatgcggcggcccccagccttctccatccattgcgggaggccggcacgccgccttgccccggtcgggttcgccccacaaaaagaggccagcccccttgacttcgcgctttcgtgaagcactctatacttcgttcaccgtgcgctttcgcaccgtccattcatcagggagaatcatatgaaattcacgtattccattcccaccaagatcctgttcggccccggcagcttcaacgatctcgccacgacgcccctgccgggcaagaaagcgctcgtcgtcatcaccgccggaaaatccatgcgcgcgaacggctatctcgatcgcctcatcgacatgctggacaagcagggcatcgggcacgcgctgttcgacaagatcctgcccaacccggtgctccgccatgtccatgaaggcgcggcgctggcccgcgagcagggctgcgacttcgtgatcggccttggcggcggcagctccatcgactccgcgaaaagcattgcggtcatggccaaaaaccccggcgactactgggattacatctccggcggctccggcaaggggcagccgctggtgaacggcgccctgcccatcgtggcgattgcgaccacggcgggcacgggcacggaagccgacccgtggaccgtcatcaccaaagaggacaccaacgagaagatcggcttcggctgcgcggaaaccttccccgtgctctccgtggttgacccggaaatgatgctgaccatcccggcgcacctgaccgcctatcagggctttgacgcgttgttccacgccacggaagggtatatcgcgaacgtcgccacgccgctcagcgacgcctatgcgctgaaaagcattgaactcctcgccaaatatctgcccgccgccgtgaaggacggatcggatctggaagcccgcacgcaggtggcgctggcaagcacgctttccggcatggtcgagtcgacctcctgctgcacgtccgaacacggcatggagcacgccctgagcgccttttatccgaaactgccgcacggcgcggggctgatcatgctttccgaggcgtactattcgttcttcgccgacaagtcccccgaacggttcacggctatggccaaggccatgggcgtggtgacggggcacctgccggaggccgagcgcccgatggcgttcgtcaagacgcttgtggaattgcagaaggcgtgctgcgtcgacgggctcaaaatgtccgactacggcattacgaaggaagacatggccaagtgcgcggccaacgcgcggcacacgatgggcgggctgttcgagcttgatccctacgcgctgtcgctcgacgaaaccacgcagatcatgatgaacgcctacaaataagcgggcgggacacacaaaaaaagcgcgggccatgccgcgctttttttgtgcccatgccggacgttgcgcccctgaaccctatggcggttcaaagggaatcggtttcacggaacgcgctgaacggattcgatccgcacggaatttcttgaagggcagggcgatccccttcggcggacttgaggaagggaaaacgcgtaagactcccccttcccaacgccttcccgcccgtcccccaacaagccgctagcgggtaccggcttgttgcttttcgatccagacgaggagttgcttgcagaaggtttcgatggcctcttccgtgatctccttgccttctgtgatggtgtattggttcatgagcagggcgggcgtcgcgtttgtgaagccttgccgggcgatttcaagcccgcagcctacgcaggtgatgcgggcttcgacagcgtgctgtttcaggtggcggcgcaatgaccgctcggtttgcgccatgcgcgggccgttcagatccagaatgcggatattgatttcaggctgactcatcagagcgatccttcacgttgagcgtttctctccgctatagcgcttcgatggggcgtccgcaaccgtcggggctggcggcgggactttccacgccgccagccccgggatatcaggcctcctgttccaaagccggggattcggacagggcggaaaccgcgatccagcctatccacgagaagaggaagccgatgaagaagggcgggatgcccgcggctacggaaccgagctgcggcccccaaatggaggtgggtccgtaggcgatcaggtaccaggcgaggcaggagaagaacccgcacgcggcgctggcccatgctgccccggcgttgcggcgtccgaagcgcacgagggcgacgtagggcaccagcgccattgcgccgacgatgctccagctggtggtgcagagcagggcgacgagctgccccttgatctgggcgcagccgccgctgacgagcacgcagatggcgatgccggtgaaccacgaaagccggttgctgggccgcccgcgcaggtcctcggacagggcggaaaccgcgatatggtagatgccggtggccgtggacagcgaggcggagacgatggccagtacaaagatgtgcagggcgaactcggggagcagcatttggacgagcttgggcatgacctgatcggggctggcgacttcgggcaggataagccgggaaagcgcggccgcgaagtaggccccgcccacgagcaccgtcaggatgaacattgcgagcggcgtggttttcttgagctggcgaggatcggcgatggcgaaatggcgctgcatcatctgcggctgggcccacaccgcgatggaggtcacgacgaccagcgagaggatgaacagcccccgttccccgccggacagggagacgaacccgttgttggcgagatcgctggggggaagggccgccagcgcctgcataccttcccacgggccgccgaccttggagaagatgtcccccacgagcatgagcatacccacgagcatgacgacgccctgcatggcttcggtgtagaggacgccgcgcagtccgccgatgaagacggtgagccctacgatgatcgccaccagccagatgagcgcccagacgggcacggggaggatctcggccagcaggagcgccgcccccttgatgaccgccgaaccgtatacgccgaggaacaaggcgaaaacaaaggccatagcccttgtcaggctgggcgagccgtggccgaggccgagcagctgcgccggggtgcgcgcgccgaggcgttcctgccatttgcgcgttggccacgccaggaagcggtagacggcccacgtcccgaaccagacgttgcccgcggccacgagcagcatttgcaggccgtaggcatgggcgaggccgccgaacccgacgagcgccaccgccgagatgtaggtggcgacataggcgaaggcctgcacgccgaatcctacggagccgctgagcacggcgtccttgctgcgtcccttatgcaccaaaaaggcgaagaccgcgaagtagccggcccagagcaggatctcagtcatggctgcgctccatccggcgtttcgccggtttcacattgcggaggagcccgaacagggacatcgaaaaggacacgaacatggaaacgagggcgactccaacggctccatccataggcaggttggtcagggcggcaagcatcacggtttctcccggcggtaaaaaggtacaaaaaaagccaccggccctttgaggtcggtggcttgtccttactgaacaaagctcaatgtgctacggaacgtctcatttacgcacagcacatccgatccggggccagcagctggtgtcccgaataataatagtaaaagtgcgcaaacgaaaagatcatggtataactccgtggaagagatgttcccacaaaaagggaggctccgtcaagggggcggggccgctttttttgtcattgctttctttccccggaacagggatgctggacaagccaatcccggaggcgggcgagttcggggagaaagcgggattccagttccttcacggcggcttggagcgtttccggcgagtcgtccctcgcaagctggctcctgcgcgcgagcatgtccatccagatgtgcccgtcgaagatgatccgcctccgccacgcggcggcgaggacggcgggcggggtgggcgtatcgggaaggtgcccggatgccgcaagatggtctttcatcgctttcaggcccgcgtcgacggcaaaacgcatacggcgcacggccccttcctgttcaagtccggaaagtggtgataataaaaaggcttcttccaaacggctcaacgtttggagaaaatgttgcagagaagccgaagacggcgtaaaaaaggatggcatcacttttcctcttgacaagcccgtaaagcggcttaaaccgttatttcgcgctgtacatcggtttttccatagtgtagtagattactcggttttctggcgtcgataacgcgttaggaaagccgttcattttttgtagagcagattcgttacaatggaaaggggaatagtgaatgaaatcttcgcatttgaggatgctgctgcttctgggggccttggggcttgcgtgttcgccggaatcggccttttctcaggagaaggccgccgctcaggcatatgcgggaaaaacggtcacgggggaagtgaccgtaaagcaaactgttgaagatacgttgcagtcgcaccgtggcctgaaggtcatgcaggagaaccttgacgtcgtccgtcatgagctccgcagggccaaggcggggtggggcccgagcgtcgacgccgtggggcgtaccggtgccagccggttgagcaatacgacgacgcgccctttgaacgccgataaggacatgtacggggccaacagcatcagccttacgctcacgcagccgctgtgggacggtttcgccacgcgcagccgtgtccgcacgggcgaagcgacggtcgattccatgacctaccgcgtcctcgacaacgccacgtcgttcgccctggacgccatcattgcccatgtggacctgctccgccgccgcgagatcctgcagcttgccaaggataacgtgaggcagcacgtggagatcctggactcccagaaggagcgcgtggaactcggggccggctcctccgccgacgtgacccagaccaaaggccgcctggcccgcgcccagagcacgctcaccgatgccgaggcctcgctccgggaaggtgaggcttcctacatccgtttgaccgggaagcccgtgcccgcttcgctggctgaagtgtatgtcccggaacccatgtataccggttatgacgccgtgatggaggtcgccgacaagaacaacccgaagctgaaggcctatatgtccgacatcaaggccgcgcgcggggaaaaggaactggccgaatccgcctaccatcccaaaatcaattttgaagtcggcccctcctactccgaccgcagcggccccggcagccagtggacttccggcgtggacgccgggcttgtcatgcgctggaacctgttcaacagcggggcggacaaggccggaaccgaagccgccgagtcgcgcacgaggatggccacggagacgctgtataatttccacgacgaactggctctggaaatcgaaaatacatggacccggtatctggcggccaaggaacagaagaagtattatgaggaagccatcggctacaacacggcgacgcgcgacgcgtatctcgagcagttcaagctgggcgaaagaagcctgctcgacgtgcttgatgcggaaagcgagcttttcaactcgtccacgcagtacacgacagccaatggcaacgtggttgtaggcgcgtacagactgtatgccctcacgggcatgctgcttcccgaactgggcatcaaggaagatccgctttatgaatcgcccagaaatcagcaggaaaaacgctaggttcctgcgttgagagtgtccgcatggctgatgtgatgcaacccccgaaggggggagagcccgatacgccggaacagaagaagcccgtcccgctggtcaacgacggtttatcgccttcggacgtggatttcattccgccgctggtgcacagtttggttacgttgctgcggcttcgcggcaagtccgtttccacggcgtttctgatggcggggttggccgggacggggcgtgtctctcccggggcctgcctgcacgcggcaaagcgtgcagggcttgaagggaagatcgtttatcggaagagccttcaggacatttccacgctggtgcttccgtgtatccttctgttgtcccgtgaccgctcgtgcgtcctgacgtccctggatgacggcaaggcgggagtgattttcccggaaacgggggagggcgtgcagcccgtcccccttcagatgctggcggacgagtacacgggatacgccattttcgccacgcgcgaggcccggcttgaccagcgggccgaccgcatccggctcctcaaggggaagcgctggttctgggacgtcctgctctactacatgccgatttatcggcatgtggccttcgccagcgtggtcatcaacctgatcggcgtcatcagccccctgttcgtgatgaacgtgtacgaccgcgtgattcccaacaacgcggtggatacgctctgggtgttggccataggcatcctgatagcctaccttttcgatttcctgctgcgcaacctgcgcagttacttcgtcgacgtggcgggccgcaacgcggacgtcgtgctttccagccgtctggtgcagaaagtgctgaccatgcggctggacgccaagcccgaatcgaccggcgcgctggtcaacaacctgcgcgaattcgagtcgttgcgcgaatttttcagctcctcgacgcttctggcgttcatcgacctgccgttccttgttgtggctttgctcctgctgggatatatcggcgggccgctggtgattctgccgctgtgcgccattcccgtgcttatcattacgggcatcgtgctgcaggaggccggcaagcgcacggcggagcagggctataagcagaacatgcagaagaatgcgctgcttgtcgaactggtcaacgggctggagactctcaaggcgtgcatggccgaaagccggatgctgcacctctgggaacaggtggtcggagtttcggccaaagccggcagcgtggccaaaaaatacaacaatctcgccatcaccatctctacgctggtcacgcaggccgtgtccgtgggcatggtcatctggggcgtctatcggattgccgacggcaccatgacgatgggcgggctcatcggctcgaacattctggtgggccgggcaatggccccgctgatgcagatcgcgagcctcctcaccagactgcaaaattcccgcatgtccctgcaggcgctcgatctgctgatgcagcttccctccgaaggccagaacgacaacgagtacgtggagttcggcaagctggacgcctcgttctcgtttgaggatctggcgtttgcctaccccggcgccgaacgtctggccctcacggacatttccgtgttcatcaagcccggcgagaaggtcggcgtcgtcgggcggatggggtccggcaagtccacgctcggcaagatgctgatcgggctgtaccagccccgggacggcgccgtgaaattcggcggcgtggacatcaggcagcttgccgaagcggacctccggggcagggtcggtttcctgccgcaggacgtggtgctcttttacggcacgatccgggataacatcgcgctcggcgatcccaccatcaacgaccagatgatcctgcgggcgtccacgctggcgggcgtgacggagttcatccgttccaacccggccgggttcggggcgcaggtcggcgagcggggcatgtccctgtccggcggccagcgccaggccgtggccctggcccgcgtgctggtgcgggacccggacatcctgatcctcgacgagccgaccagcaacatggacaatgcgtccgagcagatgatcaaaaaccgtctcaaagcggtgatgggcaacaagacgctggtcctgatcacgcaccggctgagcatgttggaactcgtggacaggctcatcgttatggaaggtgggcgtatcattgcggatggtccgaagaacgaagtgttgcgccgcctgcgcgagcagcccgcgccccggaccgaacagtaaggattgagtcatgccgcagcaacctgaaaaaccgcaacagcctcaactcccaaacgatacccgcacccaggccatcggttcggaggagctcccctacgtcaacgaggtggaagccgcactggcgcgcaagccgcgcctcggggcgcgcttcctttcattggctgtcggcctctttttcctcattttgggcatctgggcgaactttgccgaaatcgatgaggtgacccacgccaacgggcaggtcatttcgtcgcagcgcacgcagatcatccagaaccttgaaggcggtatcctgggggccgtcctggtcggtgaaggggaaatcgttgaaaagggcacgccgcttgcgcagctcgacaacaaacttgccgagagccaataccgcgacgcccagaacaggatcttggagaacgagctttcgatcatccgccttgacgccgagctgaaaggcgaatcgcccgccttcccggaagaactgtcggtttcgcacccgcaggccatcgctgaccagatggccatcttccatgcccgcgaacagcagcagaacgccgaaatgggcctgctgcaatcgcagtatgagcagcgctcgcgcgaagtcgaagagctgaccggcaggaaacgccagaccgaacgcagccttgcgcttgccgttgaacagcggaacatcgccgcgccgctgatgcagcgcaagatttattcccgcgtcgactacctggggcttgagcagaaggtcgtgtcgctgcaaggcgatatcgaatcgctggcgtcttccatccccaaggcgcaggccgccgccgaagaggcgaagcagcgtttgacgttgcgcaaggcggaaatggaagcggaaatcaacgccgaaatcagcaagcgccgcacggaactcaattcgctgaaggaaacccttgccgccggcggcgaccgggtgacgcggacggaattgaaatcccccgtccggggtaccgtcaagcagatttacatcaacacggtgggcggcgtcgtcaaacccggcgaagcaatcatggaaattgtgccgcttgacgatactctgttggtcgaggcccgggttcgtcccgcggacgtggccttcctccatccggggcagaaggcgatggtcaagatttccgcatacgatttttccatctacggggggcttgaggccgatctcgagcagatcagcgccgatacgattgaggacaagcgcggcgagttcttctacctggtcaaggtccgcacgcacaagaacgccatttcgtaccgcaaggagcagttgccgatcatccccggcatggtgacgaccgtggatatcctgacgggcaagaagacggttctcgactatattttgaagccgattttgaaggcccggcagaacgccttgcgggaaaggtaaatgatcctctggaggtggcttcgtgtcctcgcgggcctgcttgcagtaagtattttcgtcggattgccgtatcccggcgcgtttgctgcggatgatgacgacgaaatactcctcaagcggagttccgtcggttcgcttctgtcgaacaggaacaaggcggagggtgcccgggttgcggcgccgtccgacccgcctccagccgtaaccccggccgagcccgcgcgggaaccggaggcgcaggcggccccggctggaaagcggggagagggcggccccatacggctgttcgggacgctggagatgcggagcaagatagggaagatgccgaaatggacctccgttctggaaaaggagaggaagaatccgggatacgtggctaaccggcagttccccgggcagggcgcatggaaggacatcaaggcgaagctgtcgggcatgtccccgcttgagcaggtgaaggccgtgaacgtgttgatcaacagatggccttaccgaaccgatatggatgtatggggcgtcatggactattgggagacgcccgtggagttctttcaaaagtcgggcgactgcgaggatttcgccattgccaagtatttcgcgttgcgcgacctgggctttcccgcttcccagatgcggattgtcgtgctgaaggatacgcttcgcaacctcgaccatgccgtcaccgccgtctacctggacggggacgcatggatactcgacaatttgagcaacgcggtcttgtcgcacaaacggctttcgcattatcggccgcaattttcagtgaacgaggagtaccggtgggcgcatttgacgccttccgctcctaaaaagacgggccgttagcccgtcgggctccggctggaacgtgtagtgaacgaccatgcagacgagtggaacggataaagagaggggcgttatggaacaagtcattccccagtctaaggtgggaaacaagtccgcggcgtacaggcgcatgggctggtttatggccgtcattcttgtgcttgtgctgtgcgctgcgggcagtctggcatggttcaacatcaacatggcggaaacgtccctcaaacaggatgtggagcgccgcctgcaatttacggcccagaacaaggccaacgcgctttcgctttggttcaactccatgcagaatcaggccaaccggctgatcagcgcggatcttttccggctgttcgcctcggaagtcaacgggctgggcaatgatctctccccgctcctgaaagcctccggggacagcccctccgggaacgacgacctgtcgcagctggcctcccagcttccgctcatgaagaaccttttgcaggaattcatttcctattccggattcctgcgcgcccgtatcaccaatgcggacgcccagacgtacctttccacggacgtcacgcccccggcgctctcgctggaacagcagcagggcatccggcaggcggtcgagtcgggcaagttgggcatcctgcccgtgcgcaagaccagcaatgggctggtccttgatttggtcgttcccatcttcgccccccagtatgttgaaaaccgctcggaaaagccggtggctacgcttctgctgtctctgatggtttcttcccgcctcggtgaaacgattgatacggcgaagggcgagagctcgttcggcgttacccacgttttccagatcgtcggaaccaagctgcaagatcttttgcccctgtccgcggatatccagaatttgcccgactggcagctggggcagaacgacagcctgccgttcgggatccggggaggggaggccggctcgcctgatgaagtatacagcatcggcgtaaaggttcccgagctgccgtggctggtcgtgcaggaagtgccggtggcggccgcgctcaagcccttcctggcgcagcgcaatgcgatcgtcatatgggcggtcattgcggtcgtggtcgtgctgctggccctgctggccgtctggtggtggctcgtggggcgcaacgcccggaatgtgagcgccgaactgctccagttgtatcagatttccaatcagcagaagcagctcctcgacggcatcaacagcgcgcttgtggacggcatcgtcctgaccgacaagggcggcatggtccagtatgccaaccaggcgttcgcgcgtatggttgggcgttccgacgaagagcttgtgggcatggattgcgcggcgatttttggctatgacaccgccttgcggctgtataagcagctggacgtggccatccaaagcgagcagtctttcatgttcaaggacgtgatgtggctgcagtcgaagaagtaccactatcagatcacgtgctcgccgtaccgcaacgaaagcggcgtgatcaccggtacggtttcggtgttccgcgacatcacgcagcttgtcgatgcgcaggagcgcaaccagcgtatggtccggcagaccatcgccgcgttcatgcacgctatcgaggccgtcgacccgtatttgggcggccagtcctcgtacatggcgaacctgggcggcgatttggtcaagaccctcggcctcagcgaggaagacgagagcaccgtccgcacggctgccagcctgtcgcagatcggcaagatgcagttgccccgcgagctgctgaccaagcccggcgccttcacgccggaagagcgtcaggctatggagcggcatgtggaatatgcccgggagaccttgaagaacatcaacttcgaactgcccgtcgtggaagccatttcccagatgaacgagtttatggacggttccgggtatcccgaaaagctgcacggggacgagatcggcatttgcggccgtatcctgtcggttgcgaacacgttctgcgcgctgatccggccccgctcgtatcgtaacgccaagtccgtggacgtggccctgaacattctggaatccgaatcggctaagtatgatcaacatgttgtgcacgcgttgcgtgaatacttgaagacgcctgcgggggaaaagttcgtcagaagccttgctgacgaaaacgcctgacgaggcgatacaaaagggaccggtgtgggctatgcgcatcctttttctgcatcatacgtttccagggccgtttcggcagttggcggcgcgcttgggtgggcttcccggcaatgaaatcgtgttcctttcggagcggagcaggcgggatgtgtggattcccggcgttcggaatctgacggtttccggcgtccagccggttatggcgaaggacagggccgagcgggaattgctgcagatgatgcgctacggttcacgttttgccaatgcgctgttgaagctgcaacagggcggctttgaaccggatatcgtctacgcccatccccgatggggatgcagttttttcgcgcaggatattttccctcaggcgttccatgccgtgtatgcggaatggtattatacaaaaggggccaattacacctttttcacgcaaggggcggcccggcccgccgtggagtttgcccagagccgcgtccgtaacctctgccagctcaatgcccttgcggaatgcgatctggtggtcacggccacgagctggcaaaaaaagcagtacccgcagcagattgcaaaacatattcacgtgatccacgaaggcgtggacacggatttcttttccccgaagcccgagcgcttccgtatcgagggatgtgatctttccaccgtcaaggaactggtgacgttttcgggccgggggctggagccttttcgtggtttcccccagttttacaggagtttgccccggttgctcgcggcgcgtcccgagtgccatgtgctgatcatggcgtcggagcggcaggggagcgacgagaccgtttcgctggagcgcctgcgggaagaggtgcctgtcgattcccgccgtgtccatttcgtggggttccgcccttacgaggagtaccggctgttgttgcgggcttccacggtgcatgtgtattttacggcaccgttcgcgctttcggcggggctgttcgaatccatgagctgcggctgcctgctggtcagttcggatacggaacctgtccgggaagtggtcaggcacggcgaaaacgggttcctgtgtgacttctgggatcacgacatgcttgccgatatgacgacggagctgttggcccgctcggatgccatgggcccggtgagagcggctgcccgccagagcattgtggaggaatataacctgaaagtgcagattccgcgccacatggacttgctcctgtcgacgtatgccgactggaaaaaagctcggcagacatcgtagataaggaaggctcccccataaaggagccttttttgtcgcttttgcggggaaagacatagtaaagggcatttcaaaatgtttctaagacgaatctaatgcacctagtttagttgaatgaagccaaggtgtacccagagacgttcaaaacgggtcaccaaacgccgaaaattacccgcttcttagtttcccctctgtttcatgcactgctttgttttcaggccgatgtcgttcgcgagctttatcgccaaattggaatagcttgaaggaacgggtaggggcttttaaacgtctccatcagttctcccgagcgcatcggcaatgcgagcaagcgtcaggatgtggcgtcctgaatgccctcgttatatcgggctttactgagagtccgtgtggatatgcctgtattggccctaagggagagacaaaccagcagtggatcgccgacaagctcttgacgaggggtacggcatgaccccgatcaccagcctctaaacctggatgtatggctatatgctcggcatcgtggcgatgcccatcagggacatgggaatataggagaagcccccgaccggaaggaagggggctttctcatgagcaggatagaattccttacgctgtgtaattgctcaaaaatgaagcaaggatgtgtctagtcatttccttttcgggggaattttgcaccattgggtatggatgggataccacgattcgctcgcacactcttttggcacatacccatcccatttttacctatctcttatccactacatcatttctattaataaaacacatagatgccatccggatgacggatttctccgcgttttcgcaagccctcggcgtgttgacagccagctttgattttgttcacctttgttttagataacatactataaacaaagatatttttaatagataactgtatatttatagctctgtgaaagcatgtgtagcccgtagtacgtcgatatttcgactcctgcgggctctctgtacacaaaaatgcacataaaagtattttttgtgtattttttgtaacttcaaaaatattttttaaggagaaaaaacgatgccctaatcaatataatgaaatgaaatttattcactttttattttgagtcaaagagatgaagaacatttcactctacgttgacagaaaaggaaccattttccatacactcaaaacaaagagggaactatgtcttttggaaagcggcttaaatctcttttggcaaaaaagcgtcaatctcaaatggatttcgctttgcgtctgggtataacccgctcccggctctgcaactatatcaatgacaggagcgagccggactatgcgacgctttgcactatagccgaagcgctgcaggtgagcgtggactatcttcttggccgcaacgggatacaggattccgattttcagggaagcagaatcttctcggacttcattataggacgggaaaaacccgcttcggaggggatgacggtttggattcccctgtatctctcccgttcagagacgctggaggaacctccggtcccctccgggtggctgcgcgaaacgagttcattcgttcagactggagaattccgccagccctacgccatcatcgtcggtgacgacagcatggccccggaaatcatgcccggtgacattgcctatattcagccgtgtttcatctaccatccgttcatggaacagaacttgggcagggatctgtttggcgtgcgccttgatgcgggcgatgccgtgggtacgtccctgaagcggtgctgcgtccagagcaacctgctcatcttttattcgaacaatgtgaaatactccccggtcattctggacatgaacaaaatccttttcgtcccgctgatcggcaaggtcgtctccatctggaggagctatctggacagcgacatgctggagcgcattcgggaggccgacgatgattgatgtcattcccctatccgcatgtcatacggaacagtacggcaccatcagcgtgacgagccttctgtctttcaacaactacttcgatccccgcaatgccgcgttcggttctctgctcgtgttcaatgactaccgggttcctccggcggccgggttcaagatgcatccccatcataactgcgagcagcttttcttcgtcgtcgaggggacgcagaagtgcgtagataccctgaacaattcgcttgtgcccaagcctgtgaccgtgcagcgcgttacggccgggaccggctatgcccttcaatatggccgccaacgaagtgctggcgaaccgggccaatgagattcttaccggatacaagggctctgatcaggttcatcccaatacccacgtcaacatgtgccagtcctccaacgacgtggtgccgaccgccaaggggatcgccatccataatgaagtgggccgggttctcaaggccgctgcgcaccttgaggcggctctggacgccaaggccgcggggttcgccgatgtggtcaagatgggacgtacctgtttgcaggatgccgtaccgatcacgctggggcaagaattttccggttatgctgcgggaatacgtcggaatcggctgttgctggaaagggaacgggcgcgctggtgcaccggcgtgctcggcgccactgccgtgggtacgggcatgggatgtatgcccggcttctcggagcatatctacaagaacctttcagccgtctgcgggcgtgagattcgccgtgacgccaatctgttcgacggccttcaggcttccgactccttcatcatcctgcacgcgcacctgcaagctctcgccaccgtggcggtgaaggcggccctcgatatccgcctgatgggttccggcccgcgcgcgggattcggggacatcgtcatccccgcagtgcagcccggctcatccatcatgcccggcaagatcaacccggtcatgacggaagtgatgattctggcctgccaccgcgtagcgggcaatcaggcgggcgtgggcttcggagccttctccggggaactggacctcggcgcctcctccgccgtgccgatccgcagcatcctcaacagtatcgacatcctgagccgcagcatggtgctcttcgcggacaagtgtgtgaagggcctttccgccaatgccgaaaaatgcctccatacggccgaacgctcgacctcgctggcgacgatggtaagtgcgctcttcggttacaagatcggcagccgtgtggccaacctggcgtacgagcacaatcttacctgccgtgaagccgccgaacgggaacacctgctttcgcatgaggctgcggacgatctttttgatctgttgtcgttgaccgacgtgaaaaaaaccgaggcccttttcgccaaatacgccggaatccgcaacgtctgatctctgtccccaacggaaagggctggtttcccccgctggctctctttttgtccgccgggccgtcgttttcggaacgcacggcccggatttgccttcaaaggagggaacgatggaacaccgttcaccccgcactgctgcgggcggcctctctcaaaggcaaggcatgggcatccttttcggcgtgtacctgtccttcggcctgagcccgctgtactggaatctgctgcacggggtttcggccctcgaaatggtcagccaccgctcgctttggggaagcctgatcatcgccgccttcatggtgtggaaggggcagtttcccgcgtttttccgcgcgatcagggatcggcgcgagatcgcgcttatcggtttgtgcagcctcgcccatctctggaactggtggatatacatatgggccgtcaccaacggcaaggtgctcgaatgcagcatgggacactacatcgtccctatgatcagcacgatactgggctttctgtttttcagggagcgtccgggccgcctgcaatggatgggcatcatcttcgcagggatcggcgtgcttattctgctgatgggatatggagccgtcccgtgggcctcactgaatgtggccctttccgcggcgttgtttgcgttctttcgcaaacgcgccacggtcggagccgctcccggtatgctcatggagctgctgttttccgcgccgttcctgtggggttacctgatctggctgggagaaagaggggaagggcatttcctcgcaggaggcgcatacatggatctgctgctcatcggctgcggattcgtctccgccattccccaattgggcctgagcctcggcatccgcagcgtgccgatgatctcgctgggcatcatgcaatacattttgccgactacggttttcatgctcggcgcattcgtcatgcgcgaacccatatcggcgagcaagctgctggtgttcctgttcatctgggtgggtgttgggtgcttcctgtccggtaccgtcttttctaccggaagaaaaaagctccggcaggtaacggaaatagggcgggtgaagtattgaggaatgagggggggattgagccctaagccatgactggaagaaggaaggctcctcaggtgcgcgcttgtcgaggacaccggagatggcaggggaagtggcggaaatagaagtatgccccagtacgcgaagaaggagaagacaatattgcctgttgccttctccttctttgtttttactccaggctttccggcacgccgtagtcacgttcggcggcgttgagcactgccctgacacgggcacatgcctcctcagagaggggttccggttcccatgtggcgaggagttccttcgcggcaatgagcgcgcggctttccatgtcgaggtgccccgcttcgttccagcggtcacgggtaaggcggtcaatgagtttgggctttgattggatatacatgttttcaaaggtattcatatgcgcgaggaaatcactgcgcgggccgacctccttgatcacgtccacggaaagcgtttcatcgttcacaacaatgccatccatgctgaaaagcatcatctcggccatttcggcgtccatcaagagctggctgtagctgatggtcattcccatctccagcataccgagaccataaatgatgttggcacctgccagcatcggcaacagtccggtcagcgtcttttcatgtccgctctgggcatccccgcatttgctgtccccctatccgcccgccgcccaggagggcagcttgtaatagcgggccatagccgcgaccccggcgttgagcacggccagttccggcgtacccactacagccgcgccgtagcgcaaatccattgccgttgaggagcttccatagatgaacttggcgccccgccgagtggtttgcgcaaggacaagcccggcgagggcttcgcagttgtgcacgaccaatgccccggcgaggttcaccggagtggagccccccgccattcccattgagagcacgttgaccgtcgcgccgttcctggccgccgtcatgatgacttcgcatacgtccgccgtcagtttgagcgggctgatcggacaggtattgaaggtcactgggcagcgttcctcaaagttttcctcccccacagcggccttcgccatatcgatcatgtattgggtgagttttccgttgccgccgcctgtgaacacatgcttggtcgtgttcatcagcagggcttcgtagttatgcagttcagccacctgctcggggtagtcctgcgcccctgccatacgttcgcaaaccgggatgacgtcgagggcgtccacaacacgggtgagcttctcgacgtcttttttggtggtgttgcgtaccccgccggtatcgggatcgataaggtacaccgcctcgccgaaatttgtgaacatgacgcgcgtgctgtcgagcaccacgtcacggtccggggtgcgccctgcgaggagcagggtttcgggcgcacatgatacggcatccgcaaccatccactgagggaatctgacgatgtcctcgtcgatgacggaagcacctgcctcgacaagcagcgcacgggcttcgggcgagccgataagcactcccgtatgctccagcacttcaagggtagcccggtggatagcgtccatctcgtcctgcgtgaagacgttgagactcatcccgccggtggtgaggctacctgcttttttccaacgctgtgccatatgacctccttgctgggctgtgaagccttccgcaaacagtggtatgcgggaacggctaaaccaaaaaagtat

SEQ ID NO: 7194 - DNA, 2005 bp, Unknown
  gut microbiota DNA sequence
aggggaaacttcttaaaaagtttcccctccccctctccaaacctctcccctcctcttcaaatattttcgtttttatcgaatccctgccgccaagtttcccggtgtacgggggcgcgtttgccccgaccggcttgaatatgtccagttcaccatggcctcgatgggttccgggaggcactggttttctctgctgctcatcccttccgaaaaaattttccataacgaacgctttgattctcctgtcgacttttcctgtttgcttgctcgatccatttctttccagtacaacggcggcatttatgaatcagaccttttaggaggttctatgctagcgcgtttcttgccccagacggttccgtttttcaaattgctgatggaacagaacgccgttctgcaacggatggctcaaagcctcatcgtcgtcatggaaaacacgtatgaatcggaaggccatctcaaacaaatcaatatattggaagaagaggccgacaagctcaaccggaaaataacatggcatctttcgcagactttcattacccccattgatcgtgaagacatccacgcgatcaacctcgcacaggaacgggtggcggacggtatacaaaacctcgccagccgtttttttatgtgcggcttcatgtaccagcgtttcccggcccatatgatgacccggaacatcaagggcatgattgaggaaacggaactcatgctcgggcagcttgaaaagaaaaaggacgtatcggggcatctgcattccctgaaatcccgcaaatcggattgtgaaatgctgcaggccgcagggatttcggaaatgatggacagcgaaatccccaactttgagaaagtgcgcgaactgatcctctggagccaggtttacgagcgcatcgaacgtgccgtggatatggtttccgatctcggcgacacgctggaagaggtggtgctcaagtatgtttgaggtccccgtgctgcttgtgctcattgtcgtggtggcgctgatcttcgacttcaccaacggagcccacgactgcgccaacgccatcgccacggtggtttccaccaaggtgctcagcccccgcgtcgcggtcgtcatggcggcatcgctcaactttatcggcgcattcctcggcaccaaggtcgccacaacccttggcgcggggatcgtcaacacggacatggtggcgaactgtcagccgctggtgctcgccgcgctgctcggggccatcgcctggaacctcatcacatggtatttcggcatcccttcctcctcatcccacgcgctcatcggcggcctgatgggagccgccgtggcctacgccggtttcagcacgctcaacggcgcttccattgccgaaaaaatcctgctcccgctgatcctgtcgcctctcgccggtttcggcatgggcttcctgaccatgtttctgatcatgctcctgtgcgcccgggccaaccgcaacaagctcacccgcgccttcaccaagctgcaaatcgtttccgccgccttcatggcgacgagccacggcctcaacgatgcccagaagaccatgggcgtgatcacgctcgccctcttcatctttaacaagatcgacacgattgcggttcccttctgggtcaagtgcgtctgcgcgctcgccatggcgatgggcacggcgctcggcggctggaagatcatcaagacgatgggccacaagatcttcaagctggagcccgtgcacggtttcgccaccgagacctccgcggcagccgtcatctgtggggcgtcgcttttcggtgcgcccgtcagcaccacccacaccatcaccgcctgcatcttcggcgtcggctcgaccaagcggctctccgccgtccgctggggcgtggccgggaacctcgtcattgcatggattctcaccatccccgcctccgccttcatcgccgccatcgccttttggagcatgaagattggggggatagtgtagagagcagaagattggagggggagggagggcctttcttcagaaaggccctc

SEQ ID NO: 7195 - DNA, 111678 bp, Unknown
  gut microbiota DNA sequence
ggggaaaactttttatagaaagttttcccctcccttcccccagacccccatccctcctctttcaaagatttttgattttatcgaatccctgtccgttattttggcggcaagagggcttgtcttcttaggggctgaatcaatctctggtcgggcatccagcaaaaagggcagtcgtggaataccgaatacgagagttcgggagggaggagaggcttggcggtcgtcttcgttcttcccttcttcgtttttgatgataatgggatgtttttaacgccaaaagatacaagaaaggccggaacctcttcgtgttggagagattccggccttcattggaccacgttgggcagcaaattttttcaatggtggagcaaacagctctcgaccgcaattcagtctccgaccccgatctgccacgtaacgcattgaaaacaaagggcttcacataggaagtcgagtcgtgccccaagttccctccggggaagcaacttttctctcccgatttccaagctccggacgaggatgctgggtttgcaacgggagcggataccaagaaaagcatcccaacgaatcttattcgattccgaaaatgggaatcgaattggcctacctgcccggcagttccgtgccgcgactcatgatctcgatatagcccgcgtagctgaacaggcggttgcgtttctgagcagttagttccttgacgatgccgagctgctccaggtggccgagcgccttgttgaccgtggccggggtgatgccggtcttttccaccaacgagcccgaggtagcgatgggatgctccatcagcgcccggtgaacctgcagggtggatgccgccgctcgtccgaggccgctgatcttgtcgcggtcctggttcgacaggttgaggagcagctgcgccgtttccacagcctgggtggcggtgacgatgaccgcctcggcgaagaaatcgagccaggcttcccagtcaccggtcatgcgcacgttgttgagcagctcgtagtaatactggcggtgcgtcttgaagtagagactgaggtagagcatcggctcccgcagcaccttctgttcacacagcagcagcgcgatcagcagacgccccagacggccgttaccgtcgagaaatgggtggatcgtctcgaactgcacatgggccagcgccgccttgagcaacaccggggtcggctccggctggtcatggaggaagagctccagcttgctcatgcactccagtacctcttcggccggaggcggaacgaaagccgcattgcccggccgggtgccgccgatccagttctggctgcgacgaaattcccccggggtctgattgctgccacgccctttggtcagcagcacgccatgaatctcgcggaacagccgcagcgacagtggcagcccttcctccagcagacgcagaccatggtcgagggccgcaacatagttactgacttcccgcacgtcatccagcgggacgccgggctcctgatccagctcgaacagcagcaaatccgacagggacgactgggttccctcgatcatggaggagagtaccgcttccttacggacgtacatgtagaggaacagcgaggtgtccggcagcagggtcgagacgctgtccagccgcccgagcgccagcagcgcctgatcgaacttgctgcgcagctccggcgtccagtcgatgggtggacgtggcggcagcggcgcgggcacgaaggcctgggccttctcacccaccgtcgatatggtcacgtatctgccttggagttctcgcttcatcctgcctgcctcgaacctaaaataaggctcgtctttattttattttcactgtacatcctaaaataaataaacgggaaggaaaaatcaagcggatttcctgaacggccacttcgatttcctcagacgagcgttcgacgctgcaacacatctgctaagcggaaaaaaattacaaccacggctccgatttttcgattgccggaaatctcctgccatcaaagggtttctggccgttggccggaatgggcattctccgggggtgggaagtacagtttcaaccccatttccttttcggggtcactttcggacctgcgttttctctgtcccaccgaaaaatcctcgaactcgtcttgaaccactcttgaagctcaacccattgaaaaatctgggtttcgatgcgaggcggctttggcggaaggtcggaaacgcgggaaatccgggtgaataatttttgcggatttgaggtgagtccgatttgcgttagctctcagaccggcaaaatcggagggaacgacgacctaccacaaaacagtctcaaagcccgcgttcctcgtaactccttgataataaactccgaagtcatctcgcacaaccatttcccgacaatccgaccagagaaacgattttctcccctgatttccctgcaccggacgagggtggcgggttgcagtaaaaacggatacctggggcttttcatcaacaacttcgaatccggttttcggacgccggttcagttcccaaaacgggaatcgaattgatcctgacatcatcccttcggcggacacggatcgttcccgtggctgtccttgttctggatcttcccgtccttgccgtggatgtagaactcggtgccttggttctggctgatcttacgcccggcatcgacggcatcctgcttcttgtcgaagtggccgctgctgcgggtcgcgccgtctttcttgacgtcccagccgccgtcggcgttgggtacgacatgatgtgatcctggtttctttggcatggtcgcctcatatttcatggtttctgttgatatgagttgcaccaaccgttctccgctacgattgcatcagcatccgctcctcagcatggtcaacgcgccactccttgcttcggtcatcggtcaggatcacggtgaaaacggacctaccaatcgaagcagaacggccgtcttcagaatagtcatcaatcccgaagtgggcagagagagacgccgtaaccacagcgccaggtggtgccagttgcccggcgtttcggaggagtgttctctgacacatactggcaagagtccggttcctctcaatgtcgaattccgatggttcgattcgcagttccaggaggtcaattgccaccgtcagcaactggtgctgatacgccagccaggcataatgctgggccgaacaggcaaacatatgagcgatgccgctggcgaagctcttgatatgcttgcggcccaattttttctgctcgaatggtgtatctgccgttaccattgatcaatcctcgcgctttgactcaaccagacaggttcactccggctgccaggcgcaatctgcccagtgcgcttcgtagcgtttcacaaagtctttcatctcccggatgttggcggcaggttcgcggcaagcccgggcgcaggtggaaacaacatcccggtagaaccgaacggccacgcccgatgacgatgcaataacaaaagtcccgatcaacccgctgccgtcgtcaccggatcgggccaacccggccatcgcccttgaagattggagtcacatccatcggccagcaggtcgctggatgttgattcttgactttcggcatgttaggcataatattatgcaaagtcttgcaagaatttcctcgagcgaggccgcgtgacgtcggaacttgtgggggtggtatgacagcgcgccagcaggcgatcttcacactcgacgagttggctgcctacttgaaagtcggcaagcggacgctttaccggctcgcctcgcacggggagattccggccttcaaggtcggcgggacgtggcggtttcgtcaaagtgaaatcgatcgatggatcaatgatcagatccaagcaggcagaaagaaggaggtgatacgcacagatgagcagccaaagtcagtggaacactccgtgtcgtctgggcgcgctgtccgtcgccgcaggcaaacggagtgagcgagagtcttcaatttttcttctggaggtgtgacatggacattgatttcaagaaattggctccctggaactggttcaagaaggagcaggaagaacaacagagcactgcctcgctgccggtgcagcgcaatgacctgccggtggcgggtgggcccgtcagtcccatcctgcaattgcatcgcgagatcgaccgcctctttgacgatgcatttcgaggcttcggctttccggcgctggccatgccgcgatggccgtcggactggccgggcctgctgaagccggcacttgacatccaggaaaccgacaagctgtataagatttctttggaggttcccggcgtcgaggaaaaggacatccagatcacgctcgacaacgacgtgctgctggtgcgcggtgaaaagcgtcaggagcaggaaacgaaagacggcggtttccaccgggtggagcgctcctacggcagctttcagcgcgctctgaacctgccggccgatgccaaccaggacacgatcaaggccgctttcaagaacggcgtgctcacgatcacgatggaaaagcgcgaggccagtgcgcccaagcagggccgctcgatcccgatcaacggctgacgctggtcggctcgcttttctcaaaaccacaaaaggatgagccgccgtgatcggcggcgtctcatcaaatcaatctttacaggagcatcagcatggccagaaaacaatgccaggtctgcggccagcccgccacggtgcgggtggaagccaatctcaatggtcgccacagcaccatgctgttgtgtgacgatcactatcgccaactggtgcgccagcaaaagcgcaccgtctcaccgctggaagccttgttcggctcgcgcagcgggctgttcgaagacttccttggcagcgacttcttccgcatcggtgacgacgcaccgtccatggcggccgataccgacgaggtcgtcgatgcctcgttcggcgaacccgccccggccggtacgggcaccgcgcgccgtcgcggcagtgggctcgccagccgtatcagcgaacagtccgaggccctgttgcaggaagccgcccgacacgctgcagagttcgggcgcgccgaagtcgataccgaacacctgctgctggcgctatccgacagcgacgtggtcaagaccatcctggggcagttcaagatcaaggtcgatgacctcaagcgacagatcgaatccgaagccaagcgcggcgagaagccgttcgagggcgaaatcggcgtgtcgccccgggtcaaggacgcgctcagccgcgctttcgtggcatccaacgaactcagccactcctatgtcggcccggagcatttcctgatcgggctggccgaggaaggcgaaggcttggcagccaacctgctgcgccgttacggcctcacgccgcaagcgctgcgccagcaggtgagcaaggtggtcggcaagggggccgaggatggccgcgccgagacgccgaccaacacgcccgagctggataaatactcgcgcgacctcaccaagatggcgcgcgagggcaaactcgatccggtcatcggccgtgcgcaggagatcgagaccaccatcgaggtgctggcccggcgcaagaaaaacaacccggtgttgatcggtgagcccggcgtcggcaagaccgccattgtcgaaggactggcgcagcggatggtcgccggcgaagtgcccgagacgctgcgcgacaagcgtctggtcgaactcaacatcaacgccatggtggcaggcgccaagtaccgcggcgagttcgaggagcgcgtgcagaaggtgctcaaggaagtgaccgagcaccagggcgagctgattctcttcatcgacgaggtgcacgccatcgtcggtgcaggccagggtggcggcgaaggcgggctggacgtggccaacgtgtttaagccgatgatggcgcgcggcgaactgaacctgatcggcgccaccacgctcaacgagtatcagaagtacatcgaaaaggatgccgcgctggagcgccgcttccagccggtgatggtgcccgagccgacggtagcgcagaccatgatgatcctgcgcggcctgcgcgacaccttcgaggcgcaccacaaggtcagcatcaccgaggatgcgatcatcgccgccgccgagttgtcggaccgctacatcaccgcgcgctttttgcctgacaaggccatcgacctgctcgaccaggcggccgcacgcgtgaagctgtcggccacggcccgcccggtggcggtgcaagagctggagtccgaactgcaccagctgcggcgtgagcaggactatgtggcctcgcgcaagcagtacgacaaggccgccgagctgggcaagcgcatcgaggccaaggagactgaactcaagaagctcgtcgaggaatgggaacgcgagcgcgcctcgggcagcgccgaagtcaaggccgagcatgtcgcgcagatcgtctcgcgcctgaccggcattccggtcaacgagctgacggtggaagaacgcgagaagctgctgcatctggaacagcggctgcatgagcgcctggtaggacaggacgaagcagtacgtgccgtggccgatgccgtgcggttgtcgcgggcggggctgcgcgagggcagcaagccggttgctactttcctgttcctcggaccgaccggcgtgggcaagaccgaactcgccaaggcgctggccgagtcgatctatggcgatgaaggtgcgctgctgcgcatcgacatgtccgagtacggtgaacgccataccgtggcacgcctggtgggcgcgcctccgggctatgtgggctatgacgagggcggccagctcaccgagaaagtgcggcgcaaaccctacagcgtgttgctgctggacgagatcgagaaggctcaccccgacgtctacaacatcctgctgcaggtgttcgacgacgggcggctcaccgacggcaagggccgggtggtggatttcaccaataccatcatcatcgccacctcgaacttgggctcggacatcatccagcgtcggctgaaggcccgtggcgccgccggcgaggaatacgagaagaccaagtccgaggtgatggacgtgctgcgcggacacttccgccccgagttcctcaaccgcatcgacgagatcatcgtcttccatgcgctgggcaaggaggagatccgccatatcgtcggcctgcagctcgatcgtgtggcccgcaacgccgccagccagggcgtgacgctgaccttcgatcagaccttgatcgatcacttcgcggaggaaggctacaagcccgagttcggcgcgcgtgagctcaagcggctgatccgcagcgagctggagacggcactggcgcgcgagatgctcggtggtggcatcggcaagggcgatcacgccaacgcccgctgggatgacaaggccgaacgggtggtcttcgagcgccaggagccgcccgcgaagccggtcgagcctgaaaagcccgatgccgcgaacgtggccgaggcaccgcctagcgacgagagcaagcctgcgcgcaagaagaagccggcgggcggcgaatcttgagtcatgaggaggctgtcgtgtccgaccccaacgggctgacatgggcagccaccctcgtgtcgctggcggtcgctatccccatagcggggcacgcggtcatctacaagcgtgaccctcgatcggccacgctgtgggtactgctgatcgccttgttgccgctgggcggttcgctgctgtatgggctgttcggcatcaaccgttaccagcggcgggcgcggcggctcttcccgggggcagatcctgctgttcggcaggacctctcgcccacgatgcccgagcccgtatcgccgccgcttgccggcctggcgtacctggtgggacgcgccaccggccagtcgctgaccagcggcaaccgcatcgagccgctcatcgatggcgagcaggcctacccggccatgctcgccgccatcgaatcggcgcggcacagcgtcgcgctggcttcgtacatcttcgacggccaaggcatcggggcgcagttcgtcgatgcgctgcgccgggctcatgagcgcggcgtgcaagtgcgggtgctgatcgacgacgtctatgcccgctggaggccccgcagcgcctaccgcgccttgcaacgcgccggcgttccggcggcgacgttcaacccgacgttgattcccgcgcgcctgcatggcgcgcatctgcgcaatcaccgcaagctgctggtgatcgatggcgagacgggtttcaccggcggcatgaacatcttcagcccgtattggcggcccgatgcgccggagcaggcctgtcacgatttgcactttcgtctgcgcgggccggtggttgcgcatctgattcggtgcttcaccgacgattggtgcgataccacgggcgagcggctcaacgagggtttctggggcgaaccgcccgcaacggctgatgagcaaggaacctcttgggcgcgcggcatcgaggccggtcccgatgaggccctggacaggatgcgctggaccttcatgggcgctttgagcgcggcgaagcattcggtgcgcatctggacaccttacttcgtgcccgatcagccgatgatcgcggcgctgagcacggccgcgttgcgcggcgtgcgcgtcgaggtgctgacgcctgcgaacggagaccatcccacggtgcaatgggcggcgcgcgcccactactggcaggtgcttgagcacggtgtgcgcatcttcgaacggccgggcccgttcgaccacagcaagctgatgctgatagacggccagtggtgctgcctgggttcggccaattgggatgcacgcagcctgcgcctgaacttcgagttcaatgtggaggtgtacgacaccgcgttgtctacgcggctgtcatccctttttgatgccgcccgtgatgcggcggacgagatatcggcgatggcgttgcgcgcccgcccgctggccatccgcttgcgcgacggggtggcccgtctgttcactcccattctctagcgacacgacttgcgaggaacattgcccatggaaaagaaagatcaatggaacattggctactggatcgtcgccggcctgttgctgctgacgctgcagaactactggcaggcggccaagaccgtcgagcccgtgccctacagcgaattcgagaaggcgctggccgaggggcgcgtcgccgaagtgctggtgtcggaccgcacggtcaccgggcgcctgaagtcgccggacagccggggcaagaccaccatcgtggccacccgcgtcgaacccgacctggccgagcagctgtcgaaatacgatgtgtcctacgcgcgagtggtggaaagcacctggctgcgtgatgtgctctcctggattctgccggccgtggccttcttcggcgtctggttcttcctgttccgccgcttcgccgagaagcagggcatgggtggtttcctgagcatcggcaagagtcgcgccaaggtgttcatggagaagaacaccggcgtcacctttgccgatgtcgcgggtgtcgatgaggccaaggccgagctggtcgaaatcgtcgacttcctgaagaacccgcaggattacggccgcctcggcgcgcgcatcccgaaaggtgtgttgctggttggcccgcccggcacgggcaagaccctgctggccaaggccgtggcgggcgaggccggggtaccgttcttctctatctccggctcggagttcgtcgagatgtttgtcggcgtgggcgcggcgcgggtgcgcgacctgttcgagcaggcgcgcgggcaggcgccggccatcatcttcatcgatgaactcgacgcgctgggccgtgcacgcggcgtcggcgggcccatcggcggccacgacgagcgtgagcagacgctcaaccagctgctcaccgagatggacggcttcgacagctcggtggggctgatcatcctcgccgccaccaaccgccccgaaatcctcgaccaggcgctgctgcgcgccggccgcttcgaccgccaggtgctggtggaccggcccgacaagaagggacggctggacatcctgaaagtccacgtcaagaaggtgacgctggctcaggatatcgatctcgaacaggtggctgcgctgaccacgggcttttcgggtgcagacctcgcgaacctggtcaacgaggccgcgctggccgcgacccggcgcaaagcgtccgccgtggagttgcaggatttcaccgccgccatcgagcgcatcgtggcgggcctggagaagaagaaccgattactcaatcccaaggagcgggaaaccgtggcctatcacgagatgggccatgcgctggtggcgctggcgctgcccggcaccgaccccgtgcacaagatctcgatcatcccgcgcggcatcggcgcgctgggctacaccttgcagcgccccaccgaagaccgcttcctgatgacgcgtaccgatctcgagcacaagatcgccgtactgctgggcgggcgtgccgccgaaaagctggtgttcggcgagttgtctaccggggcggcggacgatctggcgcgagccaccgacatcgcccgcgacatgatcacccgctttggcatggacgaaggactgggctacatcgccttcgaggcgcagcggccacgctttctcgatacaccggaactggcccacggcggctgccgggtggccgaatcgacccaggcgcgcatcgatcaggccatccgcgacatcgtgatgggcgtgttcgagcgcgcctaccggatcctcgacaccaaccgcgcggtgctggagcgttgtgcgcgcgaactgctggcgcgggaaacgctcgacgagaacgacatccttcaattgacccaaggacttgttcttgatagaaacgaaaagtagtaggcgctgttcagagtgaaccggcggctctgttcggtgcgtcatccaattcgccggcattgttcaaggagaaccgatatgtctgcattgactccgtgggaccccttccgggaactggatgaattgcaaaaccgcctggcgacgatgttcggacggacaccccagcgacagggcgcccgtaccggcaacgaagccatgaccacggcggactgggcaccaatggtggatatcagcgaggatgagaacgcattcctcctcaagctggatctgccggaggtccccaaggatgccgtgcgcgtcagcgcggaaaacggtgtgctcaccatcagcggcgagcgcaaactggaaaaagaggagcagggcaagaagttccaccgcatcgaacgtgcgtatggccgctttgtgcgcagctttgtcttgcctgacaacgttgatccgaccaaggtgacggcttccatgaaagacggcgtgctggaagtgcggcttgtcaaggccgagcaagccaaaccgaaacagattgaaatctcagtcaactaactttaattaggagcccaagatcatgaatatcaaacagccacaatacatcttctccgcacttgccctggcggtcgtcgtcggactgagcggaccggctctggcccaatcggcggcaggttctagcccaggtgctgcagcaccctctgccgcatccaaggcggcacagccacaggtagatgacaaggtcgcccgggaagccgcggaaaagcgcgccgaactcgcccaagatgcaatcactgcgctggccaagacccatgaggcattgatcctccttgatgcaaagaagaccaaggaggcgctcgctgcgctggaactggccagcggaaagctggaactggtattggcgcgtgacccaaaacttgctttggcgcccgtcgatgtacgcgtcatcacccacgatatccacgccaacgtggaatcggtaaagaaagcggtcaagttgtctcaggagttgttgggtgatggcgaggtgcaaaaggcccggcccatcgttgccaatctggccagcgaaatcgtgatcgaaaccgacaacctgccgatggcaacgtacccggcagcgatcaagtcggccgcacggctcatcgacagcggcaagatcgacgacgccaaggcggaactcgcccgagcactgaacacgctggtggtgacctcggtcgcctttcctctgcccgtgctacgggctgaagccgcgatggcaaaagctgaaaagctggccgagaccgacaagcgcgatgccaagcagaacgaggagctcagcgccctgctggcctacgtgcgcacggaaatcgagctggcgcagatcctgggttatggcaagaaggcggatttcaaacccatcttcgatcaggtgaagtccattgagcaaaagtcggctggtggcaaaagcggcaagggatggttcgacgagttgaagacgcgcctccaaaagctgttttgaggtgatgaaggggccgactgttcggtcggtcagtctcgcgatgttcgcagtcagccccaatagattcgcctattttcactaactcatacgaggcatatcaccatgaatgagcaaacatcgaatcccaatgcgacgaacgaaggaataaacgaacaggccgcggtaagcagccttcctgtcagtccagaggccaagcctgaagtcgtcacggaggtacagcctgaggttcagaaggaaatggactcgcaggcggcagacaaacgtaaacaagtcctcgatgaggccgtctcggccttggcgctgaccaaatcagcgctggccgcacttgacggcaaggacgctgcacgcgcattggcaacgctggccgaagtgacgggaaagctggagctgatcgttgcgcgcgaacccacgctcgccctggcccccgttgatgtgcgcaccatcgtgcacgacttgttcgccaacacggaaaccattgaggcgatgaccgacgaggcgctggatgccctcaaacatggcgaggtgcaacaggctcgccacgtgctggctttgctggccagtgaaatcgtgatcacggtcaccaacatccctttggcgtcctatcccgcagccgtgaaggcagtcgtgccgctgatcgataagggcaagatcgaagaagccaaagccgcgctgcaggcagcgctcagcacgttggtcgagacgcgcagcgtgcatccgctgcccgccctgcgcgccaggctgctcctgaagcgcgccgagaccttggtagaagatggtcagcggagcgaagcgtccaatgagcgcctggagacattattgaacgaagcgcggcagcagttggaaatggcagaactgctgggctatggaaagaagaaggactttgagcccctgtatgctgaactcaagaaagtcaagcaaaagacggctgggggaggcggcggaaaaggctggctcgatgaaatcaaggcaaagctgtccaagttgttctgaaaccgctggagagggggcgcatagcgccccctctcttgtcccatgagcgtttgattttttattttgtatagatctttaggagatattgcatgaacacagacaccatcgctaattccaatgcggatgaccccaccaaagcactgtgttcgctgagccaaaattggtggctttttgtgctgcgcggtgtcttggcattgatttttgcagcccttgcgttctggatgccacaatcggctctgttggccatgaccatcatgttcggcgcattttccttggtcaatggcgctttcaacttggttgcagcggtgcgccatatccagaaaaaagagcgctggggctggctgctgttcagcggcattgtcggcatacttaccggcgtcgtcgtcctggttgctccttgggtcgccacgatagtcttggcttcttttttatgggctagcgtgggcttctgggcgattttcaccggtgtgctggagatatccgccgccgttcggctgcgtcaagaaatcaagggtgaaatttggcttgccttcagtggactgctctcgattgtccttggcgctatcgtcttgtggatatttttttcccgtccggtcgagtcattcctggccgcaggctggctgttgggcttctatgcggcagtctatggtgtcacgcttttgttcttgagttggcgtcttcgcaaaacgcgccagggataagagcgggtcaaactaaattctatggatatgagcatcctcgattcatacctccatagaaatgacatcgaaggagtcatacatgcagatgcaatatagctctatcgacaaagagtttcatgaaccttggcagagagctttgggaaatgtgatcgagcacgccctcaagccattgctcgacaaacacactaaagattcagtgcgacttcaaatcgtccttgatcgcgacaagatcaagcggcaatttctggccagtggctatatgcacctgcccggcaaaaagactgtcagcgttactgcatcacatgacgagctgacgcccctcgcgcagatgctcgcacagtcgttgttccgtcaggacaagaagcattttgaccgactgcatgctcaggatcaaatcaagcgcaaagcacgacgcgagcgcttgcgcgagctcaaggtgcggattgccgcaaaacccgcatcagccgcccatgaggccgaggtgacccgaatgcctctactgtcgaaacttgaggctgtcgcaaggcgtgagctggcttatctgcgggccgtcggcgatctaccgcgcgattatccgacgctgcgcgacgtggtggatgaagcgattgtccaagctgaggtggaatggcaatccgtgccggaagaaaaagcggcttacttcggtcttctgaagcatctgttcgccgtcctggatcacgaagtggcaaacagccggcaatttggcgaattcgtttctctggacgcgccggtcgaagcggatgcccaggacgtcgccgaggccatggtggaagaggaagtcttcgaattttatcagcccgatgacacactcaggctggccgatatcatcgctgacagtcagcatcccgatgccgcaacgatcgcggaacaggaggagctagttgattggtcgagcgagttcgcttttgcattcgacctactgaaggacatgccgcgtttgtggcggcgcatttttctgcttatccgtgtggacgggctggatgccagcagcgtctctgaaatcctgctgattcctagtaaggaagatactgtccaaaggtggctcatgcaggccgaagcgttcatcgctgctcatttggaagaggccggagtaagcaaagacgggaacgattggctccaaggcgttgattggtcggcattgtctgtgacccgaagcgcggcagcctcactgtggtccaaggaggcgaaccatgaagaatgatcttcacctcgtctgtccgcattgccagtccatcaaccgcgtaccgactgcgaagctatcggaacatcccaactgcggccgctgccagcagcccttgttcacgggcgagcccatcgagttgaccacggcgacgttctcgcgccacgtggagcgcagcgatctgccgctgctggtcgatttctgggcgccatggtgcgggccgtgcaagatgatggcgccacagttccagcaagcggcgcaccagctcgaacccaggatccggctggcgaaggtgaataccgaggctgagccccacctggccgcgcagttcggtatccgcagcatcccgacgctcgccctgttccagggtgggcgggagatcgcccgtcaggccggcgccatgggcgcgcaggacatcgtgcgctgggtatcggcacagcttgggcgctgaccgatgcagggcctgctgggcgttacgctgagtctgctggcggcgtgcagtctggccgccgtggtgacggctgcgctcagagtgcccgccttgctgggttacctcgccgccggcgccttactgggcccctcagtcaccggcgtgatcgcgccgggagaagcgcttgattttctgtccgagctgggagtggcgctgctgctgttcatggtcgcactggaattctccctcgggcacttttggctcactcgcaagaccgtactggtggctggcagtttgcagatggtcgttgtggccgcacctctgaccctgatgctgatggggttggggcagccagctcagagcgctgcgctgctcggcgctgcggcggccatgtcttccacggcgctggtcagccggcagttggccgaccagggtgaactcaccacacgccatggccgcagcgccatcgccgtgctggtctttcaggatctggccagcgtgcccctgttggccttgctggcgatctgggcgcgcggcgagtcgccgaaggtcgagagcatgctgctcgaagtgttgggcgtgctggtgttgttcgcagcagcggcggttgcttcgcgccgtctgttgcatggcctgctgggctgggtggctcgccaaggtcatgaggaagcgttcatgctcgcctccctgtgtgtggtcgtggccgcggccgccgctgcgcacgccgtcggcgtatccgccgccctgggcgcgtttctggccggcatggtgctgggcgagagcgacgtccggcaccacatggaaaaccacctcaaaccgtttcgcgatgtgttgtcgggggtgttcttcgtgactgtcggcctgcagctggacggagcacagattctttcggcaccgctgacggtgttggcgtggctggcagtgctggtaccggtcaagatcgggctcaacaccctggccttgcgggcgacgcgcctgtccgccctcgatgcctggcgcacgggcatagcgttggggcatggcggcgagttcgccctgctgttgttgggcatggtcttgcagcagcatctgattcccccgaccgtcgtacaacccatgctggttgcgctggtgctcagcatggccttggcaccgctactgatccgccatcacgatgtacttgcccggttcttgagccgcaccggtggcgtcattcagccaccccaggctgaagaagtcgagatcgccgcgcagacggcgcgatatcgagaccatgtcatcgtttgcggcgcgggcgagcttggcctgacagtcagcgagattcttcgccacgccggcgtggcgcatctgctgctggaggcggacgcgcagaaggtcgaggccgcgcgtgccgccggcgcgccggtgttccatggcgatgccagtcggcccgataccttgctggctgccggcttgacgcatgcgcacatggtggtgctgacgttcgcccatgcccagcaagcgttgcgcatcgcccaggcgattgccgagcgccgtccggcgctgaccttgtgggtgtcatgcagaagtacgaccgcggccgatgcatttcgcgccatgcccaacgtgcgtgtgtaccagcaatcctttgccgcaggccttgggctggcggaacaggtgatgtcgacgcttggcatgtcgaccgagctgattgaaggacacatcagcgcaatgcgccgccgtctcgacagcagccgttttccagggagttcatcgtcatgaaatcaacacgccttaacccatttcaggtcttccgtgaccaatgggccatcatgagtttatacgagcgcttcgagcaggtcgtcgccttcgttctgtcggcggtaattgccgtcatcatcgtggtgtcgctgttccagctcatcgccatcgtcttcacgctgctggtcctcgatgccttcaatcccctggatcacaaggtattccagagtgtgttcggcatgatcatgacgctcttgatcgcgatggagttcaagcattccattgttcgcgtggcgctgcgtcgggacagcatcatccaggtcaagaccgtgatcctcatcggcctgatcgcgctggcgcgcaagttcgtgatcctcgacctcgaggcgagccctggcaagatcgccgcgcttgcaggcgccacgctggcgcttggtgccacttactggctgctgcgcgagcgcgacgaccgcgccgccgagacatctgagcatgacccgtcatcatcccagtgacccgcgcgcggcgttgttgcaacaccgctggctcaaccgcctgcagaccgggctgttggtcctgaccctggtcgggatcgcagccgccgcaggaagcctgctgttcggggaaagcggcctgtggctcgcgctgtttgccgttgcaggcacgctgctgctggaaccggcagccgcatctgccttgaccttgcgcctataccgcgcccgggcgctgcacccgcacgaagccccggaaatttgggccctgttgcacgagctgtccgtccgtgccggtttgcccgcaacgccggtgccgcactacgtgcccagtgccgtcgtcaacgccttcgccaccggatcgaagcaggaggcatcgatcgccctcaccgatggcctgctgcgccgcctgagcccacgcgagctggcgggtgtgctcgcgcacgagatcgcgcacatcgccaatgaggatctgcgcgtcatggggctggcggattccgtcagtcgcctcacgcgcctactggcccttatgggacagatcgcgatcctgctgagcctgcccgcgctgctggttggcgcggcggaggtctattggcctggtttattgttattggccgcatcgccccagctggccctgctcgcacagctcggcttgtctcgcgtgcgtgagttcgacgctgaccgcctcgcggtggaactgaccggcgacccgcaagggctggcgtccgcgctggcgaagatcgagcgggtcagtcgctcctggcgtgcctggctgtggccgggatggggcaatcccgagccctcctggttgcgcacgcatccggccacgcaagagcgcatctcacgcctgctgacgttggcgcccaggccagcatcagcgttgccgtttcacgagatccattccttgccggaatccgctgtgacgctgcgccccccgcgctggcgcccgagtggactgtggcgctgattgccctcaacaggagacttctcatggcctaccccgacccgtacgcgcgcccgccacaggaccactttatccgtcgctggctcttcatcaccgcctgcattgccgcgctcatgctgctgtggcagtttctgcccgccatcgaggcctggttcagtccgcgcgaggcggcagaacgcaccgtgacggcgcgtggcgatctggcggcggacgagaaggccaccatcgaactgttcgaaaaatcgcgcgcctcggtggtgtatatcaccaccgcacagctggtacgagacgtctggacgcgcaatgtcttctccgtgccgcgcggcaccggctcgggcttcatctgggacgacgccggccacgttgtcaccaacttccacgtcatccagggtgcgtccgaagccaccgtcaaactcgccgacggccgcgactaccaagccgcgctggtgggggcaagccccgcgcacgacatcgctgtgctcaagatcggcgtcggtttcaagcgcccgcctgccgtgccgatcggcaccagcgccgacctcaaggtgggtcaaaaggtctttgccatcggcaaccccttcggcctggactggacgctcaccaccggtatcgtctccgcgctcgaccgctcgttacccggagaagcgggcggcccggccatcgatcacctgatccagaccgacgccgccatcaaccctggcaactccggtgggccgctgctcgattcggcaggaaggctcatcggcatcaacacggcgatctatagcccctccggcgcctcggccgggattggtttcgccgtgccggtggacaccgtcatgcgcgtagtcccgcaactcatcaagaccggtaagtacatccgtccggcgctgggcattcaggtggacgaacagctcaatcagcgcctgctggcgctgactggaagcaagggcgtgttcgtgctgcgtgttacccctggttcggcagcgcacaaggccggcctcgcgggtgtcgaagtcacgccgcaaggcatcgtgcccggcgaccgcatcatcggtgttgatggcaaggcgacggacgatgtggctaagctgctcgcgcggctagacgacaggaaggtcggcgatgtggtggtcttgtcagtggaacgggccggcaaaacgcgcgaagtgcgtgtggagctgcaaccggggatttgattgaatcgacccggtctatcaggcggcgcggagcaggcaagtggcctcagcctcccgccgcgtgacaagccccggcagcaccctgccgccgccatagacccagcgccgcagctcagtcgcggcagcggcccagtcccgctggttcacccgccgccgcagcgtcgaggtctgcaagcgaccgccgccgagattgaatgtgaagtccacgatggccgccagccgcccttcgggttcggaggccaacaccgggcagtagcgcagtgtggcggccagcgccgtgctcaggtcgcgggcgagataggcttccgcttcgtcctcggtgatcggcgggtgctgggcatcgcagaggtggccgaagccaatcgtccagaagcctgccgggcagatgtacggatacgcgcggcccggatcggttttcggaacgcggcggaagacctcgaagcgcttggccagatcgatggccgattgcggcacctcgatcacggccgcacccgatcgaacacgcgacccaaaaaccagaagttcagcaccccggcccacagcgcctggtcggcctcttcgacgcgcttgaaatgccttgtgcagttcttgccggttccgaccagatactcctgggcaaagagcctccaagtggggctttcggcaccgtcaaggtcatccgctgcgatcttctgtgtgtgcttgagatcgggcaggtcatgatcccgttgccgtgcgtgcccgcgctgatagtggtgcgcttgccgcaagagcagtgcagcagcttgcgttcaatcggcaattcgtggactgcatgacagtccttgcagaatacccactgcagtcccttctctttggagtaggccagttgaaaatggggatggagctctacatcgctctggcaattcgagcactgcttcacctggacccagaaatgatgaagaacatcccgttcgacaccgtccaccatagtccgatgcaacggcataatgagttgggcgatctcattgcagatctgctcgatttccggatagtgatcctccattcgggaggcggccaattcaaatcgggtaataaaggtcgcgaccgggtcgatatcaaaaccaatcacccgggcgttgcagcgcatggactccaccaaacttgtcccgccgccgatgaagggatcgagaacgacagcgccatgcacggaggtctttccgagataggtatcccaaaaggcgtcggccttgtcagggggaagggtcagcgcggtgatgatcgaacggaactgagagcccacccggcgtgcaaaccagcggtggacccggtacaaaggattcgagctctgaccttcacgcagggcaagctcggcgatttgggcaatgggaatgtcgcccgcctccagcagggtacgggcaggccaaccgccaaaggtgtcacctctgcggttttcaatgatctgctttgcctgacctgttttagccatagagccccattactatcccttctcagtagtactgccggatatatccgaacgccttgtcgaacagatcctggtccttgacctggtacttcacgtaaatcactttgcgcagggccttctggacctcgcgctctccggccttggtgttttgccagccgggaaaccggaccaggcgcacgatctcgtcgatgtctgtcacgatccgctcgatcaccatcggcgtcttgccgttcttcacctcggcgaacagttcggtcagggccgctttggccttggcctgttcatcgaccgggtccacctgcttctcggcctggacgacctccctggccagggtcagcagctccttgaggaaatcgaggctgtggagcaggccctgttcgtgccgctccttgagcttttcgaggcgttcgcccaaggcgacgaacttcggattgtccttgtgcttgcgcaggcgggcgatgagcttgatctcgatttccttggatttcttgtccgggtccttggcatcgagcaacccttcgaggacctcggcgtccatcaccagggtgtccaggtcgtcgcgtaccgtctccagatgcacgttctcatgcaccagctcgatggtcttggcccccagggcgtgccagagcagcttgccgttgccgctcggcggcttcaccgactcatagacctgggtcagccacttgtagtccttttcataaaggccgagacagggatctggagacagcgcctcccacagacgggagagcaccgagtattccgccgcgaacttgtcccgggtctcgttatccggcagacagtcctgtgccgcgatcaacccctcgtagccgccaacggttcggtccacaccggggaagaacgccaggcatctcgccaccacgccgggcagctctttcttgaggtcatccagattggtgatgaccttctgcactgccttttcatcgaaatcgagggccgtggccacgtcatcgaagatgccgaggtaatccacgatcaggccgtgggtcttgccgggataaacacggttggtgcggcagatggcctgcagcaggttgtgatccttcatcggcttgtcgaggtacatcacctgcagaatcggcgcatcgaaaccggtcagcagcttggaagtgacgatcaggaacttaagcgggtcgttcggatcgcggaagcggtcgaggagcttttcctcctcgtccttggccaatttccattccgcgtactcgtcggacttaccgccctgggtgtgcatgacgatggcgctggcctccgggccgaccaactcgtccatggccttcttgtagagtacgcagcattcacggtcgaaggtcaccacctgggccttgaagccgttcggctccaccttctcctggaagtgcttgacgatgtgctggcagatggcgttcacccgtgccggggccttgatcagcaccgccatcttggcggcccgcttggccaggtcgtcacgatctagctcgctcagctcatcggtcatctgagagtaggcttcgtcgatggcgtccttgttgatgtgcagcttcacgtccaccgcctcgaagtgcagcggcagtgtggccttgtcccgaatcgagtcctggaacgagtaacggctcatatagccctgctcatcctcgtccgcgccgaaggcccagaaggtgttgcggtcccgcttgttgatcggcgtgccggtcaggccaaagagaaaggcattgggcagcgcgtcgcgcatcttgcgccccagatcgccttcctgggtgcggtgcgcctcgtccaccatcacgatgatgttcgagcgctcgttcaggcggccgtccgcctcgccgaacttatgaatggtggtgatgatgatcttgcgggtatcggccgccagcaggccttgcagttcctgccgggtggcggctccgatcatgttcggaatatcggcggcgttgaaggtggcggtgatctgggtgtccagatcgatgcggtccaccacgatcatcaccgtggggttgccgagcttgcggtgcatccgcagcttctgcgccgcgaacaccatcagcagcgacttgcccgaaccctggaaatgccagatcagacccttcttgggatagcccttggccacgcgggcgaccatcaggttcgcgccttcgtactgctgatagcggcagatgatcttgatgcgccggtgcttcttatcggtggcgaacagggtgaaattctgcaggatgtccagcaccacatgggggcgcagcatggagcggatggagcgctgcacgtccgccagcgtcccctcggccttgttgtctccctcgtgccacggtccccagatatcgatgggcatgcgcaccgagccgtagcgatagcacttgccctcggtggcaaaggaaaggacgttgggcacgaacatctgcggcacgctctgttcgtagccgttgtgaatgtcgctggccccgtccacccaggtcaccgccgggcgcaccggcgtcttggcctcgccgaccaccagcgggatgccgttgaccagcatgatgatgtcgaagcggcggccgccttccttgaccgggtagacccactgattggttaccacgtaatcgttgttgctgagattctcgaagtcgatcaggcgcaccggcgtatgttcgccacgctcgccgaagggcatggacttctcgccccgcagccattcggcaaacaactcgttggcccgcaccaggccttcgctctgtaccgacagcggaatggtccgcaggcggtagagcacctcgtcggcgcgttcaggctgggccttgatttccgggttcaggcggatgagggcgtcgcgcaccatcgactccaccagcacgtcggagtgctgacggggcagctcctcggcggacacgaagcgccagcctttgatctcaccgccatagctggcgagttcttcggcaaccatgttcgaagtcacgccgccacagagcgtgtcgagaaccatctgttcgaccgtgttttcttcgttaaacatgggcggctcctatcgtttcattactgaacagcgagagcatcctttgcgtcttagaaacgtgatttgctatcgcctctcgatgcttcttctgttcattgaattccgacacaatccgtttctgggtatcaaggtctggaacagggaatctgaattcagcaagggtcttcctattgatctttttcatgctgctactggttcctgatgccgtcttcatcatgtggcgtctaccccgattggaaagaagcaccagttcaagataatcaggaagcgctttttgcgtatttactggtaaacgcatcatggtgtcagggaaagaaacatctgtgcgatcttcgttaaaaatccctgcaaacccaaccagttcgaccgtattcgagcgtgaaatgagcaagtcacctttggacagggtggctccaatcatctttttggttttcgcgaccggctttagatttcctcggacatacccgttggcggaaagagcggctaaggacaatacccagtggccggtttcatcggatgatggtggggctgagcaaccgctttccgggctgccggaaagaacatctggtagcgacaattcagaacaattcagcgtgttgagagtgtgctcaagacgaatttgagcagcgatatgaatatggttaagggcttcttggtaggccgatacagcctcatccgtcgcccacaggatctcggcaatacgcttctgttcatcaagcggcggcagcgggaattcaaagtccttcaatgccgtccaactggttcggggtgacagcgatccggccgaggtatcgagtgcatgatcaaagaaggcatcgctctggcagataaatggcagaagctccggcagtagaacctttctattcttaggctcgaacgtcaggatgtccccggagcaaatgccttcaaactcggcataggcgaccttgcgttgataggcccggcgcttgccgaagagagtctggcccggtacgaatttgcgggtaaacgaggtgccatctgcgacggaattccagcgacggatatgcaggttctcggggtcgatgtgttcgagcccgactattctttcaatgtcattagcctcgggatcacgctccacaagattggcgttcttcaccacctcgccgaacttgaccatcttccagccgggcttcagggattgctcactcatttgccacctcccgtcacccctgcatcctcaagtacctcaaagaggccgtccatcgactcccgcaaagccatcgagctttcctgccagttcgcaatggcctgcttgaggctgactgtttcggtcgagccgttgccattgccgtttccgttgtccgcccgcacgtagagcgggatactgaggttgctggctttctcccggatctcgtcattgccgaccacccgggcaaagccgtcctcgtcaccgaaagcctggtaagcatcgacaatgcgctggatgtggtcgtcggtgaggaagctctgtgcccgctcgcgggtcacctcgttcagcgcgttgatgaagagcaccttgttcctgcgctccttgggcttgttcatccggcagataacgacgcaggcttccatgggcgagttgtaaaagagattgggaccgagtcccagcacacactccaccacgtcgtgggcgaccagcttctcgcgcatggccagttcttcattgcggaagaggacgccatgcggaaacaggatggcgcagcggccgctcttggccttcatgctcttgatgatgtgctgccagaaggcatagtcagcgcggccctggggcggagtaccgtagatgttccggccccacggatcggcggaccaggcatcgcggtcccactgcttgatggagtacggcggattggccaggaccacatcgaactgcatgagccggtcgccttcgacaaaggcggggttggccagggtatcgccccggacgatgcgaaagtcctcgatgccgtgcaggaacaggttcatccgaccgatggccgaggtgagcaggttgcgctcctggccgaacagccgtaggttccgccactccttgttctgccgtttcagatgggcgacggcggagagcagcatgcccgctgacccgctggtggggtcatagatcgactcgcccggtttgggttcgagcatctcggtcatcagatgtaccacggtgcggttggtatagaactccgcagcggtgtggccggaatcgtcggcgaatttcttgatcagaaactcgtagcccacgcccagctcatcctccgggcagttggagagcgaaagcgtctgcgagctgaaatgctcgatcagctcgcgcagcatgcggtccggcaggcggtccttgttggtccactgggcatcgccgaagaccccgtacagggtgtcggggttggccgtctcaatggcccgcaaggcatcctgaatggccttgcccacgttcttgaccttggtgcgggtagccttccagtgagcgtcttccgggatctggaatcggtgctgctcgggaagcgcggcgtattcctgatcgccgccggattcctccagcgcatcggccagttcctcgtcgtacacgtcgcacaggcgcttgtagaacagcagcgggaagatgaactgcttgtagtccccggcgtcgatgtaaccgcgcagcaaggtggccgcgccccagaggtaggattccagctccgattgggaaatgtgtttgcttttcttcatcgcgctaccacttcccattcagaaatgtccgttgcaatatcaacgtcatccagggagtcccagtcgtaatcgccggtcgcctgcatgtaaacgtcatcggcggccgccatggccgagtgataggagccgagcaggtcatccttgaaccatagcccccaacgaccgttggcttgcggtttgatgaggaagaggccgatgggtgatttgtactggtagactttcacagcagaccctcccggagcagcagccccttcaggcgatcctcggccgcataggctgcctgcagcgattccttgagattggcgatggcctgatcgatggtcatggattcttcctcgatcaccggctccacgtagcgggggatgttcaggttgaaatcgttctcgcggatctcgtcgagcgtgaccacccggcagattccttccacatcctgatagccctcgtaccagcgatggatgttgtccacgtgttccggcagcagctcgttctgggcgcggccggtcttgaactccttggaggcgtcgatgaacagcaccttctgacggtgcgccttgggcttgctgtcgcggaagaccaggacgcagggtgcgagaccggtgccgtagaaaatgttctggccgaggccgatcaccgcttcgagcatgtccatctccagtagcttgcggcggatttccccctccttggacatgcggaacagcacgccatggggaagcaccacggccatgcggccggtcttgcgggccatggacttgatcatgtgctgaacccaggcgaagtcgccggacttggctggcggcagcccggcaaagttgcggccgtaggggtcgttgatccagacatcgtccccccacttttccagggagaagggaggattggcgatgacgcagtcaaaggtggcgaggctgtcgcctgaataaaaggcgggcaagcgcagggtgtcgccgcgttcgatatggaaatcttccgcgccgtggagaaagaggttcatccgggcgatggaggatgtggtcaggttcttttcctggccatagagcttgcccagcatgaggttctcgtcgccgccatgctctttgacatggtgcagcgcttcgaggagcatgccgccggtcccgcaggccgggtcatagatggtttccccggccttgggcgcaaggatgcgaaccatcagcgcgaccacggatcgtggggtatagaattcaccggccttcttgttggtcaggtcggcaaattttttgatcaggtattcataggcctggccgagaatgtccgccttgcagtgttcattgcccaggttgagcgacgagaagtgttcgatcagatccttgagcagcgcatccgaaaggcggtctttattggtccactgggcgtcgccgaagatgccgtgcagggtgtccgggttggcctgctcgatgcagcgcatggccttctggagcgcatggccgatattggcgctcttggcccggacatctttccagtggcagccctccggaacctggaaccggtggttctcggggaattgggcaaattccacgtcgccgtcggactcttccagtgccacggcatactcctcgtcatagacgtcggagagccgcttgaagaacagcagcgggaagatgtaagtcttgaagtcggccgcgtcgacaggaccacgcaggatattggccgcctcccagagatgcccggagagggtcccgatatccagatcgactgaattgttatttccgttcttcctgctcattcagcttgatcctgtctgctcttgtccgccgcgccgccagccttcacccactcgtcaacctcgtctttcttgaacttccaaagacggcccatgcgatgggcgggcatcgcatgcttgtcgatccagcggtaaacggtgtcactgctgacaccgaggtacttgcctatctcgtctactgataaccagcggtcttccatctcggccatttctctagctcctcatgggcgattggttttcttgccacgccagaggcggtaacggggatgctaggcgcagcttccccaacttaaaacatcctctaatatatttaggcaggggccgattgtcaaacgctttcgtcaggataaggccgcaaacgtcggctcacggacgtaaccactggccgctggcgactctctccgcgtatggagggcatggcatccaataggtccaggctggaatcgaggtgcgcccgcacagcaccgccaccatcacccgctggtacatgctgtgcccgccgggccggaatccttccagccggtcgatgggcggcaggtcacgctgcgggtcggtgaaggtcaccagctctccatggatcagatcccagtcgccggtcgggcgaccgaagcgcggtgtgccgatctcctgctgcctgtgggcatcggccagtggatcggcggtgcccctggccaggatcagtccctccggcacttcgagggccggaaaaccggcgtgaagatgataaagtctgccccagaccacggctggttcgatgctgcgggcctgggcgcagaagcgttgatggttccagtagccccgtttcagggtgccgtaaacgaagagccggaggatggtctcgggagtgtcttccgggtttgtgttcagcttcgcggtgtctccaatgttcatgcattcactccttcgggcagtgtccctttgcgttcctgggggatgaagcggaattcgctgttttcgattacccgcacatcctcgtggcgaacggtgagcatggtcatgggcggcacctccagctcgcgccagcccttctcgttgtccacggcaaagtcgataaaggcgggctccgaggcgtaaagcaccacccggtgctggcggtggatgcgcaggcaaagcggcttgttacccttgagcacggtgatggtgccggggtcgagctttgatgccagcacggcgctcatctggccgcgacagtgggcgagcgccttcttcagaccctcctggtcgatggggccttcgggcgcgaagcggtcggccaggcggaagatcagctcgctgtccacctctgcgtagcgcggcagcccgagtcggcggaacagataatcggcgttgtagatggtgccgttgtgggtgccgatgacgatcccggcccggatgggatggttgttgcggttgttgaattcgttgccccgggtgcgccagcgggtgtggcccatgaggatggtggtctcgttgtctacctgcccgagcagctcctggaacggcttctcgtagaccagctcgtgcgcccgcatcggccgcttgaagatgcggtggctgccgtcggtcttgagccaggccagaccggaggcgtgcgggccgcgctcctcgctgtgcagcagcatgcggatgaaggcctcgcgcaggtaatcccgctcgtcggaccgtctgcgcttgcggccgaagacgatgcctacttgtccgcacatggagccgggtcctccttgccgccgaagttcttgccgagcggtctcgtcccctcaaggacgaaggccgcgtattcgcgccggtggtccgccagccactcggccacctccgggtaacccatctcggcggtcagccgggtcacctccgggtggtcgagcatgttggtgcgcccggagagccgcaccgtctccagggcttcgaggaagcgttccggccaggggtcgctggccttgtcgtcgggcagaaactcgatcaggccgtgccgcgccagacgggtgagaaattcggcggccgcagcggcggcgtcctccggcaatggctgggtcggcccgccttcgatgccggagagcacctcggtcatgtagtcccggggcgctcggctggcggtaaacggtgtctggccgcgcatcagctcgaccacctcaaggcagtcggcggcctggatggtttccccgctgccggggatcggttcgccgtccaacgtggtggagcggatcagaatcttcatggggcacctccttaaacagtgaggccgggaacttgcccggcctcgttggtgagagtggtggtttcggtttcgtccgaaaggacgtcctccggtttggggcgtccgttcttgaaggcggcgtcgccgggcatgttggccatcagatgcttgcgggcggtcttgaactcatcgccgatcaggccgaggtggagcaggaagacccggaagtcgtacttggcgctctgaggatcgaaatctcgcttgcggctggaagcggcccggccattgagcgccttggcggcgacggcgaggcagaactgcaggtaggccttgatccgccccgcgtggagggtcgcctcgaaccagcggaactccaccgtgccccggtaccagacgttgtgcaggttgaccccgtggtagcggctgttgtcgtagtgctggggctggcggttgtggtagccgtaccagatgcggttgagctggtccttggtgcgggggcgatgctgttcgatgcgctggatcagctcgtcgctgaccggccgggtgtagcggttgagacggtcgcggctgatgccgagggcgtggaggatcagcggctcctgcttgtagatgatcttggccaggttacccaggtgtctgccgtcgaagggcgcggcgtcgatatggatgtgaatgccgcactggctgttgatcttgcctccggcgcggcggatggcccggaccacctcctgcagttgcgggatgtcgtcgtagccgagcaccgggctgaccacctcggcccgcagatgggccgggacgctggtcagggaggcgtcccccaccaccttccagacgcggccgcgcaggtcctcgacctcccaggggtcatagctgctggggatgccgacatggcggaccgtgccgcccaccaccgagtggatggcccaggcgatctgttcccgggtgcgttttacggtctcgatctcgatcccgtagtggatctctttcaggttcatgcgtgcctccgtcgttcatggcgcttctaagtcgttgtcaggcaaggctttttagcctctgcttacaccatgaatgaatgcttctttccggacacaaatcaagtagaagaacagccgatgccgacatttaacacgtttattttcaatgacatgcgaacttggccggattgggcgacgcacaggcggcagaaaccccggaacgggctggccgtatccggggtttctgggttggcggtggcagtgagccggatcagccggaggcggtatcagaggtgatcaggctggcgtgcagttcgaggttgcgtgactcgtcggcccgcatccgcgccagcagcgccgtgaaggcctccgcttcgtcggccgggagctttgatgcccgttccagccgcgccaggcgctggtgcagattttccagcaggcccagggcgtggtcgcggattaggccgtcgcgcttctcctgcggcgatggaatgaactcggtcaggccgcctttgcgtcgaacgatcatggccgtgcctccttagctcagggtcgcgcccagtgaatggatgcgcgggtagatcagcggcgtgccggtcatctcggccttgtagcggaccttgttgccggtgttgtcggtgaaggtgcgcaccagggtgtactcggtccagttctcgtcgatgggccgggtgtcctggatggtcatcgcctcccaggtcaagccgccgtcgttactggcgaaccattgcagggtggtgccgctggggatctgcatctgcacataggccttggtcgattccaccccttgggtcagctcgttctcgcgggtcaggtaggccccggtggtcttgttgaggtagcccaccaggttgacgtcgcggaagttgatggccggggtgtcgttggcaagcgagctgctcagacgcacgcggatctggacccgggtggcgaggttgggcagccgttcctcctcggcgggaaccatggcgtcccaggtcacaccaccgtcggtggagtattcccagtcgaggccggtgccctgggggatggccgagtattcgtcgaggttgatgtcggagaactgcacgccggtgatcggctggaagcggatcatcccctcggactggaagttgtagccgtagatcttcatcgccaggtcggagccgttgagcggcgtccaggtctcggcgttggagctctccagcagcacgccctccatgtaggtctggcgggtgatgatgccccagcggcccatcttaccgagagtggcggtgcgcaccttgtaattggtgctgttggtcagcagcaccacggcgtagctggtgttggcctcggcgtagaacgggtcgtcgaagcgaatgcgggtctcgccgctcaggctgatctcgttcggggccagcaccttctcggcgaacaccacgccgttgggcagaccggtggtgacgccgcgaatctgcaccgtgaccgggatgctcgggtccctggcggtaaactgcagcccgatgctggagatcacttggttccgggtgaagctgaaggtctgggccagcgggtcacggggcacgaagatggtctgggtgcgccagaccacctgcaccacgggtacgcggatgatgcggttctcgatgatgcgctcgatgcgggtaatgaccagcggatcgttgatctgcaggctggcccgggccgaatagacgccgtcggccatctccacgatacggttgccgttgcgggcgttggtcgggatggtgaaggaggcgctgactcgaccggcctcgtcgctgattaggttgctggccatcacctgtccgtcgcagcgcagcacgatgccggacttgctcggggtgaagttgatgccggtgacggcgatcccggtctggccgcgccgcccgaggttgggcgtgatctgcagcatggccgggggcttgtcgaacacggcgtaggggttgatgttgcgctcctcggaccagtcgttctgctcaaccagcacggtctcgttgcccggcaacagcgccagactgccgaagaagctcgcgttactgcccgcctgatcgaccgagagcaccgtggagtgcggaatgcggtccggcgcgacgaaacgggcgatctcgttgacccgggcgtcccattcggcgtgatagatgtccgactgggcggtgttcgagaagtcgtccgagtagatgccttttttggtctgggcgtcccggttctgcagctcgttgttcatctggtactgggcgtcgttgtacttcaggtcctcgacgtcctggatgatgtcgtggatctggtccatggtgatgcgggtcaggccgaagttgcggatctccatgtcggtggaattgggcgggcagtcgatgctgcacagccccagggcgttttccggcacgatgggcagcttcgggaaatccgccggagccccttccagccgtttgatctcggcagtggtggcgtaaacgatgtcgcggcgactgaggtaatagtcgtagtccaggctgcagttggagccgttcaccggctggtcgccgaggctgccgcgcccgaagttgatcacgttgaggttgcccagctcaagctggaccggcgacatggtaagtccggccgtgttggtggccggaggcgaagcggtgccgatctcctcgacgccgtcgtcgacataggagagcgcctcgctgcccagctccatcaggcgcttgtagtcggtgcgtgcgccgttggtggcggcccggtagacgcgatagccggtcgcgccgctgaccggcagccaggagagcttgttcatctccccggcggcggtggtccgggcaatgaccgcagcggcgttgaaggccgtctcgccggtggcgttgtaggcggtcaccagatagaaatagtttccggccgccggatggttggcctgtccgaaccagccgctgtccacatagtcgatgcccttgaccatctgcttggtgtaggtccagcgcaccgtgtaggtggtgccgatggccggttcgttgccggagccgagccagtcgacatggttgcccgactgctgccagtccacgccctcctggaagatggtcgccccctgactgacctcgaggatgtccaccacgggattgggatcgagcaggtcttcgccgccgcccaccgagccgcgagtgacgttgcgggtgatctcgacgatggcctccacctgggtcgtctccttgagtggtgtggagttgaccggatagcggcgcttgttgatgtcgaaggtcttctgctcgccgcgcaccgatttagtggcaatggatttaggcaccagggtcgaggtgggcagatcgcgctgatgccggaagccctggatgtaggcgcgtccggcattggtgatcgcctccacgctgtcgtcatcgaccccgccgataaaggtgtcgaagccccgcaccagatagcttccggcctgatcgaaggtgcgctcggccaggttctgaatcagtgagttgagaccctcggcggcggcgaaggagagctggtcctccgtgatcgaggagacggtgatccggctgcccggcagcgtgcccagcagatcccgcaggtagaggttggacttctcctgcaccgtgggcgtgacatcgccgctctcgcggtcgaacttgtagatcgggatcacccggcgctcggtgacgttgttgggtagcgtctggccgctggtatccgtcgccttgagagagagaacccatttttcccgttcggcggtgggctcaccggtggccggattgatcagggccgggtcctgggtgtagccgtagttgtacttcagcagctccacatagacgtaatcggccccgctggtggtggccggatcataggtcagggtcgcgccgctcacctgttccagatggccgtcgatgtagaccacgcccggggccagggtcaggacgttggcggccgcgctgacctcgaggcccatgatgatggagccttccttgaacaggatgtcggcgatcttgcgccgctccaggttgatgatgtcctgctgctcgttgagttcggaatccagcaggtcgcgatcctgatggtaacggatgcgcttgtagttcttggtcgggtcgaatgtctcgcgtgagatgctcatgtttgaatcctccagttagatcttgatgatcccgaccagctccacgcgggtgtcggaaatcttgttgaagtcgggaatgttcttcacctcatacaggtagcccgggcgcagcacctcgccggtcgggttggtgtcctgatggaacacgccgcccatggcgagatccccggtgacgctttgcacgtactgcacgtcgccgccgaagaagccgtattcgcggatggtgatgccgttggcctcggcctcgtcaaagcggaagaagacaccgatggtgttggtctcctcgccggtttcgaggtagcgcacgccgttgaccaggagcgccccttcggcgtcctccttgaggaaggtccgcttgtagtagcgcttgcgggcgcgttcgtttctgagcccggtctggccgatgtccggcgcgggcggattctgcgggtcggtaaagctggcatccccgtcgccgatggcgcagtgggtgatgccgtccacggcctggccgaggaggagtttggccgtcagtatccggccggttttgacgatgagtcccagtgccattgctgttctcctttaggtctgaatttcgtggtcttgatcgatgagcaccgcgaacatgatctggcgcgtgtcggccagcagcccggccgggatcgcgatgcgctgaacggtgtcggatcggctgatgtgtgcgccggacacagtcattcgggtgtccgcctttccgtcggtcctgtgagtgatcacagccacgacatcgccgaagaacccaatctgctcatgaatggcttgcctggtcggcagtaagcgttcgaaatcgcagcagacaatgagttgggtctccgcccggagcgtgatgacgcgaataactcggatgtttgcgtccaggtcctttgaccaaggccgggccaccctcgcggaaatgtcgatatcaaccgtgatgtcagccatctatgcgcctcaaagaatcgggttttccgtgccggtcaggcgcagcttgatgtcgagtttgttttgcaccggggtgcccgggagcacggtgcagcgccgccagaaagagagcgtctgctggaatgccttgtcgccgaggttgagcggtgcgccctgggtggcggtgtcgagttccgcctgggtcagggccaggcggtaccagaccgattcgtcggtgccggtttcgtcgatgggatcgagcaccagcccggtgtagtcgtagccggaatagacggtcgtcccgacgtcgtgcacggccggagcggtgttggcaacgccccgctgcacggtgagattggcggtccccccaccgctttcgatcagcatctgttcgccgtcgatgatgatgagttcgccgttggcaaagcgcggttcggccagggcgatggcggtctgcgccgcgtcgatgaccgaggggaggctcgtctgctcgttggcgacgtagatttgccgatccttgatgtcgccgtcggtgccgttgtagctctcggcctcggggcggctgaaatccccctcggaaatctgctgggtcagcgcttcgtcaagatagagatgtatcgccatgggttctccttcaggtgggccactgggtggcgcgatagttgttggtggcggccgcgaacccggcctgcgtcggtgcgtgcagatcctgctgacggaacagccaacggtaggacggccgcgaccagtggaatccggcctggttgaggcgcatgcgactgacgcgcatggggcgggtccgatccacggagagacgcaggccggtggtgttgagcggactcgcgcccagcttcatggtctccacccgatggcgctggagagagcccgtgtccacgtagacttcaagcgaggcccgttcgccggtcagattcgcattgctcagatgccgggtgttcagggtgttcgcgttgagccggaacacaggccctctccgccgccatcggtcgatccggtccacggccagggtgacgtccgcgtcgcagccagcggtcgaggcgagcagcagattactgatgccgccctggttggcggtgagatcgagaccttcgttgagcctggcgcggccaagctggaaacagaggcggtgccgggattccaagggcaggcgcaggtcgtacttggcttccgcccgttcaaccggttccgcctgcgtgtcgaagaagaaatccttctgccggaagcagtagcgcagcgcggtctcgccatgggtcagcagcgtgcggttgagatggctctcgcccagcccgaagccgctctccagcacttccccttcgaagtcgcggccggtgtagattggcgtacagaaggaaacccgatcctcgccgacacgggtgtacggcagccgccagtcgttgagggccttgtggttcaggcgcatcctgttctggcggccgtgaaaacgggagaccttcacggcggcccggtcgatttccgggaccatttccgtggtactggtgagctgcagcagctcccaggccctctgcttgttggtcaggtgacggcaggaaccgagcgaggagcggccaaggacgaaggtctcgtcgagaaacgccagcacgatccggcgcacggcgttggcgtgcccgaagtcgagcattgcgccgccttcgatccattccaggaggaactggaaccagaaacagcgcgtgcccgccgggtggtgaaataccagagcgtcgcgcagcccctcggtctggttgagacacagcacgcgaaacacgccgaggctgaacaccagcccgggtagtttggcgctgctgagtcgggagcgggcattgagacgcagcgccgagcggaaggtttcctggagttccccctgccaaccgagcgcgtcgaagtcgcgttcgatggccggaatggtgcccttgcggcgatagatttcgaccgcctcccgcacgcggcggcgctggcagtccggcgaacaggtgccgtccacttcgaggccgaccagtctcgccagcagcggcaggaagcgctcgtcgcagtgatcgacatcgaagatggccgggaaatcgtcgatagcctgcttgagctcgtcgagcgttccggcgggaaggctcagaaaggtgcgcaggtcaccggcctcgtcgttgtgctcgtaaagcggcggcagcaggccaagcagattgtccttgaaccaatcagacatcaaccggccctccgcagatcgaggttgacggtgccgagaaccgggatttcgccgtggcgcagctcgatatcctgctgcggcgcgtagagatgcatgtggctgacgccgcgcactccgtcgatcagggcgacgaggtcggagaagtgaatggtctggccgaaggagacccggtcgaaggaaaagaaatcggtgagcgaggcttcgatgcggctgcgcacgttttccagcggttcaccgggccagacgtagacctcggcgtcgatggaaacgggccggtagatcgggtcgaacaggttgatctcgaccgtgatgaccttgcggcgttcgagaaactccgcgaggtcccgcttgagcagcgccgagggcatgccgccgccattgggggcgatggccagttggacgttgtaatagcggatgttctgacaggcattggtgtcgagcaccttggccttggcgacgccggggtagccctcggcgagggcctggtaatcctccagggtgacggccttccagagactgcgcagctccgccggtgcctgtcggcgggcgtgttcgagtgcttcccgcgaagcgccaccggtggcgggcaccgggttggtgacggtcagggagacctggcctccgtcaaggtagatcgggctcagcagttgagtgatccggttcggaccgagattgccctggtccccgatggtctgcagatagctgacggcgatggcgcttccctgagcgggtacagcgccgctttgcccgtcgccgaaaatcagggtggagatgtcgagggcgtcgagatctgccatgaaatggcggctgtcggccaggctgtcctggaagtgatcgacctcgctccaggcgtcgtcctcctccgtaacggtgatggtgccctgggcgatgacgtcgccggtcaggcggatgcgctggaatggcagccccgtcgaagtgaaggtctcggtgcggcgcacgccttgccgacctgggatgtccaccgagagtaggcctcgcgggatcaagccgtcctcgaccgtctcgaaatccgcctcgccgtcactcagcaatgcgcggcaggccgtccccgccggaatggtcagatccttgccgagcggtgcggagagccggaaacgcagcgtggtggtggaggccaccggcgaatccagccggtagccgatgagtttgcagaggttgatgacgttctggcgctggcgggccgtgggcagaaaagcctccgccgcctgggcgtccaggtaataggccagcatgtcgcccacgccgcagaacagatcgagcaggacgacgccgagatcggagtgattgaaatcggtccagcggtcggtgagctgcgggatcttcgccagcagctcctgacggatcgattcgtaatccttgttgatgtatccgatgcttgcgcggcccatggtctctccggttttcggcggttatgcaagagcgcctgatgctctcgccacgccggttacttaccggaaggggcctggatgtgtcggaggcgggatgcctcagagcgggccgcgcagttgccagacgggattgggctgcccggaggtgttgttgaggtagtgggattccttcttgccctcgaaatagaacagaccgatgcggcccggctccagggtggtgatccggtgaacggtgccagcggcgttgtcttccgcctgactctgggtgtcgaagcccagaccgctcgcggccaaatagagggcgtgctcggcctggggcgcttcggtttcgggcgctccctcgaagaccagataatggccgtggttgtcacccggatcgctgacaatccacttgccgttgcggtcctgaaaggctcccttgatgtaggcgacttcgtattccccggctggccagatcaagaagtcgttcggatcggggctcatctcggccgcgtcgaaccagagcagattgaacagcgagcgcacgtccggcgacaggcgcacgctgagaaccagcggcggttccggctcgggttccggctggggatagctgggcgcgggattgttcgggtcttctctgtagaagggatagaccaggttgccgtccacctggctctggatcacccggtaggcgatatgcaccagcagcaggttgccgtcgatgttcagcggccggtcgtcgaagcgcacctccgtgatgatcacccgcttttcccagcgcttgatggcatcgatcacgtaatggcgcagcaggcccttgagcacctcgtcgttctgttcgaacaccagatccttcagccgggagccaaactccggattcatgaaccgttcgccgatccgggtgccgaggatctgcaggatgctttcgcggatatgctcgtgctcccgcgaggtggcggtcgagacctgtgtgccgccggataccgactgaaaccggaacgggtaacgcagccccttgccgagaaagtcgtagctcatcaggtacgctcctcgcagtcgatgccgcactgtcccgagcagccattttccggtgcgccgtcgtcgacggcttctccctggaatcggaccaccagatccagaccgcttttcagacccaggttgatggtgccgtccgcctcgatcagcccgccgtggccggactggccgcactggaatcccttggctccgccggagagcaaacggacggcgatggtttcaccgatgccctcgatacggccgatgccgatgatgtcgattggcccggccggattaatcaggctgataaaccgctcccggtgatcgacgtcgagacggatgccctcgggcagatccaccgcgaagcgttccgcgcccatggcggtcggctcgatcccggcaggcagtccgctgacaccggccgcctcctgggtcgaacgcagataggactcggccagggtgtaaaggcgtcccggggcgacctcgatggccgtgccgggtccgggggtgacgacgtgctgttcccctgcgtcgataacgcagattcgctggtcatccgtggtccgcaggatcatgccgtcgggcaaggtgaagagccggttgccgtccggcagatccctgggttcggtgcccgcaggcagttcgacgaagggatagaaatcgggctccggctcgacctgtacctgatccaaatactcctgggtcttggcctgctgggcctccagataggcctgggcctggccacgcatcgcctccgaggcggcgtgaccggcctccagcagcgtgcggatgccggaaagctcctcacggatgccggacaggtgatcgcagagcgcccgtagcacatactgctgttctccggaatcggtctgttcgatggtggcctgcaagtcggcgggttcttcggaaatcatggacagcctccgttacatgccgacgttggcgggttgggattgatagctcatggcgttgaccggcgtcactgtcccggtcgtgccgtcgatttcgaagacagtccagaccgtgcccggggcgttgggaacggtgaaggtctgctcacggccatcgctcaggaataccttcaccgatgctccggactgcgccaggccggtactcggattggcgttgcggttggtgtagtcgtggaccgcgtaacggtagacgccggggatgagccgatggatggtgatggtctccggcccgtaggaactggtgtcgtccacgtccaattccgccgcctcgttttcgatggtgtgggaatagaacacatggaagcggtcgcccgatggcgtcggtccggtgagatgggaatcaagatcccgggggttgagcccccactgcaacacgatgcgggcgacctggccgtcgagttcgggcgagagaacgatctggatgtcgccggaggtgttggggtcggcgttcacccagccatgccaggcgatgtatcccggcgcggtgacctccacgtaatagaatccctcgggcacggacagctcgaacctgccataggcgttggcaaaggtctggaacgccgccgggccggtttccgagcggcggaattcgatcagcgcgttgccgacaccgctggtgttgagggcgttgaccaccatgccgctgaggaagaccgatgctccgctggcaaagtccggatggtcggcgaaccaggacggatcgcgaacctccaccagtacatgacggaggctgtcccggaccgaggatcgccagaccatgagcacggcattgccgatggtccagccgcagcgaacgacaccgtccggcccgatctccgcgacctccgggttgctggaggcaaagaccggggcgtccacgtcgccgcgcagggagagcggaacccgttgctcgaactcgccagcggagagccgaatggagcgaggctgtacctcccagtggttataggctgacgcggtatccgtcatgaaggaacctccaccggtgcggagacgccgccgccatagacctcgacctggacgtgacgcaggctgagccgctcgggcgaatcccagaccaggatcatggccgccccgggaacgaagccgcactcgacattgccgtcctcatcgacactggccacgtcgggattggacgattcgaacaccggcgcttcgggtagaccacggatcgagagcggaatgcgctggacgaatggggatcgcgagacccggatcagtttcgggaagacatcccagtattgcggttcctgcggctgttcgagattgttcatggcggccccctcagttgtcgatggtgtcgggactgccggtgacgatgatggctccgcaggcggtgatgtcgccgatgcgggcgttgggcaatccttcggtgatggtgtcgaagctgccggtcacaatgggcgtcacgccatgcccagggatgggacagacgtgcagatcacccatgcgggcgaccggcatgccgttgtccagcgtccggctcgccccggtgatgatgacgccgccgtgactgctgatgtcgccgagtcgcgcctgggagctcatggggtcaccttcagcaacagatggatcagaaagccgacgagtccgccgatggtgctgccgatggtcaatactaggccgacgatcttccacatggtctcggtccccatcttggagccgacccgggcatgcagccggtcgatctcctcggcgtgccggtgcagatcggaatagatcgagcggaccagcacctcgacgttttccttgtccgatttcttctcgatttcgcgctcgatcttctcgagacgatcctggatttcccggcggtgactttcgaggatgctgcggaattcctcccgccaatgatcgaaggtccgggccagcaattcctcgctggccgaaagtccggagggcgttgttgttctttctcccatgcgatgcttccttcaggtgttgatcaagacagtgttcgtcgagcgaatgatgatgtttccggccaccccatccatgaacacgaggctgccggacttgtcggtggcgctgatgctctcctgaccgggcgcggcgttcatgcgcaccacctgaccggccttgtcggtgagccggatctgttcggcggcggcggtggaatcgacgagaatttcctgagtgccgttgagtccccagatgtgaaccttctcccggcccttagtggtatcgatgaggatcttctgccagcgggagcggcccttgtcgcacgagaggatgtggaccttctccttgtcctgccaggcttcgaggatcacctgctggcgacagaggtcggtgagctggatgcgggcgcgggagccgacgatctgcgaggcgatgtcgagctggtcgcctttctcggcgtccttcgtgccgcgccgcagggcgttgccgctctgcatttccggcttcaccttcccttccatggtgaggatctgtccggcgcggtcgatgatccgcagcagctcgtcgccgtcgcggtcatcggccaggatggtgtggccggtttcggtcttgagcaggaccttcaggcgcgggcagtaatacggcggatggccgtggtacttcttgtgttcgagatcgtcatgccggttggcctgatgctcgaccttgtcctcgcagtcatggcagaaggcattcgcgcaggtgcgcttggattcctcgggctgctcgccgggattgctcctggccaaccagaccccggtccagatcggatactggacgacgccgccctcgaactcggcccagaccgaggcaccttcctcggggaccaggaacatgccggtatcgtcgttgccgccgtaggggaaacagggagcggcccattcggaccagttctcccgcccgctgccgagcacggcggggatctccagccggacccggccaaggcgttcggggtcgttgttgtcgcgcacgaaggcccggtacttgccgtaccagcggttgcggtagcgctcctcggattgacggtcgcgggtttcaagcatgctccgtctcccgttttcgactggtgtcccaggccagccagccgcccaggcgaaccgcccaatacatgacctgccttttccacagaggcacgcccagggccgccatcagttcgagaaagacgcggtcggcagcaagccgcgagaccttgccggtgtggtagaggcagtcgtgaacgacggccgccggggaatatctcccccagggcggcaccacgcgccaaaacaggcgcggcaccgaggcgaagtcggtctcgaacccggcgggcacttcgatgatgcggccagcgccggtacggacatggaacggttgagtcagcctggcggtcattccattgggaagtatctccacccgaagcggcccggagagacccagcgcggtgccggaaaacagggtcttggttttggtgctcatgaccgccacctcgccttgcccgaccggcgcacgtcgagatgaacccaggaggcatagacgccgatgccgccctcgcggaagagagggatctcctcggcgatgaccgccagttcctcgggccaaacgcctgcgggacagctcacgtcggccgccatgcccagcgtatggaaactctgctccgcgccacccaccgccttgttgtgccggttgcaacggaagccgctggtgatggacagcggtttgccgatgcggtcacgcaacgcctgcagggcgtcgaccaggtcaggatggatagcagccgaatggccgcagcagttcttgcccttgcaggcgaattccgaacggttgaaattcttactgagatcacccattgccgcctccttgcgtgaccgcgccggaatccgcgtcgatggtcaccatggctggcggctcgttttgcggcgtgggcggggcctccttgtcgttgggtttgccctgggactcggcggacttgtcgcccgcgcccttgccgagggcgttcttcttgagtttgagttcgcagagatagccagcgccgctgatgctgtggcgcaccgagtggcagtaatagatgccggaaaacttccgtcccacgcccttgatctcgacgttcttcttggcgcgtagctggggaatgccgatggtggccgcatccgcctcgacctggcgcagctcggcctcgcggaatttgccttcggcgctgtcctgggcgggctcctggcgcggctcttcgtgaaagccttcggaacggtcgaagctcggcacgatctgccccgtctcctgttccttgaagctgccttcgccggtgttgccgtcgaccagataggtctgcttgcccagggccgtccgctcgggcgtggtggcgttgttggccttgtgctcgaccacgtccttcttgcgcgggtcgacgccgaccgtcttggtttcgacacccgcgcccttggctccctgggattgggtgctggggcggaacgagcgcaacaggcccttggtgtcggtgaaatattcgagggtcagaagcggcgtctggtcgagctcgcggggatggaaatggagttcgtcgtcctggatgtagaagacatagccgctcacgccgtcgccatcgcggtcacgggccttttccgccagatccttgaggaactgggcgtccgagatgttgctctgggtgacgcggagatgggtccccttggtggccgtgaccaccggggtgaggccgttggcggcggcgacttgttcggcgatttccgaatagaggatgccgggagcgggtttctgccagactttctggttctccttgcccgcgagtttgaagcccttgtcgtaggccttgatgcggatggtcggatcgccgttttccgggaagtcgtaatcgatgtccttgatgaccgccttcttgcgcggagagaggttccccacgtagccgaagcgggcaacgatctcgttgccttcctggaacagcggatcgtcgacgaactgcaggttgcggtcggtcaccgacagctcgagaacatccagctcctcctcgttgtcggtgaagacgaacgaagtgatctcctgggtgatgtccttcgagaggtcttgcccctcgatctgaatcagaaatgtcggtttgaaggtatccagatccatgcgtttctccggcggttcgcagttccctgcttacttaccggaaggcatggcgaggtgtcggacgcttcagtcgagcaggcgcatctggacgtgttcgcgggagggaatgcgcagcgccagacccggctcgagcgccaacgggaaaaagatgtcgttgtaatcacagatgatccaccagagccgggcgtcacccagatagcggtgcgcgagcaaatccagacggttgccctcgactacggtgtgcaggcggtcgtcgtgtctaggggtggtgtcgatgcgctggcgcatgccgacggaggtgccgtcgctgtcccggtagagaatgctgtgggcgtagcgggaatcacggccgatcatgaacgtacctccgaccagttgatggaacgatccacatattcctcgaggacgatgtccacctcggcccgttgcggcagcaggttgtcccggtcgaacaggccgaagaaacgcgccttcacctgccggacgatgcaggtcacgcccgggtagagatcgccgaaaatcagcagcacacggtgcggcgcgttcttgagcatggttccggcgtgttccggatattgcagcgagcggagccagtcgaccttctgtttcaccggccccttgaacagctcgaccttgaaggcgatccggcgcggttccccggcgacgtattggtagcgcgggtggctcatgccggggatcttgatcgtcgcgtagtcggtcgacttctcgtcgctgatggagttggggttgtactggaattcgagccgctcccccgtgtcggcgtccaccagatatcccttgatgggctgttgatcccaggccattgcttacacctcggcgatctcgaggatcggcttgcccagttgtccggcccggtcgagttcccgccgcatgccgttggaaatgccgttgccggtgaacgcccacacctcgtcgcaacattccatgtaggccaggccgcaggcgatgcccgtctcccgctgctcgggaacgctgtcgtcggtgaaggtcggatacagcagatgcggcgcgaacggcgcgtgaccgcttctcatgacccgacggcaaagcgcctcggcgaccctgacgtttcgggctatgtcgcccgcgaacgggctgcagacaaagatacgtttcatcggtcctctcacagggtttcgtagtttctgatcttccgctcccgcaggtccttgtagacggcctcggccaccttccggccatcgatgttggtggtcacgctcagttccaccgatcggtcggccaagccattgaggcgcgagagcagcgattccagcagttcgcgcagccccggatcggcttcctctccgcgcatgggtgtcgcgggagcggtgcgagccggagcgatcaaccgctcggaaggcaccgtctcggcgagtcccgattgcaggggcttcgctatcggagtcggcgcggttgtcttgggccgctcgatcccggctggagccagagaggcatctccgttttccagtgccggttccaccgcgaacggctggatatagctcttacttaccggctcgacggccgccgcgacggtctgcacgatgccgttcatcggttgcggagtcggcgcggcagtggccatgaccggctggagcatcagcatggcgctcagggccttgggcaccaggcgctcgtccagacgcggcacgagactcagcacgctttcgatgatgcgttgcccaatcgattcagcgggctgcgcagctccgagtgtttgcttctgctcggccacctgcggaatcggggtctgaactcccagcatggcgcgagcggaggagagcaaaccgttggcgatcccggcgcttctatccttgatcgcctgaatgcccgcgctcgcgccgctggaaagcctctgccagagggtttgcccctcggcaccggcgttggtaaagattcgaccgacagcgccgggcacggccgatagcgtgtcaacgatccggtcgcggacagtgacggctcccgtggccagcgcatcccaggcattgacctggggcggcgtgattgccagctcaggcgtgtcgccaaacagggattgtttgagaccgccgaagatggcaccggccttggccgcgacgctttgagccccggaggtcagaccgtcccagagttttccggccatgcggaagggagctgatgcggcgtccatgaggtttccgcccgccgatttgatctgctgccaggctcccgcagcggccgagagaatcccgcgagcggcgaagccgaacactttcgcgggcagcgactgggtaaggctcatgccgtcggcgagggtcttgagcagtgcggaaccggaggcggtcaggctggcgagcggtccctcgcgggcatcggagaacggcagcagattgcgcagcttgcccagggcgttcttgagcatggtgaagggataggtcaccgccgaccagatcccttcgccaagggtgatcagcagctttttgcccgcctcgaagaaggtggtgtccccggcgaagaaggagcgcacggtggcaaacagctcccgcagggtgctgatgatcggcagattcagaatcgcctggccgatctgtccggcggcgtcggccaccacgcgtccgatggaggtgaagatgccggaaatgaaattccagaccccgaccaccacatcccgcgcccagcggaacggggtggcgagaaaatcgtagaccgcgccgccaatggccttgagtccgtccagtagggagatgtcgccggtcagtacttgccagaccgcatagacgatcttcccggcggccacgaatgcctcgccgatcatgcgcacgggcagcaggaacttgtagatgaacttggtcgctccgatcagggacccgacgatgattttgccgacccagaccacgctgcgcaccaccaccgccagagctcggacgatgagcgacaggttccaggccacgatcttcagggcgaatgccagcccctgcagaagcacaccggcgacggtgccgataaccgtgccgaagttacgccaggacaacccgtcggtggcgctggcggccacgccgaagatttccaccactgaaaagaccgcgctggccagtgccgcataggcgctcatcagggtgcggacggttggttcgaggatggcgcggatgcggccaaaggcatgagaaaaagcgccccacaatccggccagggcctcacgaacgcggtaataggccttgaagacggtgaccacgaagcccagcagtccggcggattcgagcttttgggccagttcggccgacatctgcccaacgccgccgctgagcgaacccaccagctctctgatcccccggaacaccagcgagaccttgttccaggccccggtgatgatctcctgaatgccgccgaagttggtttcccaggcgcgtttgagcagatacaccgagaggatcacgcccgcgatgatcgcggtgacgggcagaaaataggtcgcgaccgccgaacccaccccggccagcgcggcgctgatggccacgaacccggccttgatggcgggcagcatgagtcccaccatgcctacggcggcggtgacggctccggccacgaccagaatggtgccgagggccatggataatccaaggaccacccgggtcacgcccggcatcgatttggccatgcgctgcaggaacagaatgaagcgggagaccccgttgatcaccggcgtgaccaccggcagtagagtgcggcccaggatttcgctgagattggccatctgctggcgcagaagcaggaaccgggctccgatgtcctggttcatggcgtcggccatctgttcggtgaccgccgtgcctgtcttcatggcccggcctactgactggatattgccttcgaggctctccatgcccgccgacatctgcagcaggaacttgaccgcctcgtcggagccgaaggccttcttcagcttcacctgggcggcggcgttggagaggtcggggaactggcgtttgatctcctgcaggatggggaccacgcccttgagacggccgctggtgtcggtgaaggacagccccagctcgtccccggcctcggccgccttcatgatgaacgccttgtacagcgtgcccgcctcggagccgggcatggtggtctggagctggccaagcacggcgagctgctcgttcaggggaatgttgctcgccgcagccaccgcgccgatgttcttgatggcgtcggccatctgggtgccgttggtcttgaacgaggccacggtctgcgccatggctccggaaaaggcggtcgcccattccatgtcgttcatgtcggccataatgggcttgaagatcccgtaggccgtggtgaaggtgccgaccatctcctgggtggtggccttggtcgccttggcggtcatggcggccatggaggtgaagacgcccaccgcctcgtcgctgaggctggacagggccgatttcacatcgtaggtggcggtgatgaaggcggccttgtcggcaccggaccattggttggtgaaggattcggcggcgtcctcgatggcacggaggtcctgcacgcccaaggacgccagctctcccagggccttctgggtcgcggcggtagaggcgaccaaggcggcgggcatggccatcagggccagtcccgcccccaacatcatggtgccttgctgaatgcggtccaggttgcgggtcatccgctcgctggcatccgccacggtggaatcgaggtccatcatggagccacggatgcgctgcgcgttctgcgagaacgcatccttcatcgataccactatgcccagtccgagatcaccgttcatctatcgccgttccgtttgctcacgttcaaaatcaagctgccgctcgagggcctcgacgaactgacgccggaccctgagcggcagcgagcgggtttccgaccagccccagtgcagtccgccgtaagcgagaaagaatgcgtcgcttacaagcgaactcctgggaacaaaaaagccggttcggcctccagacgggtgcggatcttggtgccgcagccatcgcattcagtttcgaccgaggtgtcgattcccgcgtcgacccgcgacatctcctgccgcagcgcgttgcggtcgcgcatcgacatttccgtcaggctcttcttggagggagccttgccgtcgatgtcgaggatgcggatgagcatggccgaactgatattgggctcgcgcaggctgcccaggcgcttttccttgtggccgtcgagatatccgaagcggacggatttcttcgagccgggcagcttgaaggtgaactcgcgctcttcgccgtagggggtgaccttgagatcctcgagattgatggtcacgaagttggcaatgcggcaggcgctgttcgggcagttcagctccagttcaacctcctcaccgagggaaatctggcgcaggcggaccagggcgaacagccggtcaccagagagcatattcatcacctcggaaagatcgggggcggtcttctcgcccagccggacgaaacagttgcggagcacctggttgatcgcctctccggagcggattaggcgctggttggtgagcagttcttcctcagccccggtcatttcccggagctcgagttcagtgccgcttggcagttcaaagctgtacatggtcgtcctccggtttaggtccagtattggaagcagatggtgagcttctcgatggtgttctcggtgttgccgccttcgagctcatcgtattcaagcgccttcacccaggccccgtgcagggtccagcggcgggtctcgttgccggtgcggtcgtagcggacaacgtcgatgtcgcgcatgtagtcggccggaaggccgccggtgacggcgttcacgtccacctgtttcttgatccattcgcgggcagcctcatcggagccgtcctgaagtgcgcctttctcgagggtgatgtcctcgaacttgacccggcccgccaccttctggtcgaacatcgaaccggccggggcgaaggccacttcctcgaattcggttttgggctcctgtcccttatggaacagggccacgtcgaagccgtttacctcgatggcgaactgccagttctggtaaaggctcttgggcatgtttccgcttctcatagccgtgttctcccgttagatgatttctttgaagtccgcgccggtgctggtcaggatgaagttcagctcgatgaactccgccgtcttggtcggcttgacgaacacgcgggccaccatttcgttgcggtcgatgaccgccggggtattggtctcctcgtcgcactggaaggcgaagtcgtagaggccacccttgtccttgatgtcctgcaggaagggattgatcaggcggccgagggcacgccaggtctggggatggttcggctcgaacaccacgaagcgggaggattccgagatggcttcctccatgtacatcatcagacggcggacgttgatgcggtccacggccgatggctggctctgcagtgtcttctgcccccagatgttgatgccggtgtcggggaacacggcgatgacgttgaccccttccggatagagcacatcgcgctcgccacggctggttttgtaggccagggagagcgtgttgaagatgcggccacggtcgataccggcgggcgcgttccacacgttggtcttctggtcgctgcgggcgatgcagccagccaccgcgccgcagggcggcaccagcttcttgcgcgagttgaccggatcgctgatctccagccaggggtaatagagcgccgcgtaggaggagttgaaggccgcgtggctgtacatcccttgtcccttgcggaagtcgaccgcttcgagcggctccagatgcatgggcgtgtcggcgatgaacagcagatccttgcgtccttcggcataggtgattccagcgttgatgaccggcaccgtggtgacgccggggaccatcagcaggttcagggcgtcgatctcgtcaaagccatagaggccggtatgctgcgagggatcgccgatgaaatcggcatcggccagattggtcagcccgttgtcgccgccggtgagcgtgaacacgcccaatgccggacggtcgccgggcgttcccgacgcggcggccagatcctggaccaggatgaaatccgaacgctcgttgatcgccagctccacatggttgggcagcgtctcgtccatgctcagatccttgaacacctcgaccacatcgcctttatgccggaccaccaggttgaaatggttggccgggtcgagggagccgtcctcaatggagacggagagccggtcgccccagacgccttcgttcacggcctcgatccgcagggcgtcggcgggcgtcgcctcccggttctgcagcacgatggaagatttgagcgccgtcagggtgtcccggtcggtgagatgggcgatgcgggtgacgtagaggaccgagccgccgttgtcgaaaaacgcccgggcggcgtaggccagatagctctcgttgatataagagccgaaacggttgatgaactgctcccagctcgtcaccagcacgggcttgttgatcgggcctttttcggccaccccgaccatggcggccgacgaggtcgagatctgcttcacatagaaactgaagtccgtttcccgggtgtaaatcccgggggatagataggtcggcatgattatttcctccgcttgctggtggtcttggcctcatcggttgcggcgtcatcggttgccgtgggcttttccggttccggttccacgccaccggtcaggtcggtgatgcgcaccaggccgcgttttccggcagtcttgatctcggcggagaggtccttgcgggcgatgctcttgcgttctcgcggcccgaggtgaagggttccctggccggagaggttgaacgtcaggggttggaactgcaggtttctgatctcgatcacggttgttctcctttacggttgaatggttcgttgctctgtcacgtcgccgtgaaactggaaggtccggtcccggatcagccgaccgtcgcgcaggtcgccgtcgtacaccgggcaggattcgatgcgaatgcgtccggagctttgccggaggttggagaggttcacccgggccaggccgcccagaggaaccagttcggtaaggttcaggctgccctggtcggcgatggcgatctccgggtaaagctggaggaaccgcgacaccgattcgtgaaaaccgagcagttcggcctcccggtccacggtcaccaccaggtcgaaatcgaggtgatagagacggggaaaccggcactcctcgaaagtcagctccgcgacattcttctcgaacaggcgaccctggctgcggcggaaacggtcttccgtcagcttcggcccctggaggatgacgctgggggtacgctggacctcgaacaggtcatccgggaacaccagcacggtgtccgggtggatggcctgcttggccaggcggatcagtgtttctgtgacggtctgtatcgtgctcaagggacgcctccgttttctgtctggttacttaccggaagcgctggcgatgtgtcggaggctcaaagcgcggagcggatcgcctcgcgatagttctggaggatctgctcgcggtacttctccatcaccggatgcagaaagggtctggcggggatgatgatggtcgcgccgttcggatgtttgatggtgaccccgtactccatgacggcaccgatgttcaccatgtcttccccgtccttgttgacggtgccgcgcagcaggccgacgaacgccttgtcggccatgatcttctgggtgatggcgttgacgagaaagccggtgtcgatgagcgccttgctggagcctttgcgctcgatggtgcttgcggcgagtttcacgaaggcctgtccacccggggtctgggagcgaatcccccgctggatctcgcgcaccagaaaaagggcgttgcggatcgtggcctgacgcagggctgtggccaggcgcggccccatgccggtggtcagcttggcgcgggccttgtcccagtcaccggtccgcctaacgcccattgagcttcaccagttgcaggttcttgtgggtgacggtgccgaagaagtgttcttcttccacactctgtatgcgataggtttccctgtctgcggccaggcggtcttcaccccggacgtcggcatccggaaggacacaggcgagcgcatcgatcttgccgctcagctcctccggcggggtttcgtttagttcgagggggatgacggagatttccgtgtattcggcatcgtcggtgccgtagagccgctcgccgggaaccacgcgcaggacgcgtgcagtctggcccgaggagaggatcagccgggcgacgtcggccacggcttcggcgcgttcccggtcattcaacaacatcgagatcgatcccttgttcgtagatgaccggcgtaaggccgctcggagtcaggatgtaggcttcctggtcgagctgggtggccggacgcagctcggtgagacgttgccggtagtcggcgagcagatcggcctcgagcttggcccagtggccgggctggccggttttgtccacccgcttgtcgccgctggaaaaggagaaggcgttggcggtggccgaacgcatgacctggcaggcgtggatctgcgccatgatcaccaggagctcgcgaacctcgccggtgggatcgggggtaatctctccggccgtgatcgtcagcgattggtcgaggtcgcggctcacccggaaaacggccttccggacgcatctctccagtgtctggtcctcgaagagagatgcgcccggatcggacaggtcgagccgcaggtcggcgatcaggtcactcagcaacaccttgcagaccctccagacggctcttgagcgcgtcgatcaccgtgcggcgtttctcggtgtccatgtagcctttgagggtctccggattggcttcctcgttgaccctggagatggcgtcggtggcggagagcttgctcaggtccaccggttccgtgtcctggtctggctctggagaggcgagcggttcctgcttcggtttgtcggccatggccaggcggccgtttttgagagccgcctggatttgcttggtgaggcgttccacctcgaccacctggccgggcttgagtttcagcccggcgtcggggatcaccagaacgccgggacggatgttcttgattcgattcatcttacgtcacctcccggattacggaaccagtttgaccttggccatgatgtcggggcgggtaatgccctggccgatctcggaccacaccagccagccggtcttgaagcgggtcttctggtcgatggactccgtcttcaggttttcgcgcaccggcatcttcccgacctcttcatccgggacgatgatgatctcgtccagcggcatggaggcggtcagcagaatgccgccggtgccgtagttcttgatgacacccttctggcgcagctcgagcttggtctggggatcgaggttccagccgcgcatgtcgttgaaccggcggccgcgcatgacgatgtacttcaccgacagctccaggtcctcgatgatcgagatggcctcgttcagcgcctcctcggtgagcaaatcgccggtgacctcgatggtgttggccgccgggatggccgaggagagcaccgagatggtgcggcgatccatctccttacggatggcgtcggcggcgctggtctggatgtccatcagcgtgccgatgttgccgttcttgaggacggaaacgtccaccatcgggttggagtggatgcggttggtggggaactcgacctcgtccttgcccacctcctgctcctgggcgtcgccgtccttgctgatccagtgggccttgacggtcggtttcttctggtagaccggacgttcgcccttgggcagcgtgtgcttggtgagcagcagcgaggagatctccttgcgcttgatctcctgttcgatgggcgcggcaatggcggcagcaagcgcccgcatgccttcgggcgactcgagagcctcgctcatgagccgcgccatggtttccatgtattcctgggaatggatcttcaactgattggttttcatgtgcgttggctccttgggttagacgagcaggcggaatttgaggacgccgctctgtacggaaatggcgtgggcgacgacgtgctctccggccgcgacgccgttggtcagacgaccgcccgctgaaactttcaggtcgtctccggcgacgacggtcccttcgaaggcgtcggtctcgtagacgccgccgtcacagtagatgccgggcatttcgccaccggcgtagtccttgatcaggatgccgaaggagcgcttggtgggatcggtgttgacggcgaacaggtcgtcgccgaccacgcggaccacctggccgagctggccgtcgccctggatgtggccgtcgccataggcgaggctgcggtgacacggattgatgaatgacatggtgtttcctccttatgcgttgatttgcgggtgttcgagagagtcctcgccgacacggttgcggtaagcggccatgaacccgtcgcgcagacggtcctcgagcgacaccttgcggtcgtccacatcgtggggccggacaccggcgtcgctgcgcagcggggtttccgtcgatgccttggcggcgggcttgccgccctggtcgctgtcggcgggtttctcttccttgtccttgtccgctttggccgatttgggcaggcgttcgtaagcggcctcggtggcggcgaaggcttcgtcggacagttcggccaggcgtttcagctcggcttcccggtcctcatcggaagcgaaggagagaccttgcttctccagccgggtgagcagcttcttggcccgggagcggcaggcggccgccttttgttcggcttccagttcctggacgcgtttctgcagctcggcgacctgggccttgagctgccggttttccttttccaggtcggtaacgcgagcgggatcgccttcctgctgggccggtttcttcttggccgcttcgacggccggttcatcggtaggtttggttttgtcttccatcgtggaatctccttcgggttgggattggtcgggctggctctgaagtgacgccacctgcagaatcctggcgttctcgtccgcgcctttgcggtcgagcagtcccagtccggtgaaagtgacgccgtgcagaatctcgaaaacgggttggccattgaaatcacggcccttgaatttgcgcaggtgagtgcagtagtcggccttgttctggaagcgcttgtggcagaccgagcattcgccctcctggtagtcgcactccatggagacctgggagatgatcccgcgcttcatcagcttgtaggccagccgggcggccggggtgtcgtggacgtacagctcaccgacgcattccacgcggccaccgttgtcgtcctccaggtagtcggcggcgacaatgccgcccacgatgtcgttgaactcctgtgaatgctgcagatcgaccttcttgttcacggccgtcatatgccgaccggacaactcctcggcggtgaagtgatcgccgttcttgttggtcccggtgcgacagagcacgaagctgaactgggggtcgcccgccgagccgacatccatggcctcggtcgcgaggagttcgccttcgcccagtcggatgtccacggggatgctggtgtggaagttcgctgcggcggccatcggaacgggtttctcctcccgctcggcgctggccttggccccgggagcgcagacgaacaatcgctctttggcgttggaagcctcgccgtgcttggaggtgatggcgtagtggtgatccttggatttcatccggctctgcttgccgaaggagccgatgatccgcttcatctcctgctcgttgggataggcgtgatcgcgataggagatcagccagtgcgggatgtgcttggcgttgccgagaaaggtctggaagaactcgctggcgttggccttggtgacggtcttgtggtcggtctcgtaatacttgaccttggtgtcggctttgatttcgagcccttcccaataggtcatgagcccctccacgaagtggtaggcccgctcgtagttggtggtcgaaaactcggtggcgtaaggcggatcgaagtaggccagatccgccttggctttcggcagcagatcgttgatgtcctgccggtatgccttgttctccttgtcgttgtcgaagaccagggcgttgatgcgctgcaggttcttgcgcaggcgatccttgaactcgtcgggagtgtcctggcggcggccataatcggtggacgacgagaagtggccgaagccacccttgccgctcatgcaggttttgccgaggccgaacagggcgatgtctttcttgaagccggagagcttgtcgcagttggcgcggatggtgtcgatcagcgcatggacgcccttggcgaagaagatgcccttgaagttgtcctgaacgaagctgcccgccttggcgttgtcggccaggagcgcctcgatctcgtcctcgctcaggcgaaccgagttgttctcgatgatcgccttggcggcgtgatggcagtagcggagccggtcgttggcgatgacctggaggcctttggtcttgtacatgtaggccacgaccgcagaccccgaaaaggcgtccagcaccgtgccagtgccttccggggtatgcttccagatccagtcgacgagcttctgcttactgccgatgtagttggtgatgtacttggggcgtttctcgggagggagctcttcaggagcggactgttcggcggcctcggtcccgagcgtgtcgggatcgagagtcagcgccgcatcggcctccagtagaaacgccagcctttccaggtctgtggcgaacagttccatcaacgtctccggtcagtttgctgtgctctccgcgacctgcggggagcattcagcggttacttaccggaagcgtcggcgatgtgtcggagggtgacggcgaatttcagcgggcggggttcagacgggtcagaacggccttgccgcaggcgtcgagggaggggtattcgtcgctctcggtgatctcggaaaagaacccgtcatagggggagcgggacagccggtggtattcgagaaaatccgccggaagcgaggtggccccggcctcgaccagacggttgaccacccaggcggcctcgtccctgcggtcggcaagcccgttcggcccccggtcgaggtagtacatctccacatccagaccgggacccggcccctgaacccagacgcccacgggcacgtattccggggcggtggcttgccggtctgcgattatcgagtcgagcatatagcgcagtttcatgaccagtcctccgcgatccgtagatgttcggctagaagctgggcgtcgatccggcggaatttttcggcgcttttctggcggtaggcgatccagcgttgccagtccgccgcgagctcgggctccgagaccggctcgatcatttcgacatggtgaatccggcccagatcgtcggtcagctcgacaatcagccagccttcggcctccttgccgtcatgttcggccatcagtgtgtcttcgacccggacatcgaccaccttgatggtgtgggcgtgctgaaagccctcgtcgtaaccgagtgccttccacaacagccagaaatcggtgcgcagatggtttccagcggtgtcgaaatggggagcgatccgggtgacggtgaagctgtccaccagggcgtccagaaagagatccccggattccctgacggtcatgcgactgccccggctgttgaaccagtgcagcgcttcctgcagccgccgtctctcctgttcgataaagtccttcatggtcattgtttgcgtttgctccagctttgcggggtatggacgatgtcctccaccttgcgcccgtcgggcagtttcttgatgccgcgccgggtgaaactttggatgatctcccgacgttcgttgtcgcttctggccacgatgaattcgatgttgtccagcagcgtcaccgagtatttgaagatggtctcgttgccatggcgctgcgagaaccgcttccagtcgtcgatgctggccccccggttgcgctgcacgtagtcgtcgatcaccttgccgtaggcgtcgtggtcgtaactgatggcgtccatgcgccgcagcatctgttttttgaaatagagggccggtgaggcatcactcgccggttgcttcttgatccgggtgaagaaatagctcgcgccgccggtctgcatgtcggccaccggggacattccgcccggagccacgcccatgcgcatcttctcgaccgtgctgaccatggctccgttgttctccatgatcaagtcaatgaagccggacatgctctcaccgttggtcagatcgtggaccagcgaatagcccttcatctgtttttccaggtcctcctcggtgatgtcgaaccggaactggtgccggtatccgcccttggcgtcgcggtccagaaagcccgcctggtattcgcccagcgggttgtacccggaaagctgggtgatgtcctggacgcccagctccttttgccaatagccgcgtagggcctgaacacgctcggtggtgctggcgttgcggtcgtcgagggatttctgcagccgtttgtaatcagcgctcttgtcggtctttcggatgtaggcgagcttttcgaggtacatctgctcggcgttttccgcagtggccacccgggtgtcgatgccaagctgttcgagcttttccagcatcgcctcgacccgtccgggggtggcgtcgccatccaggatcatttccagctcgccgcgctgggcatagaggttggtgtccgaccaggggcgatagcggacccgggtgccgtcctcgaaggtgacggtgtactggtgtccgtcctgcatgcgggagttgtgattgaacagcgtccggttgtcgatgtcgtcggcctcgacggtgatggtgccggaaccaatcctgcgcttggtgtgagtcaccttgccgcgttccaccttgaacggcggtttctccttgggtttctgcgcgtcgagcttgggtaggtactgctcgaaaacgccgttggtggcccggtcccagtcgacggattcttcgatctccttgacccatttcagatagtggtccgccatctccttgaccttggggtcggcgctcttttgcagggtctccagtttattgcgcaggcgcagggccttgtcgatcttggtccggttgtacttgccgtcgcccacgtgaaagttgacgtttttgacggcgtccagaatcgtcggaaagaagctgtcttcgaccagcggttgtcccttttccccggccgccgtctgcacatacctgcgcagcacctcgtcgatgcggcggtcggtgtccggccggatcttcatcttgaccacggtgcgcttcttccccttgaaactctcggtgaagatcagcgcgttctggtcctccacgtcgccgctgtcgaagggcagcgtcttgccttgccagccgagtttgcgggcctcctcgaccagggtctcttcggcggaggagagcagctttttcttgccggtggcggtactcagcttgtcgaaacgaaagccccgatcccccagcacatcggcgtaatagccttcgaagtctcgccggagattgtgtttccgctccaaggccagatcatagaaatgccgcagcccggctgggtccttggaaaaccgtccctccgcatagggccgcagcagatcgaggtaatcctcgtcggcgatcttttcgacttcctggatgtagcgaagggtcgcgttcggatcgacccgtaccttcccttccttggccgcccggaagaccttgttgtaaagcggctcttcctcgccgcagacgccgttggggtgatagtcgagcgagagcttgtcctggcccagaaacttgaaggcctggcctttgtcgatgccgtagacgcgaccgtcccgggcgcggatgaactgcttggagtgtccgtcgtggttggcgatcaaccagtcgaccacatgctcgcgctggatctgctccagttcgatggtggtcagatcctggggcaggatgttgcgaaaatcgaagtcgtcccgcagatcggtgcgccatttctggatggagccggtgcggccgtttaactggatggtgcgcacctcgatggaatgggggtcgatcaggcggccgattttgtaggctgcttcctctccgaaggcgatgaactcatcgtccttgcggccaatgggcttgaacagccatttgtcgccgttctcatcggtccagaactccttttcatgtgcgccgccgacagcggccttgccggatttcttgaacttcgaaggcaaacccttctgctgccacgcggtatcgacggtggcgaactccgcgcctttcttgccgatcttggcctcgggcggcttgaccgggctcggctgtggagccggtttcggcggatctttcttcggcgtggcgggcttggcaggagcggttttcttcttgccgccatgcttttcggcccatgcggcgtgcttggtttcgatgctggcctgaaccgccttgattttcgccgggtcggtctcggtgaagagcgtggtcagctcgtctttgttggcccactgccaatactgaaccttggtctccttggcgagagtcttgagctccgtcgatttcagcttgccgacctggtcctggaagagctgtttcttgagggcgatttccttgctgtgggccgccagcagatcctggggtagatcggtgccgccggaaaccacctgttccgccttggcaatcgcgtcaaggaaatccttgtagccggtcggcgtgtcgggaacgaccacggccttggcggcgtcttcgagagccgttttctgtttcaggatcaacttctgcttggcctcgtcgaccgcctttttcttgaccgactcggccatgtcggcaccggctttcttctgcagcgcctcgacgagctgctgtttgttcttgaggatgccgatgccgtgcttctgtttggccgccgcgagttccttgcccatcaggccgctgtggtccacgccaggttccagcttgtcgagcagctcgatggtctcctgtttggtcatgttgagggagatgccgttctcctttgccatctccttgagctgctgggcggtcatgccctccagcccctcggcgggagggatcttcgccatctgggcggcgagcagcttggcctgtttgagttccgcctgcttcaatcccagcagctcgaccagttcttccttggtccgcagcaggccgatcttatgttccttgagcttggcgctgagcgccgctccggccaggtcgccgtgatcgatcccgggttcggccagatcgagcagcttgatgaaatcggccttggtccgggcaatggccacgccgttctgtttcgctagggtctggagctgtttgaccgtcagcgagccgatgtcggcgatgtcgccgttttcaaaggcgctcttgagcttggcgttctccttggcctgggcgtcggccatgccttccagcacatggggcgggagaatgcaggcgtccccctgcgatgcctgggtggctgccttggcgaccatctcgctgccgcagacggtcatcggccaggccacgatatttgtgcagcggcagtgcggatgcgcgggttgctgggggagcttgtcgatgggaaaagtcttgccgtccaggccgccgcagaccgggcacatgcgctcgtcctccatggccagccattccagtttctggatgccgacccgctcgtggaacttgagcctgcccatgttgtgggcgcggaggacctcggtgcgggcgatcatctccatgcggtactgcgccttgctgaacacccggcttccggcctggcgaaaggagtccttgtcgacgatcaccttgcccatgtccctgacgatgtcgtcggcccccttgcccgtggcgacgccgttcaggatggtgcgcttgatgccgtctgcgagttctcggtggacgtcaccggcgagcgtgaggttgtactgcgccatgaagtcgagggcattggtgtcgacgatggtgaacaccttggtggccagcttgtcgatgccctcgggcttcaggtcggcgtagaacggcagcgccgcgtcggcgagctctccgattccctgctggataccgagcttgaaggagtccttggtcgtcttgcgaaagaccagggtctgctcccgcttgagccgcttcatggtgtcgtcgagttcgagctggagcttttccagccccttgagggcggcgagcttgttgtccggcagggagcccagggagcggtactggaggatggcgcgggcgacctcgtcttcggcctgtttcagggcctgggtgagttgggccgtgatctggtcgttgtagcggttgcgggccgtcaggcttttcagggtggccgcctggatgcgctgcttaagatccgacggcatcagtggggctcccggcggtcgatgaaacgacaggccggggcgtcgaaggtgcgctcgctgttgtgaacccggcagtggttggtgtcagcaatgaagtggctgcactcgtcgcacacggcagcaatgccggtggactccaggtcgcctgaccagaccaatgccgcctccgccgtgggttcatcgtcctcggccggaatcccgagcattttgcgggcgcgaggcacgctgaggatgccggagacgaccatatccaccaccggcttcacctgcttctcgtccatcaggtcgatctgcttacgttcggtctcgcggttggcggcctcgatgtccgggtccaggtccatcttgagctgaaggctggagcggctgatgagcttgcggtcgtagagttcgatgaggagcttcttgaaatcgaccgcgtcgctggggtcgaggtcgttgaagataaactggatgctcttgtcgccatggccgttcagctccatccagtcgtcgaacacccagtcgaggagcttgcgtgcggcctgtttgatctcgcggatcatgaccatcatcttctgcatgctcaccgaggcggtggcgaaattcgggccgtcgccggttaccagcgagcgtgacagacccagggccaccacgatgtcttccttcacctctttgaccttgtcctcgacgttgaggacctgaccgtcggtgccgtgggtttcgacattgacgtagaacgggaccaccaggccgcttttcatgtccatcttgttgaccatgtcgcggacctgttcgagcatccgctgatccggcatcaccatcttctggccgaacgctccgcccactttgagcaggcgaaagggcgtggcccagcgcttggcgatggcctgttcggcccggcggtagtcgcgcagcagttcgatggcttgaaaggcgggaagcacgagggagttaccccggggcgagaaggccggagcatcccatttgaggtggaccacctgttcgacgggcagcgggatggattccccgccgccgggggtgtcttcgggaaattgccgggcctcgatcagctcgccctgggcgtatttgactttgaccgaaaccgggttgacgcagaccagttcctcgatgtcctggccggacgtggtgaagcgcttgaagccgatggcgtcgcctttcaccaggagctgaagaaccatgtccttgatgaattgcgtgatgttcaaccgccaggcggcctccagtgcctgctccttgagggtctcgtcatcgctggtgattttgatctcgtcgcccacggcgaaggtgcgccaggagttgacgcagttcttcaccagcggctcctcgacgtagtattcccaggccttacgggcgcgttcttcccaggtggccggaatagcctcggcggcgttgaccttgctaaaggccgccgagtcgagcgcggccgctgcggccagcggcgcgatgacaaagccggtggtgtccaggctttcgggttgttcgtcctgatgggcggtgctttccacgtgatcctctcggtagtttcggccatgacagccgcacatccggcccgtgtgggccgaacccggcttgatgccggttacttaccggagcggggtggaaagcgtcggaggatgcgatcagatgaagaccggattggtgagcacgggtttgagcgaaaccacctcttcgccgaccgggtcgaggttaccttcttcccggatcagcatggcacagcgcaccgcgtcgatgatgtggtcgttgcccttggaatagatgatcttgccgtcccgcagggtgtaggtgtgggtggtgaactggtcttccacctccaggtcgtccgaggggaaaatgacctgcttacgctgtagggctccgttgatgaggctggtcatcagctccttggtccgcttcttgatttccttgccgtcccgcaccgccagccgggtcatgccgccgaagtcgtatcccttgagcctgccttccagctccagccccttgtacttgtccaaggtgagcagctcctgaaccacggccagaccgttgccgccgttgtccacgccgatgcccgccggggtgtagtaacgctccagcagcgcgatgatctgggcgatgtgcggataggaaacgtgttcaagatggacgcgcaggatcatcttcagtagcgtccgctcgccgatctccatctcctgaaatacgacgatctcggtggggtcgttggtgtagcccaggtcgccgccaacccagaactgcccgctgcggggcgtgaggttgagcagcatctccagccggtcgtgggccgcttcctcggtgtcgcaatcgcgcagctcggaatcggtgatgacgatcttctgatactccagcagatcctgccgacagaggttgaactgttcgacattgaaggccccataggagggcttgccgtgttcaccggccacctcgtgctgccagccggagctgtcgcggccgccgtagaactccagcagttcggcctcgcgatcctcggtccacagagggttgagccaggacggccagcggaacacatggaactggtccgacgaagtgagccggtaataggtggtgtcgcgcaggccgttgggcgtggagtagatgcgtagcgtccccccggccttgaggcactggcgcagcgccttccaggcccgttcggtcagccaggctccttcatcgacccagacgcggcccacgtgcagggaccgaaaggcgtcgccataagccccggccgggcggaaatagagcaccgaaccgttggtgaactccagccggaaatagggtttgcggtggatcttgggcttgccgtacttggtcagggcaatgctgttcatcagatcggggttggtgtcgagctggaactcgatctcctcgatgatggtatcgaggtgtccctggtgcggagccgcgatgaggccctggccgcctcgggtggtgaaggcgtaatggagcgcgtcggtcgagagcacgatggacttgcccacgtcccggccgtcgaggtggacaatgttcttggccgggcagcgcaggtcctccacctggtgcggccagtagtcgcggcctgagccatcccgattgtagaggtaggcttgcccccacaacacgggatcgctcagggtcgccgcgagtttgcgctccttgtcggttaccgccatcagtgcattcccgtcctcaaggcgttgccgaggatggtgcccaccaattccgtcaggatttgctgcacggccagggtgttcttccggtcgtggacagcttcctgaatgtcgatgatggcctggtccaactccgtccaggcccggtactgctgctgggccgcttccagacggccgagggcgttctcgatccgtcccgccgccagctcggtgccgatttcgaccagggcctcaccggcctggcgaacggcatcgctgttctcctgaagaatctctttcattggcctgcctcctggttcgcgccgttggcccactggtcaagggcgtccacggcggtctgcaggcgcaagccgacaccggtcaggcgctcggcgtccgggtggccgacctcgcgtagcgccttgttggcctcggtcacatactcgggtgtgtggcggttgacggtggccactgccgactggatctgggacggaggccggtaggtggcgcagccggtcatgatcccggccaggaccagcgggatggtccattcgagtgtcttcttcaacatgttgatctcctttgggttatgggtttggggcacatgcagaaagatctctgcaaacacttgatttccaacgaaatagaagcgtcattggatgtgacgcgggatggtcccgcatccacgaaaaccggaaccggaggcaggccatgacctacgacagaaaccgccagcaggcactcaaggcgtaccgagaaaagcaggagaacatcacccggctgatagagggcattcgcggcaagctcgaagcggacgcgaagcagccggacatcacctgggcgagcgtcggctccctcggccacgtcgaggagctgctgcgggagctggacgagttcctgtcctgaacacaccgggccaccgacaaaggagacatcgacatgaccgaatgcaccgtgcatcaagccaccgaggctttcatcggccacctgcgggaatccggaaagaaagagcggaccctctacacctaccggaaggacctcgacgtggttgaggccttcttcggcgcggatcgccagctcgccgagatccggcttccccaggtcggcaagttctacaaatccgatctgctgcttaaactccccgacggcaaggagcgagccgagcgcaccattgccaagaccgtccgggtgttccgcatgatgatggtctgggccagggaatcggggcgcatcgaggagctgcctctgcccaagagcacacccatgggccacagccgggtgaaggagtccagcgatgagcaaccgaacggctgacctcgacctgacgggggcgacagaggcgttctgtgcccgcctgtcggccgaaggacgctccccggcgaccatatccgcataccgccgggacctcgccctggtggcccgcgtggccggggcgttggccccgggcatcgtctgccggacggtcacggccgggctcctcgaccaggtgttttccgacggggcggtcaccgagagtgagcgaggccctcgctcggcggcctcgctccatcggatgaaggcggcggtgcgggcctttttcgcctgggccgtcgaggcgggcgtggtcgaggacaatccggcccggtccatccgcatgcatcggttgccgagaaagctgccggtgttcctgaccaccgccgaaaagaaacgtctgctcaaggagctcaagggacggaccgacttctccgcgctgcgcgaccgcgccatgatcgaggtgctgctgggcacagggatcaggcttggcgagctggccgcgctcgacatggatgacatcgacctcgacgccaagcatctgcgggtgcgggccaagggaaatgtgccgcaggtcaagttcatcaagaccgacctccgcacattgctgcgccgttacctggccgagcgtcgtcgacatggccgcccagaaatggaagccctgttcctgtcgaaccgggacggcagactctgccagcggcagatagccaaccggctcgcccactggctgcggaaagccgggatcgaaaaggaactgacgccgcacgggctgcggcataccttcgccacccacctctacggcgcgacaaatgacctgctcgtggtgcagcgggccttggggcaccgggacgtttccaccacccagatctacacccacctcgtggacggccagctcgaggaagccctcgaacgcctctgatccttccggacccgatgatgggagcggcctcggctgctcctgttttcattggccgagacagtgtcgaagacagtgaatgacagtgcccgcagaagaacacatccgccgatgatgaatgatcatgacgataggtctcagcctcccgggcggagcgggaaatatcgattgaccggaatttctccttcgctgtctgtcggccgcacatgccaataactgcttggcttatgcgctccggacgcggaacacacatggcaatatctgcttggcttatgcgatgaccgctggcgaaggaatggctgtttgcggggcttggccggttctgcctggggctcgacatgcccatatttacttgggttgtgtgagagagccccggcgtgaacatgccaatatctacttgggttatgcggctcggcttatgcgcacacatgccaagcggatatcgagagctgcaggaagaaatcgaggagtgggaatgatgatcggcagccggagaatgccgataccgaaagtgcaaggaacacgtcttatccgcaattcctggtgaagctgtctgtcgcaagtcgccgtgtgccggggtcatcggaaaagccctccatggtgttatccgcaattctttccgcgtttcttgcggccggagggtttcgcgcccggggcgtttgcggcctcggccaccttctcgagcagcgccgccgcccattccgccggagaggtctgcgggcctttcggctcctcaccctcacgggcgatcttggtggtcttgagatccttcatgtggcagcggatcatacggtcgagcttttcggcggcgtccgtgttcccctcgatctgggcgcggaccagcttcaccgagtagacgcccaccagctccacctgcaggaagtcgctggacttgttgaactcgaagtcctggttgaggcggtcgatgatcgcatcgaacatgaccttctcttccggggtcaggcagcggtcggcgaagatgccgtgacgcagccggttctggttgccctcgggcgcaccaggcccgcgccggggcggttcggtcttgccctcgttgcggtgccagcgatccagcgtctctttgtccggtttgttcagtgccacgtggaaatcctgccgaatattgttttcccaagccgggatgcggggcgggaggccgatttagcctccaaacgcgctcccgccggttcaggggttacttaccggaagcggcggccaactgtcggtcccgatcctgttttcgttcggcggcgatgatctgattgacccggcgggtggtcactccggcgaggttggagatctcctggctgctgatcccctgcagatgaagggcaagcaccaggtcacggcgttcctggtagaagcggctcggtgcagggacccagagaattccggtgtagtgcttctggatctgctcgaagagtttctcgggcaggacatccttggcgttggcgtagcgtttctttttcttcacggctcaatcctccactttcttcatccacggctgcggcacgtccgggttgtagaacagcagcgtgctgggacgcccgggcttcggcccgtggataatttcgatagaacgctcggtgacctcgccaatctcctgatcgccatcgacgaagcagaccaggccgtagtcctcgccgcagggaaaccggaaccggccctggttctgatagaggcgtgcctcggaccagcccttggccatggcctcctcacggatggcgtcgaccttggcgacagcctgggaagtcaccggctgcttacatttccaagcttggttcccgggataaatccagtcctttctgggagcttcgacgggtttctcctggggctcgggacgaagcgcgggtggccggtagttcttcggggaaaaggactgcaggacctcctggaggctttccttgccgaattcccggatggccagctcctgcagggcgttgaatcgctgccgcagcgtattccaggcatcctcggggagctttccggccttgtgcgcggcttgggcggtgaccatgcgggaacgtagccaggcaaagtattcaggcgacagacggcgacacagcgtgccgtcgatctccatgtcttcaggccagtcgcgtgcgtcttcgatctcgtggacgtcgagcccagtggagacatagatggcgggctgcggtggttgcggtggtaataatgggacttcacatccggccgaggcgtcctgacctccggcggtgtgcttgatcatggttttcagaaggctcatggtttcaggctccagaaatacgggttaatcgcttttcccgttacttaccggatctgccctgaaaccgtcggtgaccatctgctgcggtggatacgtgcggtggctgcggtggtcgtgcggtggaaggttttctcgtcccaccgcagggcatggctctttgtttgttatttgtttttagatagttatgaagaaagagaagatagagtgcggtggttgcggtggtatttgggaaatgtctctcacgctgggccggaatttccctggcgtgggatgtcgggttggtaggtagaaaaaatatttcagcccatagggggtgagacctctgggtttaccaccgcaaccaccgcaaaggccatgaaagccttgtctggcaagggtttggtgtgcggtggttatccaccgcaagggacagcggtgttcaccgcaccaccgcaaaagaaaaggacgcccgagagcgtcctgatgatttggtcagtatggcgtggaatcagagattggcggtcttgacgatccggtattcgaagttcttggtgtgggcgttgcgctgccggtcgatgtcaaacccggcgtcccggatgacgtccaggtcgttgctgatgcgccgaccgagctgggcgggcttcttgtattcgaactcgaggttgaattcccggccgaccctgcgcagcgccgcgagcagccgtcccgccgatacaggctccatggtgttctcgttctcgaacctcacctggtagcgttcgatgaaccccaccacgtggtttgcccggtcgtcctcgccgtagcgggccttctcgtccagttccaccgcgttccggtaggcatggaagagcgacgccagcgccgtggcaatggggttcgactcccgcgccatctcctggctggtgtcattgatggaatgaatctgctcgatgaacagcgggcttagatcctcgagtccggtggtcacctcgtgttcctcggacccggccagcatcatcaggtacatcaggctcagataatcgttgcaacggcgcttgccatgggtcggcatggttcggtgcagcagacgcatgacctgtttctgggctccgtcccggatcatcgccagaacatgactggttcgcttcataatggccgagatgatcaggtcccggttctgctggatggcggaaatgacctccgattccagaaagcagtcgcttgcctggttggcgaggtcgaagttgatgacgaaggacctcgacagaatctccgaaagttccccgcacagcggctcgatgccggtggtgttcagcaggcatttggtccgctcggtgatggtctcgctgtcggtgccgctcttgcgtttctccttggcgatgccggtgatgctggtcagcatgaaggtggtcaggtcctcggtcatctgcttgacctcgatgttgtcgaggacgatgagcgggttctgcgagccatcggtgtagttcgccgcgtcggtggccttcttgtgctggggctcgccgtaaagcagcgtcgaagtgatcttgctggcggtggtcttgcccgatccggccgaaccctcgaagcgggtcatgggccgcgtcccggcaaagtcgatcagcaggaaacaggagagccaggaaaggatgagaaagcgatctccttgcggacaggtcatgttgcccaccagcagatcgaccaggagccggtccgcctcttcgaggtcggcgtcgggcaggaatttcagcggcttcatcttccgcgagccgtccaggatgatgccgtcctcgttgccgccgttcttcatgatctgaatttcgtccggggtgatcttggcgatctcgtgctccggattgttcaggttgaaatagacggtgtaggaagccacatccgtgtgcagccaggaaaaatggtcgcgcacctggccacggatcatcgccaggcttggcaacacctcgaaaaatgtccgtccgccgttggaggtcggcaccatgcccgtgtgcttatagagcatggccgcgtaatggcgcttgcggccccggtccggcgaatccatccagtagatggcgttgtcgaaatacatgaacggctcgccctgcagggtgtgaaagaactgggcaccgttggcggtaaaccagtcgtaggcggcctcggcggccagtgtgtagtcgggagcgccgttctccagttccgtgtcgatcagcacctcgtcgacccgggcgcggcatgatccgggcatcgcgccggacatccgcttggccttcttcttttcgttacggaactcgaccttgcggtccttctggatggcgcggatctgctctttcagggtggccatcgaaacgccaccgccgatgcgctcctgcaccagcttcagcaggcgggactgttccagcggcgactgctcggaaatctcccccaggatcggttcgagcaggcggttgcgttcctcctcttcagcgccctcgggcagcgagcgcacgccgaactcgatgggcgtgctggcctcggcgagcagacgttcgaaatcctcccgggtatgcccggcggcaatgtaatcgttgacgtcgatcttggcggtggcgagaagcgcttcggccgcctgaatttcctgggcggaacgccccgccagcagcttggccagctccttcggccccacgctcgccgtcaggccgaagcgttcggtcagctcctgccgggccgagatttgtgtctccgacaagggcagcgtcaccaggcgggtgtcgatcttgtgttcggccagggtgcgggcggtttgcagcgcccctttgagaccggcctgggagagctcgttgtcttgacagatgtagacggtttcgacgccgcgcagcttggggatcaggcgctcccaatcggcggcccggatgcggacggtgaccggagatacggtgggcaggcccagttgcatcagcgccaggcaatcggtcaccccctcggtgatgatcaccttgccgggccgggccagcagacagtcctcgttgaacagcagcgcgttgttgatgaagtcggcgacgtagggccgctggtgctcgtcatgaaccgtcagtttcttgtatttcccttgctcccagcccacgtccggagtccacggcgtcttgcggccgatcatgaacactacccggccacggctccagtagggaaagacgatgcggcgctcgaaaaatggcgtcaggccgtcctggctggtgggacggaaagcgccggtcgcggcgagctcccgcttggaaaaaccgtcctcacccccggtcagttgggcgaccgcgccggacgcgttgtccgcgtagccgatcaggagatcgtcgatggtctcctcgctcagggcgtatttggatttcagccagtcgaggacctccggcgactctttgagtctggcgtggtaaagcctggccagcgaggtcagcgcgtccttgacccgcagttcgaaggcacggtcggcctctgtctgggccagacgctcctggctgaggccatagcgcgacagcggcggcaagcccgccttcttggcgagatagtcccgggcctgacggtggctgtccggcatcggaccggattgcccggcggtgaccgagcccgtctgaatgaactcaacgagctgcagcacatcaccgccgactccgcagccgaagcagtaccagccctgcttatcgagcatcacgtgcagcgacaggcgcgactggctctgatggttggggcagtcgcacatcaagcgctggccggtctcctgggtgatccgtcccggcaggagttcccggaccacgtcaccgatgtccatctcggtgacgagccggtaatactccctgacgttatccgttccgcccatactcattcggcctccgcgacacgggcgaaatcggcatccgcgtgctgggcggcgtccagaaacaggggcagaaaggtccggcggtcatccacctggcaacgcttggcgcagttctggatgccccaatggtcacccaggacaatggcggtgcgccgggcacgagtcaccccggtgtagagcagattgcggtggtgcatgaaggaatgcgccttgtgaaccaccaccacggcgcaggggaattcggaaccctgggttttgtggatggtgagcgcataggcgagctgcaggtcctgcaggtcggacgaacccttctccagctccaccggaatgccgtcgaagtcgatgaccagggtgccgttcgcgaggacatcgaccacgtagccgatggcaccgttcatcacgttcaggtcgtagttgttccgggtctggatgaccttgtcgtgcttgagaaacggggcgcggcggcccatggcgaccggcggcacttcggtgttccagagcttgcgctggatgagccgctgcagttcctcgttcagttccttggtgccgagcggccccttgtgggtcggcgtcagcacctgcacgtccttgatgatgtcgaaacccagggcatcgagccgctcctgaaacaactccagcaggaacgagcgtgccgccatcggatcggtgaactgatccaccagataccaatcccggcatccggataccgacgcctcgctggtcttgcgcacctcgcccttgagaacggcggtgcagttctccttgaggacgccagcctgacgcacgaccttgtcgaggatgaccgtggggatggcgtgtgtctggatcagatcacgcaagatgtttccgggtcccaccggcggaagctggttgtggtccccgaccagcagcaccgtggtccgcgacagatcgaccgcctcgaacaggtgccaagccaacggcacgtccaccatcgaaaactcgtcgaccaccaggacatcggcatcgatgggattctccttgctgcgcgagaaacccttgccgtcatagccgagcaggcggtggatggtggtgccgctacggccgctgacttcctccaggcgtttggcggccttgccggtcggcgcggcaagcacgacctccagatcgctctccccacagatggtgttgatgaccgaaatggtgtagctcttgcctgaaccggctccacccgagatcaggctgatgctgtgctggagggccgagcggaccgcgtcgagctgcttctcgttcagcgtcgccgcgcagcgccgaatcaaggcgtcgagtttcttgacggaatggaaatgaggattgggtgtttcggcctggccgaacagcgatgccagctcccgctccatgcggacgatctccggcagagcgaccacgaaacgtccgccgtgggaatcgcaggcaagcgcctgttcttcgatgagcacgtcgagggcgctctcgatgcggacccggctgtccagggcatccatgaccagcagcagattggcctggtcgaccagatcctcgtattcgatccagcagtggccattgtccagggcttcacggacgcagaaattcaacccggcccggatacggggaacgtggtccttgggtgtgcccagcttgcgggcaatcttgtcgaccttcttgaaaccgaatccccggatctcccgaatgaggatgtacgggtcttccttcaggatatcgaggcagttgccgccgagtctttcgaccagggtggtgacctgatgatgggtcaggccgaatgccgacagccaggccatgacggtgttgacgctgcggttcttcaaccattcgtcacgtagccgccgggccgcgtccagaggcagtcgagccttgagcgcgatgcgttcggggtcattcagaagggtttcttcaaaggcgtcgccgaaactctcgacgatcaatctggccttggccggaccaatgcccttgatctccggatggttggccagatagtggatcagcccctccgggtcgagttcgaggtcgtgctccatcccgtcgaccttgaactgacggccgtatttgggatgggtggaccacgacccgagcagaaccacaggctgattttcccgggcgaacaaattgcccgcgaactggacttcctcaccggtcggggtgagcagtcggcctgcggaaaacttgggtccggcatagtaaacgcgctctattcttccccggagtcgcgccgggttactctcatttctttttggcatctcgcgatcctccggtgaaaacgtgtcaggtactcctcgacaaaacggcaggcagcctgccggtccgagcagaagtagacggggacaccgaagtcgacgacgatggaggcgaccgttccaatcagcgcatgcgggtgggcatcgctgcggtagcggccatcgaccagatcgcgaaagttacactcgacaaccacgcaggcggaatcgtaggcggagagcttttccagttcgcgatggaaccgttttcgcccccggatgacggtggagacgaaatccgtcagggatttgcgctccaccgccacccgttcctcgaggccgaccagcgagtaatcaccggcgggcagcgccttgcgaaccgccgaaaccttgtcgctatcgaagctgtagggctcctgttcgcgggtgtcgacgacaacggtgatccggtccatcatcagaacgggatcatgtcgtccatcgccgcgccgggagccccggcatcgtcggccatgacaatgcgacggttgaagtagatgttctcgttttcaccgcgagtgcgtttggtcacctccagcttgatgttgagaagctgctcgaggtggcccggcaggtcggagagcttctgaagctgcagcccgcaggtgtagaggtcctgcttgagccacttgatgttctcgttgctggccatgacgttgttacgccagagcagacggcccttgtgggtcggcgcgagaatgcgcagggtccacttgagcatgggattgcccgaggtctgggcgcgagtcagttcgacccggtcgacgttgacctggtacttgccgtcgggaacggcctcgaactcacgttcctcgacttcggcggtttcgaaggcgtcgtcgaactgcgccaggtcgaggttgctgtttgattggttttcgtagtgttccatggtcggatctccttactgttggggtttcgccgccgcactcgcggtcggctccggcttcggccgggcggcactcgccgcagctccggctgccgtgttgttgaaggctttcatgaagctcgaaaaatcgagggggatgacttcggggaggcgaccggtgcggtcaccggcgtcatagttgggactgggcttggtgcgcatcacgcgctgccatacaggcttgccgtcctcgccggttttcatgtccaggtcgcagaacaggatcaggtccaccagaccggtgaccagcttccgcgccttttccggcagcgtcggcacgatgcgggtgtgtttgccggtccgggtctcgatgtcccgctcctgggagtgggaaatcaggatcagcccgtagggcaggaaggcgagcttgttgatgacgcgctggaactcgttgttgatcagcgcgtagcccttgccgtagcccaggtcggattcgtgctcgatcttgaatttcttgcagacgtagtccgagcacatcttgtaggcgttatccaccgtgtcgacgacgatggtcttgaactcgtgcttgccctcggcgatctcggcgcaggcctgcaagaggtcgtcccagcaggtgatcggggtctggaacacctccagggcgttcaggcccggctcggtcgccaggaacagtgcgtcatcggccttggagcaccaggtgctcttgccgatcttgctcgggccgtacaccagggcggtgagatccgagagcgtgtgtttgggtttgcttttggtcttgggaagcatggctttgtctccttatggttgggatttcagaacaccggagcggcgtcttcaccggctccgtcccgcagctcttcgtgcggggcgatccgttggaaattgttttcgatgacgttggggttgccgcccgagcggcagagctggaagtaggcgcagggccttccgtactggaagcagtagctggtgttgcggtagaagatgtcgcgccgacgggcgtcgagcatggccttggagagttcccacagctccgcccgcagttcctcgaactggtcgcgggagatgtagagcacctcgcgatgaaacatgccaggctcgaggtacttctcctggagccgttgctggaaggtttcgtcgtcctccggcagcttgcgcttggcgctgctcttgccggttttcgacttggcgatcagctccgcccggcgggcctcgaattcggcttcggtctcacccttgccctgacgcaacttggccttgaccaggacgttgtagatgatgccgctgaccgtgatgccgagggtctgctccaggtaccaggcgtagaggatgatctggaaatcggtccacagccgctccaggtagctggcgtcgatctgcgaggcggttttgtgttccagtaggaaatactggccatcctgacggacgatgccgtccaccttcccggcgagaatgaaactgcgcgaggtcgccccggtcgccgggttgacgatgggaccttcgaaggttttctcgagcgcgacaacctcgaactcttcggccgggtagtgttccgcataggcgctcatcatggcccgggcgagatgccagtcggcctgttgatggtcgtcctgcgcccggttcggataggtccggtcgatgtggtcgaggaccttggccagattccgctcgccgtgccagcactccaggcagtcgtggatgaccgagccgaaggccagattggggtcgcgctcgagcggcaccagctcgtcgatgtagcgccacttgcaggccatgcggcagttgcggaacagccgccacatggaataggtggtggtcatcagctcgctcataccgccacccccgcttcggcggcgggcgctgcgcgatgcttggaggcacaggcgcaacccgacggctgggtacgttcgatcaggaccgagcgttcgccgtattccttggtggcgaagccggtgaaaatgcgggcgaggtcgctgccgacatcggtggaggcgtcgatcacgcaggtgcgtcgggccttgtccagattgaaccggctctccatccgcacacgggaacggccatgcaggctttcgacggccagcatcgccagcatgaaagtgtcttccagttcctgggccgggaccgactcgtcaaaacggtacttgtaagtgtcgtgagtcatggttgaactcctcttttgttcaggttctgatttccgaggccccggatagccgcaccatgcggcacggtgcttacttaccggaggcggagccgatgcgtcggagatcacaggtagtcctcgagcccggcctcgcggaacgcgtcccggagcttgctcagccggtcgtagagggtggttctgggaatgcccatctcccgggcgacttcggccatggtgctgtcgtgcaggcgcacgcacagatcccggagctcttccggcagcgaggcgatggcctggccgagatccatgcggatctcatgggcgaggcgctcccttgtctcgcgggtgccgcctcccagagaaccttcgctgtccaggaactcgatccgctcggtggtgtcgccttcgccgttgtcgaggggttcgttgagtgaggtttggcagagccgccagtcccggcattgggcgaaccgggcctccaggatggtggagatgtgacgttcgacgatccgggccatgaaggtggtcttcttggccttggcgggattgaaatgccgcatccgctgcagcagatcgatcatcagttcctgttcgaggtcgggtctgtcgtcctcggtgaatccggccttgcctacgagttgacgtgctttgtgccgaatgaggtcggcggcatacttgtcgatgccgtcgtaagaattctgtgaaaccatcggggcctcctcggagcgaggaggaggtccgcgtgggtgtcggcacgggccagatcacaggacaaagctgtcgcgtgggcgaaggggtcgcaggtacgccgccaattgccgtattcggctcggcgacacccacaacagcctccgccatgcgtccagcttgttgtccagtgtctaagggttcaggtcgttacatgttcaggctgcccgttcctcgatgcgcatcagaaacgggagaccgtgcttgatctcgagcaggcagacttttccgctgcccatctgcgcgaggtgctccagcagcgccacgacctcttgcttgaggatgaagtcatcttggtcgcgctcgggccggggaccgctctgtccagccagcttgatctcgcgctcgatgaccgtgtcaggggtgagttccggctcgccgtcgcggaccggaatgttggtgatgcggccgaagttgatgtcctgcatcaactcgatgagtcgccgcttcggtggggtgaggtgtgctttgttgacttgtgccactgccagtctccttgttcggaagttctggcacgcccggtggccaaccctgtgctgaccaataaaaaacgccggatcgcgccttcattggggaaggcgctacatccggcgtcgcaatggctacatttggcgtagcggaaatattttttagttttttcttcctgggtggccccgggtcactcgttgactatcgggcggacctcccaaacgatctcctcttcggtccggtagaccggttcgttgccgcacttgatgggctccttcaggtgggcggccagcggcttgtcatacttttccagatacgtgatggcccggttcacggcactccggaaggcgtcgcggatgttcttccgcttgtcgttggatttccggagtttgccacccagaccaaccgcctcgttgattgcggcggtgatctgggtcatttcgttctcgagccgctggatttcggcatcgttgttttctgcccgggcttcttcaatttcccgaagaagctcgtgagccgtctcccggtattgctcgacggccttgcggtcggcaacgaagccggtatcacccaacggaaccccctgggtgacctgaaaaccttcatcggtctcattggagttcaggaccgcgttgcagctatcgatggcaaacccgcagacgatctcgtagaccgaggtttccttgttaggcctcgccaggaggaagttgatgtactcggctcctttgtcgacacccgtcacaagcacctcggcgttgccgttaaagcgtgcagcccagacacccccgcgcttcctgaagtagttgtccggctgcttctgctcgaccggaatggcggggacggagattaccgatcccgattcatagaccgtcctgagcaggcagtctcccggcaaggtgcgttggcggatggcggtgatgttgcgggcgaccatggtgtccatcgcttcgcagacctccttggcgtggcgcttgtaaaggtcatagaccttctgggccacttttccggagttcccattaaggtagcggaagacccgactgacctcgctgaatcgggcgataaactgggtgatgtcatcctgatcacggacctggttggctcgctccaggtacgcggcagccatgatcttgtcctcgtccttgcttcgactttgggtgaagatatcggccttataggcttccacggggtcatgctgatccgcttttgccgcaatcatggcaaaacgcctgtcgatgcactgcgaacacgttccgcaatgcgtatggtgattggtcatctcccaggtatgggtgcaggtggtcgatgccgcgatcatgtcctggcatccggccttggtgatcacctcgataacaccggccttggttttccagatgtagggattctcaatcgtgaacggttcgccagccaccaggctgatgatttcctgaaagcctcggatcaccctggggtgggtggtgcgtgttgcccggcctccgactacctgagcgcagaccggcagattcaaactgatgaccccgttttcgtaaaaacggacgcttttcagattgagcatttttgcgatggtcgccccgatagacacatagaggaaggatcggctgcgctgggtgtactcgtagttcagccccttgttcttgttgacccggacgccgatgtgtagcggggcgttttccccagccttgtcggcaatcatcttttccagtcgccggtggcgcgtgttgagcttcggtgtcgacttgtgggtaacaaggacgaccttgtgtttttcattcagaacttcatcgatggctcccgccagcgagtccagcccacctgaaaacatcactacctgttccggatagccgaagagccgtccgtcatcatcaaatttcagatatccctggaatgcctgagcctctttcagtttgacgaactcgaagtgatagttgtcatcagacaagaaaccaagcgtggagcgcagcgcctggtggatatcgtctccgttccaaaaatctggcttccgcaccgggatgatgaagtgcagatccctgcgccagccatggccaaaagaatcgacgtcgtcggcccctcgtgggatggcctgatcggcactgtaaacgtaggtggcgatttcgagcaggtcctggaaagaatcaggcacgtccttgctcatctttttgtggatgtcttcaatgcgtagggtgatcttgtccggcccatccttgccccaaaggcgcaggcgcagatcacggtcaggattttcttcaatcccatcggtcggtgcgttcccacagatgatatatcgtttatcttgcatcggctcgcgctccttcttttagctcgtccttcatctttttcagcgcgtaagaggcgaagccattggaagactccctggagatgtcaccaccttcttcgtacctgtgcttcgaaaaccaatctgctgaaaactgctcgacgatcagggacgcctctttacagtgcgtgttcagagccttctcgaattgtcccatttcattcatggtggcaaagcgctggccctcgcccagatgggtagccagcgtttttgagaggaagtagttcatgctctcgttggtcagcttggcgaagaaagtccgcgacagctctccgaactcccgctttttcccgagcgctgccagtgcggcccgaacatcatctggcccgggggcgaagagagacggcagtttgggtgagatgtgctctaccagggctccgaccaatgcacgctgagacatttcaccgaggtcggatcggccaccgttggactccaatttgttatccagggcctcggagactgcggctgcaagatcgggaagggatgtatcctgcggcaggttgacgccgagggattggagatgctcgccgaggttctccttttttgcggcaatggcgagttgcgtcatcaaccacaccgcctcggtgaacccctcatcgttgagcacgaaggtgaatgctttatcggctgcccggattgttgcgtttgcgatttgggacacgtcggcaccggccgtgatcaggccgaccacctctttccatgccctcgacctcggaaggcttccaagtctgacgtgccccatgtcgatctccttatttttcgcgacccagcatcgttattcgggcctcctgatgacgacgatgcttcgggccttacgagcttctttcttcagatagcctttccgtactagttgagcgatctgctcgtgggcgctcgcgtggctgataccaaggacttccgacaattctttcaccgttggcggcaaccccttttcatcgatgatttggcaaatgaccctcagcgtgtttgcttgtgggtcggttatttccgatacctttttctttcccatggcgattgctccgtgtcgtagccactgagcggattaagcccaatttatgaccacaaaatatacgacctgatgaacatcaggtcaatcaaaaaaacaggacttctcgtctgattccgtcatcttgcacgtccctccggtaggtaacgaacgcaagtccggttcaagccggatgtaaccagataaccgaccagaggcggagctgaggcggttgtgggtgccatagaacgcgcatcccgaccgccaccgttttctggcatccacaccatccagcccccggtcccaccggaggtgttcgatgttggatgtacaggaaatgaatgatgggccggggacggatgaccttggcgaaaacggcaaacccggccgcctgtcgggtgaggcgaggctccagtcagccgcctccattctggccacggcggtcctgcgccgaaaggcaaaaaacgcatgtgtgggcaatgagttagagattttcgaagattcttcccctgtgctcggagaaggacttgattcattgccggaacagagcattcattcatgacaactcgtccggaaaccataataaggagttgaaaatgaatgagttacacaacgccgccacgggcggcaagaatcaggaccgaacccgaaactcggtccttcggcagatggctctgctgcaatccatgtccctggagcagctccgggaaaaatggctcgatctctacggagaagagccgccccagtacaaaaagcaattcctcatcaagcggctggcttatcgcatccaggagcttttctacggcgggctgtccgagcaggccaaggtccatcttcagcaggccgccaaggaggacccggtcgccactgtcaatcgacgcatcccagaagagcggaaatcgaacgaggccatcctgcccgggaccagactggtgcgggtctggaacgaccggcgatatgaggtgaccgtccttgccgatggctacgagttcgaaggccgcaccttccggtcgctcagcgcggtggccagggagatcaccgggacgcgctggaacggcaaggtctttttcgggctgaagaaggtttacggcagaaaagccgagggaggttcagatgcttgataacagcaatgtcgcgccgggaaagaacaagacgctgcgctgtgccatctacacccgcaagagccacgaggaaggtctcgaacaggagttcaactcgttggatgcgcaacgggaatcggcggaacactatatcgaagcccagagaatgcgtggctggacggctctgccggatcgctacgacgatggtggtttctcgggcgggaacatggagcgtccggggctacgccgcctgctggcggacatcgatgccgggaagattgacgtgatcgtggtctacaaggtcgaccggctgtcccgctcgctgctggacttcatgaagatgatcgacctcttcaacgagaagggtgtcagcttcgtctcggtcacccagcacttcagcaccaccgaccccaccggccggatgtttctcggcatcctgatcaccttcgcccagtacgagcgggaggtcatcgccgagcgtatccgggacaaggtggcggcagccaagcgccggggaaaatactgcggtggcgtgcccatcctcggatacgacgtcgaccgggataacaagaagctgctggtcaacccggatgaagccaggacggtacagtacatcttccgccgcttcatccagatcggctcggccaagaaactgggccaggaattgaacgaacagggataccgcaccaaggcctggaccaccaagaaaggtaaggtgcgcgagggctcagaatggaatacaggccacatctaccggctgctgaacaaccggatctatatcggcgagatcgcccacaaggaccgtagttaccctggtgagcacgaagggatcatcgaccgggcgacctgggacaaggttaaggccatcctggaggacaacaaaccggtcaaggtttccatggccagaaccaaaatggtcgccccgctgaaaggtgtcatccgctgcggccactgtggatgcgcgatgggtccgacctacgctcgcaagaacggccgccactacacctattacatctgccagaaggacagcaagcggaccgtaagccggtgcccgctcaaacgaattcccgccggggacatcgagcaggccgtgattgagcagttgagcgcggtgtttcgcacgccgacgctggtggccaaaaccttcttcgcggcccgggacatcgagcaggcagagcgggagcggctgttcaagcagaaagcccagctcgagatggagctgtcgcaggcgagggagcaggcactcgaactgatgaaacccggcagcgatcagccgggcaaggccgagatgctcacgaccgtcaaccgccaggcggtcgagctctcgaaacaactgacgcacgtgagcgagcgatgcagagcctaccgggggaacagcatcacggagcaggatgtctcggaggccttccagaatgtcgagggcttctgggaagaccttttcccggtggagcgaaaccggctcatccgcctcctggtggataaggtggagatccgcgagaccggaatcgatatggagctgcgcaccaacgggctgacaacactcatcgccgagctggctggtctggcatgcgaagtcaccgaacggagggtaagccgatgaaaatgaagccgaccattaccgttgccgacaacggcaacctgcagatccacatcccgatgctgatccggcgcatgcgcggccgcaagacggtcatcgctccccaggccctggatggagatatccccggggcgcaggagccggtacagtccgccgtcctccaggctctggcaagggccttttcctgggccgacatcctcgaatccggccagatcaagtccatcagcgagcttgcccgtaccctcgacgtcgatggctcgtatgtggcccgcatcctcaagctgacgactctggcccccgacatcgtcgaagccctgatcaacggtgaggaacccaacgggctctcgctggccaagctgacccagacctttcccgaggactgggccgagcagcgccgccagttcggcttcaccaccgactgacgaccggaccggagaccaccccagagagccgaccatcagcgtcggcttttctactttggggtcaggaaaccggagttgaccacacttcttttcacggccgatgcaggtgatttcaaaaaaaacgtccggttgcggcgtcgaacgatgacctaagacaaccgacaaaaacggcaaccatccgcaaacccatatcaatcaaggatgtagctttccggacgagcttcggacttggtccggagaaaacagagaatcaggggccaaacagagaaagaaaggctcgaggatggggagaatcgatggtgcggagaggtgcttcggaaagatgtgaaacaggcgcaaaccctttagaaacaaggggaaaaagaaaacccgtcaccccggagaatgaccccagagagacgggtttgtcttttctaaatggtggggcgggggcactagaaatatatttataatactctgtttatttttattttattccatgtttgttccaagttttacccccaattttacccccatcgtaatagcttgctaaatttgtttgctgctgtctttactcgctatcactttggacgcattcaggacgccagttctattccccattccgctattgaacagcgtcacatatattaagaatatcctgattctaatgcctatctttttcattcgggtaatcttgatatattattcggattttcctgatttattcgactcacttcgataaatgcccttaaagactcctgcaacgtcaaggccgtcgccatgagggctttatctatctgtgtaggcacgttatctgaccgttgttgttcacaaatagtgaacatgatgctcgcaagttcccgtgtttttccctcaaagtcccgctccaaaacagccacagcttcaccccgttccatatatcctcccgccccattccgatggggcttcatttttgcggcgtttcctgctcctctttgacgctttccctagcgatagcgaaaagatagcctacatcttcccccaacacatcggcaatgcgtaacgcctcggcaatcgagacgttacgcggtctaccattttttcccgccttgcatacggaagaccaaagaacagcggcggaacgctgatccacgtccggccaaactttggcggcaaactcgcctttcttccagccttgtttttccaggcggcgacccaccagttcaacaaaagcccgttcaaaacgtctagaaaaatccattacttcttccatgattttgctccggggggtgaaattctttcaggaaatttcatcataccggaaaatctttccttgtctattaggaaaatcttgataaaagagcaagtgtctaccggcaaaaaattcccgcaaggtggaactatgaaagacgttatttccaagttattatctcattatgggacgcacacagcggcagcatacgctctaagctacacggaacggcaatataggaatatccgaaaaacaatcgaagagggtaaagcgctgaatccgcgcatagagcttttcctacgccgaaagtctgaagaaattgaagaagatatggcaaaaaattccgaacggggcacgtatgagcactgaaacggatcgacttcgacgcaacgctgcgcgggttgagttcattgcctgcatggatgaaatcgagcgctttcttgctcaaggtttcgacaaaaaaatggtccatgcgcgacttgtggaagagggacgcatttctatggcctatgtgacgttctgcaagctgatcgccaaatccgccagtaatgccctgcatgtagccagtctgtatccggcttcctcgcaagcgctcactaggcccggcaatttgagcacgcctcagtctggcctttcccggtcaaacgttccaaaagtcgccaaggtggacggagagacatttaaggacccaaagtccgttgatctcaactctgttttttaagaaggagtaaatcttatgggcacaatccattttatccaacagggtaaaggcggcgttggaaagtctgtcgtcgccgtgatcctgtatcaaaccctgaccgcactcggcaaagatgtcgcggcatttgacactgatccggttaacgccacgctgtccagctatgcagagttcggcgtcaccagcctcgatattctgaaaaatgacaacatagacgctagagccttcgatcagcttcttgacgagctattttatctgccggaacagatgcacgccattgtggacaatggcgcgtcctcatttgtcgcccttggagcctatatcaaagagaacgccgtgctctcccttctccgggaacaagggcaccaagtcttttttcatacggtgatcactggcggacaggctcttggcgatacgctttccggtttgaaggtactggcggaaggcttcccggatactcccattgtggtgtggttaaatccgtactttggagagatacagagagacggcaaaggttttgaacaattccagatttatcaggattttttcagtcaatttcaagcgatcatcacgcttccacaaggcaacaaggccacaatcggcaaagatttggaggagctttttgctaaacggatgagctttaaggccaggattgattccagttcatccattgcggtgcggtcccgtctgaatcggtactggcaaagccttatcgccgtggtcgaacaagccggaattgcgtagggggggacatgtctgaacaagaagaaacacaaaatgcgggtgccgtttccccggcattgccggacgggatcggcctgactcttgacgatgtgcgggcactgttggccaaagagcatgaaaccatcgtaccgaaagacgatcccatgctcatgatcgtaacgctgctcaatgcctacttgggcgaagtggacaagctccatgcccggcatggcaaggctctggcggcgctcatggcgggcaaaacggacgcctatgtcaaaggagttcagggggccacggatgccttggccgcgcaactttccgcgtcctcggttgagggcatccgcaaagtgtttgccgaacacgcgggccaactgcaaagcctcaaaagcggcatgtggtatgctgcggccattgtggcagtttcggccctggtcaatgtagcggtgttcgtactgcggggggtgcggtgatgatggccacggatgcaggatttcgggaaacactggcctacaactgcggcccgctgttcatggatgccctgaaaaatcctgaagtgattgaaattatgttgaaccctgacgggaggctgtggatcgagcggtacggacaggatcaggagcctatcggcacaatggagccggtacggagtcgggccgtgctctccctggtggccagtgctctggatctgacggtcaacgatcactccccgatcatcgaaggggaatttccgttggacgggtccaggttcgaggcgacctttccgcccattgtaagcgctccgtctttttctctccgcaaaaaggccagcaaggtgatgagcgttgaagactacgtggcggatggcgttatcacgcccgccgtggtgccgttccttgaacacgctgtagtgactcgcaaaaacatcatggtcgtaggcggcacgtccagcggcaaaacaacctttgtcaacgcaatcatccagagaatagccctgctctgtccctcgcatcggctgcttattctggaagacacggcggaactgcaatcccaaagcccgaacacggttttttttcgtacctcgccactggccggggtggatatgcggactctggccaaggttgccatgcgttatgctccccggcgtattcttatcggtgaggtgcgcgactctgccgccctggaactgctcaaactgtggaataccggacaccctggcggcgtgggcacgtttcacgcggacagcgcggaagaggcgctgccccgcttggaagagcttgtggaagaggctggcttaggttccaagcaaaaacttattggaagaggtgttgacgtgatcgtctttatggaaaaaacgccggataatcgccgccgtctttcccagatcatcaaagtgcatggattcaatcctaaaacggaacagtacgaaacgagcaacgtctatactgtttccgccgcatgagagggctatggataccaccaaaagcaacacggatatacgttgcggcaactgtcataggttgctggcacggggggatgtgcaagccggagttatagagcttgtttgccctcgttgcaaaacccgcctgatcctgcgggcctcgcgccccaacctcgcgccgcaagacggcctctacggagatcgtcatgcgcgtacatctgaagccctcctcgaacagcactaaaggccgttggctccttttttgccttccggccttgtgcctttgtctcttccctgaaatcgccgccgcctccgggggcattacggagttttccagccccttggaacgtgtggtgaacaccatcaccggcccggctggcaagtggatttcgatcaccgctatggcgatctgcgggatcatattcatcatgaacaaagacgacatttccgggggcttcaagctgctgctcggcgtcgttttcggaatttcctttatcgctttcgcgtcgtccatcgtcaattcggtgttttccttttccggggcggtgctgtgatgcggacgctgcccatacatcaatcgttgcatagacacgcgcacgtactcggcgcggaacgggaactggtcatgacggccgggctggtggcactgctggtcggcgtggggggcctgacggtcctttccggcgtgtctgccgtggtcttttggatggtggtcgtgttcgcgctgcggcgcatggcaaaggctgatccgatcatgtcgcgggtctggctgcggcatatcaaacaacaggatttttacagggccaagtccgggcgctggcgggaagggggtttcacatgctgaaacttgccgacttccgcacaaaagccaaggggctgccggacctccttccctatgccgcgctagtcgcgccgggtgtggtcctgaataaagacggttcctttttgggggcttgggaagttcgaggacaggatacggccagcgccacaccggacgagttggcctatcagtccgcgcaattcaataacgcgatcaaacttctggggacggggtggatgctgcatatggacgcgatccgcagtccacacgcggcttatccgccccgtgaggcaagccgttttcccgatcctgtcacgcaactgatcgatgatgagcgccgggagtttttcggtcggggcacctgctatagcacaaacacgatcctttccgtaacgtacaagccggatttcaacgccacgcggttggctggcggaacgcaatccggcgcggcctctgccggaatgttggacaaggggcttgcccactttgaaaatatcctggaagaattggaagatgccctgtccgccgtgctccatctggaacgcctgggcgagtatgacgcctttgatccagacggaaacgcctaccggcaatcagacgtgctttctcatctgcaacattgtttgacgggcgatctgcatcctgtccgagtgccggatacgcccatgtacttggacgctatacttgccagtgaagaacttgtgggcggaattgtgccgcgcttgggttcccggcatttggccatgttgtccatagacggtttgccgcaagaatcatggcccgccatgctggcggcactggatggcctcccgctctcgtatcgctggtccagtcgttttatttgcctggatcaatttgatgctgtggcggaaatcaattcgtaccggaagggatggcggcaacaggtttacaggtttctcgatcaattcctgaataacccgaacgcgcgggcgaaccgggacgctctgcttatggccgaagatgcggaacaggccatgacggaagtacagggggggtatgtgggcgcgggctatcttacgtcctgcgtcgtgctcatgcacgaaaaccgggagacgttgcaggattgggcgcgggaactgcggcgcacggtacaaacgctcggtttcggctgccggattgaaacgatcaatgccctggaaacctggttgggcagtattccgggcaacagtttttcaaatctgcggcggcctctcctgtccacgttgaaccttgcggacttgctgccgctgtcctcaatatgggaaggggccgcgcattgcccttgtccgttctatccgcccgactcgccgcctctggccgtgttgaccacggacggggccacgccgttttttttcaacctccattccggcgatcttggccatacacttgtatttgggcctaccggctccggcaagtccacgctcctggggctgatcgcggcgcaattccggcgctacgctggcgctcagattttcgcctttgacaaggggcgaagcctgcttccgctgtgcctcgcggcgggcggcgctcattatgacgtgggcgcgggcggcctgtcgttcgcgccgttgcaatatgttgattccgattctgaacagtcctgggcggaagagtgggtggcctctttgttggagttgcaaggcttgaacgtcttaccgctccataaaaacgccattcatgaagccatgtccctgatccgctcgaacccggaacatctgcggtccctgtccagtttttacagtttcgtgcagggagaagacataaagcaagccctccgccactacacacgggaaggggctatggggcgtcttctggacgccaagccggacaccttgggcatgtcgccgttcatggtttttgaactggaagacctcatgaacctgagggacaaaaacctgatccccgtcttgctctacctctttcatcggattgaaaacgcgctcaatgggcaaccttcgctcctgatacttgatgaggcttggatcatgcttgggcatccggttttccgcgccaaaatacgagagtggctgaaagtgctccgcaaagcgaattgcgccgtactcctggccacgcaatccctttccgacgccaaacgctccggcatttttgacgtgcttgtggagtcctgcccgacgcaaatcttgcttgcgaacctttcagcacgacaggaagggcaacgggatttgtatacggatatgggcctcaatgcccgccagattgacattatcgcctcggccacgccgaaacgcgattactacgtgattacgccgcacgggcggcggctggtgcaattggcgctcggccgcaaagcgttggcctttgttggagcctcggacaaggaaagccttgcccgcattcggcaactctccgacgagcacggcccggaatggccgtcttactggctggcggaacgccacgccgcataaggaaaaagacaatgaaagtatgctgtattcttcttgtgggattttgccttttcagtgctccggcatttggcatgacggtatattgcacaaattgcagtaaccaaatgacgcaagcattggagcgcgtcaccaatgtttcacaactcaataagcttattgatcaatacgcggaagccgttcagcaaacgcaacaacaaatccgcatggtacagcaaaatattgagcagtatcaaaacatgctgcaaaacacggcgcaactgcccgcgcatctcgtcaatcaactgaatggctcacttttacggctggccagtcttacccgcgaactcaaaacgcaacgcggggacgtggtgggcctggggcaagtctttatgaatctgtttcccgatcagagcgagtttgcggacttggccgggaccgggccgcaaggggtgaacgcggcgaatgcccgttaccgggaaaaatgggattcatggtctgaatccgttgatcaggcgtcacaggccacattccagctttcgggcaaacagcttgaggacttgcaaggaaacgcctcggatatgcaggcgtaccttgatcaactgctagccacgcctgacgggcaaatgcgggcgattcaggcgggcaatcaactggcctcaatccaaattcaggaagcccgccagcttcgggaactcatggccactacggcgcaatcttcccttgccgcgcaaatgaaagccgaaaaagaaggccaaatggaacaagaattgtggcgggatatgaccaaaacggacaagttgggtggcctgacttccaagccggacccgttttaggggcggctatgaacaagccgcgtttcgctctcttcgccctggtctgcctgctggccatcctgtgtctgccgggcggcgctctggccgctgcggatacggattttgtgtcaaagctggtgtcgtccttttatgacaaaacttcggcttgggaaccgattctgaaaaaatacgctctgcttgtgttccgttggctgctgattcttgaggtatgcttcctgggaatcaaagcggcgctgaatcgggaacaagtgggggatatattcaagcatttcgttatgcttctgctcatggcgggcttttttctggccgtaatcaacaattataaggaatggtcgtggaatctgatagacggtctgaaacagataggctttgaactgagttccccgcaatactcttccgattcgccctttatcgcgggaatgaagatcgtcaacctcattctctccaagctctcggcatggtcgccgggcaactccgtggccctcttgcttgccgccctggtggtcatggtttgtttcgccctgatttcggcgcaagtagtgttcattaaatgcgaagccatgatcgccatgatggcggcgttgattctggtgagctttggcggctcgtcctttctgaaggattacgccgtcaacgccttgcgctatgtgctggcggtggccttcaagctgttcgttatgcaactggtgttaggggtgggtcttgcttttatacaggacttcgacacgtccacggcggaactgcaagatattttcattgtgatcggcgcgtctattgtgctcctggctctggtcaaatccatccctgacacctgcgcgggaattatcaacggctcccatgtgtccgggggcgcggccataaccgccgccaccgccgccgtgggcggggctgtggccggggctgtgggcggctccatcgcggcgggacgttccgccgctgtcacgacgcagaatgtcaaagacgcctcgaatatagcagggatggaaggcaagtccggcatgggcaaaggcgtttccgtggcccgctccatgtggggcgctcggcaggatgccaaaacggccggggaaaaagccctggccactcgttcccgctcggaaatgaaagaacgtcttgagcgggcgcggatggcaacagaaagcgacaattcataggaggcaacatgccttttttctccaaaaagaaagccccaagcatggaaacggcgggcaaggggcacaatccctatctgaacgcccggcaggaatggcttgaacgatacggcggctatatcagccgggccgcacaatggcgcacagtggcttttttctgtctgatcatcacgggaatttccatcactggcaacgtgattcaggcaaaccaagtcaaaacgatcccctacatcatcgaagtggacaagctcggcaagtctgccgtggtcgcccgcgccgatgtggccagcgtcacgccgcaacggcttattcagtcggaaatcgcggcttgtgttgccgattggcgcacggtgacggcggatgtggaactacagaaaaagatgatttcccgcttgtcctacttcatggccggttcggcaaagggcgttttgaaggaatggtacgaaacgaataacccctatgaaatcgccaagtcgggtaaactggtccatgtggagatcaaaagcttacccctgccggtcagtgccgattcctaccgggtcgaatggacggaaaccgtccgcagtcatgcgggggcgctgttggaacagcacacctatgaagccacggccacgatccagatcaacccaccccaaacggatgcggtcttactgcgtaatccgggcgggatttacatcacggctttgtcggcgggtaaggttgtgggcgctccgtcgcgttcctcttctggtgccgtttccggcgctccggctcaaaccgaataagggaaacaccatgaaaaaaataatgctcttgttgttcgcgtgtttttacgcttgcccggtctgggcggcgtctcctccctcagtggttccggctggctatcctccggctctggaatccggttcgccggtagtctcggaagtagactatatcagcccgtccaccgtgccgctcacggataaggaaaaacacgctttgcatctctcggcggactggtcccggcgtaacgtcgcgccggtcctgggaagcggcggcaaggtggtttttgtgcatggggccagtcttcccacgatcttggccgtaccaatgcaagtttgcgacgttgaacttgaatcaggcgaaacggtcaatgaaattgtagtaggggattcggcccggtggatggtggattccggcacggcgggttccggtcccgccgctaccgtgcatctgttcatcaagccggtggacgccgggcttgaaagttcagccgtagttaccacggatcgccgggtctatcacctgcggcttgtttctcaacgctccggccatacaccctatgtcggttttgtgtactcggatgatctgcggcgcacggctgccgcccgcaaagccgccgaaacaaggcgggcaacctgggaaagtacaacggtagacggggaacgccgggatttgtccgatttgaattttgcctatggagtcaaagggaaagcgccttggacgccggaacgggtctatgacgatgggcggcaaatgttcatccgtctgccgaaatccgccgcgtccggggaaatgcccgtgctcctggtccgtaaaggcaataaagatgtactggtcaattaccgggtcaaagactcggccattgtcgttgacggcatttttgacaagctggcgctgatcgtcggcgtggggggcgatcaacaaaaaatcgaaatcgtcagagaagggggccggaaatgaaacgcgctgtttttctcttgttggctctgctgctctccggctgcgcggggcgcggcctgtccggctccttctgcggtcctttgccttcggataccgccgtggtccaggtggcgcaagatgccgtgtctttcctggcttcgtcgtatccgcccggccataccgcgcttttccttatgcccgccaaggcggaaaacgcctttgctcatgctctggaaaacggcttgcggtcacgggggttcacacttttaatggaagaccgaaaagaggccctggccgtggcctacacgctggacgagctgcgggacgatgccgcgtggtatctgcaactgagactttcagacggcaaggcgctggccagagtctacgacgcggcgggcctgcctgaagccggacgctcccaaacggaagccgtggcgcctcgtcctttactggaaaaagccgcgaacaaggccggggccgcgtatgacaaagccgcccacgccttgaacgactaagggggccgtatgtccaccgattctccgaacagttttgaaccgttgccgcccgatggtgtggtcaaaatgcggcgctggcctctgtatgccgttatctgcgccgggttgctgctggttggtgtgctcgtctacagtgtgaatttcgcgcataacccggaagaggaggccgcgcaaacccaaaaagtagatattaaggaacaggaaaacccgttgattgcgggagaaggcaacgggctggcgttgcctcctgccggttctcaggggcttgccactcctcaagcggccgtttcaggcaagccggaaccgttgatcgtggtccgggatgacggccagaaacccgccgatcagcaggaaagagacaacatacgccggatgcggtcgcaagcctacctttcggcgctgtcctcgcctctggccgtcaaaaaagcgagtgtgacggcgggcggcgctccggcgcaatcgtccagcccggaacccgtaggccgggaacagggtaacggcattgacgcctcggcgctgcgggataacggctacgatcccgccgccaacaaagacaaggaggctttttttgatcgctcttcggcgcgggattcggcttggattctgccgcactctcggacgccggggcaacctcttgaaatcaaaaccggggcggtgatccccggcgtcatgctcacggggatcaattccgatctgccgggaaccattatcgcgcaagtcagtcaaaatgtgttcgacacaggcacggggcaacaattgttgattcctcgcggcgcaaagctctacggcgtctatgattcccgcgtcgtttacgggcaagagcgcgtacttgtggcctggaatcggttgatctttcctgacgggtccgccgtcaccctgggggccatgcccggcgcggatatgtccggttatgcggggtatacggacggaatcaacaatcattatcttcgtatttttggttccgctgcgatcatgtccctggtcacgggcggcatggcctacacgatggattcaatgggcggcgataatggcgggaacaatgacaatccgacgctacaggatgaaatggggtccgccctggccgcgcaaatggggcaagcctcgctccaattgttgcagaaaaatttgaatatcacgcctacgctggaaatacggccgggctatcagttcaatctcgtcgtgacaaaagacctcgtttttcagcatccttataatctaaagtaattcgccttatccgctgcgggcctcgcgtcccaactcagcgccgcatgacggcctcttttatggagtgtcgttatgtgtgcgtcttccacgcaacacaattccttcggccttggttccccggaacgctcccgcaattggcgcttgctgtatctgcctttcgtgctgctgctcggccttgcctgcctgattctgaccacgcaacgggtagcggcgttctacgggtacgatccggccttgggcgcgtcctggggatcggccttcggcgtccgctggtatgcgccgtgggcgattttccactggcaagaggcattcggggccaatgatccgggcttcatggaacaggccataacccaaagccaagccctgttcctctgcccgcaattcctactcctcgccgtgtggttcacctttatgaagaagttgaaaggtgacgcccggctacacggctcggcccgatgggcgaatgaaaaagagatccgccgcatgggctatatggacggaaagggcgtgtatgtcggcggatgggtcaagcacattacgggctttgcctactggtccgccgtggcgcgtcgggccgtgctggtctggttcctgcgctcatatcgtccgcccgtgcgtcgggaacggcaaatgtacctccggcacaacggcccggaacacgtcttgtgcttcgcgcctacccgttccggtaaaggcgtgggcctcattctgcccacgctgttggcctgggaaggttccacattggttttagacataaagggcgaaaactgggcgcttacgtctggtttccgccgttcgcaagggcaaacggcgctccggttcgacccttcggatatgtccggcgcgtccgccttcttcaatcctatggaggaaatccgtcttgattccatgctggctattcccgacgctcagaatatggcggctatgctggtcgatcctgcgggcaaaggtcttgaagaccattggagcaaagcggcgttcgctatgctggccggggcgctgctccattgctgcatcatggtccggcatgagcaagaccgttgcgccacgctctacgatctgggctgcatgttggccgatgaatcccgcaccattcagcaactttttgatgaaatggtcaaaaccgaccatgcggccatgctgcataaaatctttcctgacaccgcgcccgatggggacgccggggactatgcccagaaagcccatgtcttcatcgcgtccagtgcgcgggaaatgctcaataaggcggaaaatgaagcctccggcgtcgtgtccacggccctgacaaatcttgccctgtaccgcgatccggtggtggcgctgaacacgtctcgctgtgattttcgcattcatgacctcatgaacgcggaaaatccggtgaatttgtatcttgtcatttccccggctgacatagatcggatgaaaccgttaatccggctcatggtggatatgattatccgccgcgtctgcgcgaaaatggagtttgcggatggttccagcaaagccgggtacaaacaccggcttttgctcatgctggacgagttcacgtccctgggcaagctgccgattatggaaaaagccttggcctacatcgcgggctatggcggcaaggtctatctcattgttcaggatattacccaattgaatgcggtctatggcaaagaaaacgctttaatggccaattgccatgtacggatcgcttacgccccgaacacggtagaaacggcggaaatactgtcaaaaatgacgggaaaaactaccgttgtcgaagaaaaggtgtcgttgtccggctctcgaaccggccacctaaaaaatgcctcggtcaacgtcacggaaacggcccgtaatctcctgacgccggatgaatgtatgcgcttgccgggactgtccaaagacgaacagggccacgccacgccgggggatatgctcattttcacggcgggctattccgctatttacgggcggcaaatcctctatttcctcgatcccaccttttcaacccgcgccaaaattcccgcgcccggcacgactgcggcctatccatccggcattagtgattccctgtatttcccgcgtccggcctcctggtatgcggtcacgtccgcggccgctgcttcgcccgcgtcggcccacacttccgaacaagtagaggctgattatgcccgttatctcgatgcgtcctaaccggctggccacgctggcgctgtccggggcggcgctgatcctgctgtgtttgtgggcctggggtgcgggctaccgttgcaatcccacgccgtccctcccggtgggcttgtaccggcttgcggccggcactccgcaacgcggcgagcctgtggcgatctgtctgtccgggccgtttgccgatctggcggcggaacgtggctacctcaaacctggttcctgtccttccgggctgcggcctttgctcaaacgcttggccgggctgcccggtgatctgatccaggtggaccgggacggaatccgcgttacgcctgccggttctcccgtggcctgcctgtggctggaaagccggatcaagactgtggaccggcacgggcggccggtggtttccgcgctgacctccggcgtcattccggcggggtctgccctggtcctgggcgaacatcccggcagtttcgatagccgttatttcggccttgtgccgctggactcgctccggcgcacggtgccggtttttgtctggactccaaaggagaagaatcatgactgacaaggaaaaagactacttgaaagccgccgtcaatgtggtggcgcaacaggtgacggacaatccgctttggggtggcgtggccgtcgatcctgacgtggccgactggatgggtgcgttcacggaatccgccgtgacgctggccgatcttgcggacgatgttcttttgagcgtcaacgctcagggggatgtagtctatgaaggatgacaagcccaaacgtcccccgttccatgtagagtttgcggaaaaaatcatagaacgcctgaaagaagggaccgcgccttggcaaaaaccttgggaagacggcgggcaaatcgttgcggcgcataatcccgtttccggcacggtttacaggggggtgaaccgggtggggttggctttgtccggctatgacgatccccggtggatgacatataaacaggcacaagaggcggggtatcaggtccaggccgggagtaaatccacgcccgtggtgttttatcagtggacgcgggaaaaagataaaatggatgaggacggcaagccggtcctgggggaagacggcaagccggaaaaggtccatgtctatctggatcggcctattgtgcgtttcgcccatgttttcaatgcggaacagatagacggggacttgccgccgctctcgttgacgaaaaatccccataaatgggaaccgctggaaaaggcggaaagcatcctggctgcctccggctcgaccatcaaacacgatcaaagcaatcgtgccttttaccggcctttgatggatgaaatccacctcccgcccaaagtgaattttgacgaaccgggcaagtattacgccacagcgctacatgagcttggtcactggacaggccatgaatcccgcctgaatcgggaaggtggaccgttcggctcagaaccttacgccaaggaagagttgcgggcggaaatcgcttcatggatgctcggacaagacataggcgtccgccacgatcctgatcagcatgtggcctatgtcgcctcctggatcaaagcccttgaggaagacccttctgaaatcatgcgggcttgccgggatgccgaacaaatcaaggaatacgtcctgggactggaacgggacaaggaacttggagacgagcgcgtcaaaacgccggaagtcgagcggcccgatacgccggaacccatagcggctatgggaacgccggatggggcgcaggaacaatccgcgccgtcacgtccagccccggaaaaaacttggttgtctgtgccataccgcgaaaaggaacaggccaaaagcctgggcgcgaaatgggataccacggaaaaaagttggtatgcgccaaaaggggcggatttagccaaactggccgcatggctgccggaacatgcgcggggtaaagcgccggaacctgcttccccggaacccgtggcggcaatgggcgtaccggaaccggcgcggaaaacggctgcggaaaaagtttggttggttgtgccgtttcgggaaaaggaacaggccaaacgtctgggcgcaaagtgggaccggtcgaaaaaatgttggttcgccccggaaggcgcggaccagggggcgctttcccgttggctgccggaaccgggtaagagtcccgtgcgtgtgccggggttgtcgccagaagccgaatttgcccggatgctggacgaggcgggctttgatatgcagggacgggaacccgtcatggatggaaaaattcaccgcgtcccgctgctcggcaaactggccaaccccggacgggctgacggtgcctattgcggctatctggatcatctcccggccggatgggcgcaaaaccatattaccgggaaagtgttgcactggtcagcaacaggccatgtcatgacgccggaagaatcggcggaacggcgggcggcaatggagcagcaacgggaagagcgggaacagagtatgcgggagtctcgaaacgcggtagcgaaagaatgccgggacttgtgggacaaactggaaccggcttcgccggatgctcactatctcaaggaaaagggagtgccgtcctttggcctgcgacaagatcaaaatggttttctggcggtccctctgcggaatactgcggatgagctgcgcggctttcaatctatttcgccggaaggggaaaagcgtttcaaagtcggcatggaaaaaaagggaaatttccacaccatagcggcggaaggcaaagacttctcgcaaggggaaatcctgatctgcgaaggctacgccacgggtgcaagtttgcacatggccacggaaaaaccggtggccgtggcgttggattccggcaacctggaacccgtggccaaagccctgcgggaaaaattccctcaagcgcaaatcaccatttgcgcggataacgatcacgcgctcaaacggaacggcaaaccttacaacgtgggtatggaaaaagccaaagccgccgccctagccgtgggcggcaaagtggcggctccggtgttcaatgaggaggaaaaggcaaaaggcttgacggatttcaacgatctgcacaagtcgcgggggattaaggaagtacaaaaacaagtcggcctatcccttctccatgatcagggaaagacacgggaactgtctttatgaacgtacatttttccagccgtaaaaccgattgggcaacaccttggacgcttttccggcaatgggacacactgcaaggcccattcacgctggacgtgtgtgccacagccgaaaatgccaaatgtgggcatttcttttccccgaaagacgacggactctctcaaaattggagcggtgtttgctggatgaaccccccatatggacgtgctatttcgcactggatcgctaaagcgattgtggaggtgaacacagccggggtcaggcgtgttgtttgtcttctccccgcgcggacagataccgcatggtggcatacctttgttattccgcatggcgctgtgcggtttctgcggggacggatacgcttcgagggcgcgccccaacctcgcgccgcctgacggtcttttaaggaaaagtcatgtgcgtgaaattgttgattcttgagtctcccggcaaggtgaaaaaagtacagtcgttccttggcccggattggaaagtggttgcttctgtcgggcatgtccgcgatctgccggtcaaggaaatgggcgtggccgcaccggatttcaagccgcactatcagcccacgaagcgcggggcggatgtgttgaaacggctaggggcgctggcaaaacaggccgatgttgtttatctggccacggacccggatagagaaggggaagctatcgcgtggcatgtggtcgatgccctgaaactgaaggacgcaaagcgcgtcacctatggagaaatcacggaaagcgcggtcaaggccgctgtccagagtccccgcgccattgatatggctttggtggccgcgcaagaggggcggcgcgttctggatcgcttttgcgggtatctggtatccggcccgctctcccgcgccgtgggtacgcgcctttctgccgggcgcgtccagagtccggccttacggttggtggtcgaacgggaacgggcaatcacttcctttgtgagtgtcacgcattacggggcggaactgagctttgagggctggaaagcggcctgggtggtcaagtcgtggattgagccgggacaagaatattttcaggatcaagccctggcagaaaaaatggcgggcctgcgctccttggaaattctggactgtgaagaatcggaagcccgcgtcgcgcctccggctccgttcacaacgtccagcctgcaacaggccgccagcaatgccctaaaattcaaaccgaaacaaactatgtctctggcgcaagccctctatgagcaaggccacattacctatatgcggacggattcttctaatctctcgcaagaggccgtagcggtgatccgcgcctatgccgatgggcaaggctggccgctgccggacaagccgcgtacctggaaggccaaagacggggcacaagaggcgcatgaggcgatccggcctactcatatagaagaggaagacgccggggaaacggccgatgaaaaagccctataccggctgatccgcgttcgcgccctggcatcacagttggcggattccgtctacgccgtgcgcctgctccggctatctacggatgtggacggcaaacaagccacgtttgaggccaaaggccggaccctacaggaacaagggtggaaagtgcttctggctgcggatgaggccaccaaagacgacgcggaagacgagccggacaatcccgtcccggcgctgcaatccggcgcacaggtcacggcgctttccggccgtgtcctgacgaaaaagacaaagccgcccacgcgctacacgctggcgagtctggtgcgggaattggaaaatagaggcataggccgtccgtctacgttcgcggccatttgggacactatccaaacccgtgaatacatcaaagaagaaaaacgctatctggtgcctactcccttgggggaacaggtggtggatgccctggtgaatgcgttttccttcgttgattatgcgttcaccaaagaaatggaacaggcgcttgatgatattgccagcggcaagacgaaatatcagcaagttgtcgctacggctttcaatcggctgatggatgaggtgacgcgctttgactcagcacatgccgtgctctgcccagagtgccaaagccccaaactgcggcatatagtcaaagaggacacaaaaaatgtgcgcggctatgacttcttcgcctgtcccgactgtgaagccacgtttccgaatgtggacggcaagcctggcccgaaacaggatcgaaaaaagccggaactgtcggaatacaaatgcggggaatgcggcaagcctctgatccgtcgcatggggacgacccaaaatggcaagccgtatgatttcttcggctgctccggcttcccgaaatgtaaagccaagtatgaggtgaaagacagcaaacctgtataatacctaattgtggttccagaatttttttggggaatatcaccaaaaattgatttcctattcttgacctccaatctt

SEQ ID NO: 7196 - DNA, 29901 bp, Unknown
  gut microbiota DNA sequence
aagaagaagaagaagaagaagaagaagaagaagaagaagaagaagaagactcttcctttgcaaagcaaaaaggctgcgaacatccgttcacagcctttcgttttttcaacgggactccctccgcgcggcctccccgccagtcaaagttttcgcggggaaagggaggggttcggggaggggaaggggggccttttccaaaaggctccccttcccctccccggttgctttattcttcgccgtcgaaagcgaggttggcgcccatgacggggccatagtacatggcggcgtcgtcaaggtcttcctcgatgcggagaagctggttgtacttggcgagacggtcgctgcggcagagcgaaccggtcttgatctgaccggcgttcacgcccacggcgaggtcggcgatgaagctgtcctcggtttcgccggaacggtgggaaacgaccgtcgtgtaggccgattccttggcaagctggatggcgtcgagggtctcggtcagggtgccgatctggttcaccttgatgaggatcgagttggcgatgccctcttcgatgccttcggcgaggatatcggggttggtcacgaacaggtcgtcgcccacaagctggatgttgtcgccaagggcatcggtcagttcgcgccagccgtcccagtcgtcttcggcaaggccgtcttcaatggagatgagcggatacttggcggtgaattccgccagccattcgatcatttccgggctgctcagagcgcccttttcgccgatcatgtacttgccgttcttgtggaactcggaagccgccgcgtcgatggcaagcaccacttcggagccggggttgtagccggattcctcaatggccttcaggatgtagctgaacgcctcgtcgtggttcttgaggttgggagcaaagccgccctcatcgcccacgctggtgatgtggccatcggcggcgaggatggttttcagagtatggaagatttcggagcccatgcgcaggccgtcggcaaacgtgtgcgcgccgacgggcatgatcatgaattcctgaatgtccaagttgttgggggcgtgagcgccgccgttgatgatgttcatcatgggaacgggcagcaccttggcattgacgccgccgatgtactggtacagcggcagggccagggattcggcggcggcgcgggccgtggcgagcgacacgccgagcatggcgttggcgccgaggcgggacttgttgtccgtgccgtccagatccagcatagtgttgtccacctgcacctggcgcagcgcgtcgaggcccacgatcgcttccgcgatctcggtgttcacgttttcaacggccttgctgacgcccttgcctttataacgagccttgtctccgtcgcgcagttccagcgcttcgcgggtccccgtggaagccccggacgggacggcggcacggcctacatgaccggaatcaagggaaacttctacctctatcgtaggattgccgcgcgaatcaagaatttcgcgggcccaaactgaagcaatcgtgctcatggtccagctctccgttctgcccctgaacagtgtgtgaccttggggacaggggcaagcctcccggtcacggaacatcttttttcacataccatcaaacgcggggcactgcaatgagccgccgctccggatcccgcatcgccttgccatcgcaacacatttgccacaaagccctctggagggcaggcatggcgagcacgctccgccccctcacatggacatcacgcacaaacggatgaaggcaccggaagggaaactctcccaagcgggacaaggcggattcaatggcttttcagagttcatgaaagcttcctccatatgtggaaaacgtatttccctttcggaacgcctcgtcttgaaacgtctttccaaatcgtttaccgtccattctttggagaaaacccgggaagccctcccgggaaccgtggtttcccatatcccaggagatatcccatgcgtacactcgtgctcttgatggccgccctgtttcttgcggccgggctggcctccgcgccggcccaggccataggcgtccaaaaagaaatgaaggtcggctttatctatatttccccgatcggcgagggagggtggtcatacgcgcatgatcaggcccgcaagttcctgagctccctgcccggcgtgacgacctcgtatgtggaaagcgtacccgaagggcaggacgccgagcgcatcatccagaacatggcccgtaagcattacgatatcatttttgcgaccagtttcggctacatggattccatgctcaacgtcgccgaacagttcccgaattccacgttcatgcactgctccggctataagaccgcccccaacatgagcaactatttcggccggatctatcaggcccgttaccttaccggccttgtggccggttccatgacccaaagcaacgtcatcggctacgtggcggccttccccctccccgaagtcatccgcggcatcaatgcgtttaccctcggcgtgcgcgccgtgaaccccaaggccgaagtccgcgtggtctggaccaagtcatggtatgatcccgccatggaaaagagcgtagccaagaacctcatcaaagagggcgcggacgtcatcgcgcagcatcaggactccagcgggccgcaagaagccgcacaggaacaggggacctactccatcggttacaataccgacatgagccgggtcgcgcccagggctcacatgacctccgccatatggtcgtggaaccccgtctacgaaaacgtcgtggagcaggtccgcgccgggacgtggaaaaacggctccttctggtacggcatggaaaccggcgtggtggatatcgccccctacggccccatggtcccgcaaaacgtgcgcgacttgaccgaggcggccaaggccgacatcaaaagcggcaaactcgttgtcttcacgggccccatcaaagatcagaaaggcgttgagcgcatccccacgggcatggttccttccgacaaggaactgctcggcatggattggttcgttgaaggcgtcatcggcacgatcgactagagaacgcgtcttgaaaaggaggagccccggaatggcaggattcccgtttatgagacaggcggaggcattccgaagctccttgccgtttatcctgctgctggccgttttcatcctgccgtgccccatgagtgcggcggcgaagccacggcccgccattgccttcgtccatctgctcctgccaccgggcggggagccccatgcctccccggcgggctggatcggcagccttgaccgggcgcgcgatacgttggaatccctgcgtatccccaccatcgtatcttccgcctcgcccgggaacgccgaagatctgaacgagctttccgagatggatccggaagtgctgatcaccacaagccccctgctctacgccgcggcctgcgacgtggcgaaacggagcccgaataccgtgttcttcgcctgtacggatgagaccgtgcatgacaacatgagcgggtttcaggcccgcacctacgaagcgcattaccttgccgggctgatcgcgggcgcgctttcggaggatggggtcatcggctatctggcgaacgatccctaccaatcgaaagcctcccgccttcgcaacgccaatgcattcacactgggcgcgcaaaagtccaaggcggcaatccgggtgctgtacgcgcccggcaacgaccccgatgaagaactcaaaacgctgattgcagccggggccgatatcgtcgatttggaacgggcactcccgtcccttgtggagcgcctgcgcgaacattcggtgcgctatgtggggacggcgggccgtaccgtcgatcctctatgcctcgccgcgccggaatgggaatggagcaatgccttcggagatctgctcacgcaggtacgtttcggcatctggaggccgcgcaacgtctcttacggcatcaaagaaggcgtcgtggggctttcccccttcggcccggccgtacccgaaaccgtgcgggttcgtgtccgcgaggcgaaggaggccatccgtaacggggcttccccattcgaggggcctgtccgcgatgtttccgggtccctgcgcattgcggaagggagcgtcccggatgacgcaaccctgcgcggcatggactggagagtccaagggctggagcctcttccgctcacaccggacggcctataaaggcaagggctttaaggatgccaggagcagggggaaggccttttatgaaggggcatcatcccttttccaacgcatccgcctcttttacatcctctaccggaaaacgagcctgaaaaaagccgcaccctattgaaacgcgcatcacgcatcttcctttccgtttcacgcccgtagggaaacagcaccagccctgcggcatatcagccgactccccatcaaccgggagcctagcggattttggggagaaaaaggggacacggcgtacctctccccttttctctttccagcggcctgttgctgccattgagccatgccatacccaaattgacgatgccatgcggctcctgtatggctacaccatgagtgacgaactggaacattccgcaacactccgggctcgtgcggcctgcctcagggaacacaggcttcacttcatcctgtgctttggggcgttccttgccggagcaaccggaagcctgttgacggcgtcgtttctcaaagcgaacgttgccgccccaaacggcacactgctcgccgaggggcttgccatgctcggtgtcatcggtctgggcggcctgctctccgctctcttccgctgcctctcttcccggcacagccgcctcggcaaatccgtcctctcccaataccctgcggaatccgtggatccgaaggccgtttttcaggaaatcgatgccgatatcctccagcacggcaaacggttcggcgggctgtccatcggaaaggaatgggccatttttcaagaggccatgctcatttcccgcatccggggcatcttctccgacatcctcgaaccggaacgcgaacacggcgaaacggcatacctcctttgtctggtggacgctgacggctccatactggaagcgttccttccttcccggagcgtactggacaaagcccgcgcctgcctgctcgaaagcgtgcccgacgccgtttccggcggctttgaagccatgaccgacttcatgaacatggacgacgagggcaggcgggaaatcaaccgccgggtgaacgcgcgccgacaggccggaaagcccgtttccttttcctatgccgggcccgacggcgttccgacgtcgctggctacggaacagaccgtggaagaaggcatcgcccgcatcaagcccggcgacatgctggttctgacgcccctttcgccgctgttcctgccttccggggaggaatgcctgtatatcgcctgcgagcaggacgcggggcagacggaaacgctgcggctttccgcctacatacgtcgcggtgacgactacctgcgcgtgttcagggagatgcccggacgcgaagccggcctcctgttccgggactgcttcatgcgccgcgccgtcccggacatcgccgattggcatgtgcaatcatgggaaaacgattggcccgaagagcgcccgatcctgttcgtggacgacaagcgtttcgaaaacacatcctttgaggacgtggaagccgcgctcgacggcgtggacggcggcgattacggctcgttcttcctgatgttcccgggcggctatgatggctacctctccctcaacggcaggcaaggggacaactatgtggtggaagccgccctgcctgacgaggacaggtacttcaggatcgccacaccgcgccgggctcaggttctcttctggttttcaggctattacgaaaaatcaaggcttccctatatggaagaatggaaagacgtcaccaaagaagtgaaaaaacggcgcggggaagccgactgaagggaaaccccggctgaacggcccctgtggagacaggatcatggaaaaggtgttttcggacaagaccgaagaaggcatccggcttatatggatgcagttcgatcctgaaaaaacggccgagggcgtgcggctcctgcgcgaggctgccgatgcgggagacccggacgccttgtgtttccttgcccgcacgtacatgggcgagcggtacgtttgggaatatgccgcgttggaaatcaacggcgaaaaggccgcgtccctcctgaaagagggaatccgccggggcagcgcctgcgccgcgctcctcgccatgcgttgcggggagctgacgccgtcggcgcgcaaggccatgcccttcgcctccctgaaagaagcgcgggacgacgtactgggcaaggccgaggcggggcatccgttctgccaatacatgatcggcaacacgtattacttcggggactgtttcgaaatcgacggcatcgatccccaaacggccttccatgacccggacggactgcgcgcggatacggcccggcgggcccttccttggcttgaaaaggctctcaatggcggcctctccgatgcggccaaaaacctctacaacctgttttccggttcggaaggcttccccagggaccggggcaggcaatgggaaatagcccttcggggcgcgtcggcaggcaatccgtactgggaggaacggtgcgggaaaatgtgccgcgaagaaaacggcagggaagccgaagccatgcgctggttccggcaggccgcgcatcacgggcaggccagcagctggtttcacataggctcccactatgagcgcggcctcggcgtagacaaagatccggccaaggccgccgaagcctaccggaacggcgcggaaaaagggtcctccgacgcacagcaggcgctgggcatcatggccgctttcgggcggggcgtaccgcaggaccccgcccaagccgcctattggctgcgtctggccgctgacgacgaaaagcctcttgcctgcggcgtattagggcactgctacctgcgcggcctcggtgtccagcaggacgatggggaagcctttgccctgttggaccgctttgccgaggcatacgacagggaaaagcccgatgacggagaaacaagcacgtaccctgacgagcttgtgggcatcgtctacaacggccttggggaactgtacgccgatgggcgcgggggccccgtggacatcaaggaaggcatacgatgctttcaggccgccgccgagctgggcaacggcgacgcccgacgcaatctcggccgattcaaaaggaactggttcggcaagtgggtgaggaaatagccgcaagcgaagacctccgcctcccccagcaagatcatgcgcatgtccggcggacggtttcatcggcaccccggtgtccgcgtcgtttttccctttccccttcgctttccgggccaccgtgtccgcccgccttctttcccatcctcttttcatggccccccagtacccgaggcggttcccccgtcagccctccttctcggcaataccgctacatatcaataggatactggcgcacgttgctccggagcgcggccctgctcaaaaagccctctcgagaagctcccaagggtgccaccccactttgccgtcccaaccgaaatacggccttcgtgtggcaacaagccgctgctccgcaagcaattgaatggccaccggcggcgtggcgagcttcgaggccttacgcttcgcgccgtcgagcgtcccttcgtactcaaaatgcctcccatcgcccaaacggatgataaacaggtgttctgacttcatatatagggctcctgttagtctaataaagaagccatgctatgatagaatatacggtctttcaaggacgatgagatgttttatgattcaaggtggtttcatgctcatgatacgaagcggccttccctccggcccgctttcgggccatctctctgccccctccgcgccagccgccttggacaccccgatcttccttgcgccgcgccccattcaccgccttctcgtgcatctccactttgaaatcgtcacatcccgaaggcagtgtgcgggaaaaaattgcaggcacaggatccgatacgtacggaagcctttggagaaggacggatagcggaatggagaaaggaagaggccgctctgacgggcttggagaaggagaaacttttctcgagaactccccatccccaatgcctccagacgctttcagcgctcatccgttttgtatcctgtacggcgacgcccggacgcccttcctccttcacggatacccacgcatacggattgttcgtacaatcaatacaaacgtcacaataaggccactgttccgccacgaacggcgtctaggttctcccttgcctcatcctgaaacggatcaacaaggagaacctccatgaatgccgatcacagtcgccgcaccttcctgctgggcgggctggctaccggagccgtgctgctcgccgggaaaaccttcctgcacccttccgcagcccacgccgccacggaagccgtcacccttgacgtatgcgtcaacatgacgcccgaggaaatggcggacagatcccagtacgtcatggccgcgtggaaataccttcaggacgccgccgcggaaatcggcaaccccggcttgcgcgccgccgtactggacatcatgaagaacccggccccgctgctggccgaaggtgacgccaaggccatcatggcggaactgaaggggcaagggctgctcgctcaggacgccaaggccgttttcccgacctgcgccagcacgaagaaaagccctcagcctttttacaccgcgcccggcagcggctggaacagccaccatatttatcccggcgggctggtaacgcacacggccctcaacgttgcctcctgcaaggccctgtacgacaactatgccgatatgttcggcctgaagctcgaccgcgacgtggtgctcgcctcccagcttctccacgacctccacaagccgtgggtcttccaatggcaggcggatggaacctgccgcaaagaagagccccttgccgccaccggcgaacaccacgtcctcagcatcgccgaaagcttgcggcgcggtctgtcccccgaactgtgcgtggcgcaggcctgtgcccacgatcaccccggcgcggccgcgtccgagcaactggtggtgggctggctgaaggccgccgccgtcatcaacggcaaggatcccttcaaggccgggcttgtggaaaaggacggcaaaaccctgcccatgccccgccgtatggaaggcttcgtcacccacctcgccgaccatgactgggtgctcagcgtacctgccgcccagtggaccgtggacgccctcaagcaggtcgccgtccgctcctatggcatcaaggaagccgacctgaccaagaagcccttcaaccagttccgcaactacgtgctttcgcagaagaccgccatgcagctttacggcgcgtacagcaccaaagggctggacggattgaccgccgaagtcgctgaaatcgtacgcgcctgattttcacagtgtttctcaacaaaggaatctttcatgaacacacgcatcattcccgccctgctgggcgccctgcttttctccggcgtcgcggaagccgcgccgagcatttatccggtggatacggcccgcttcctgggcgggagccgtttcgacttcaaggtggaatttgacggcgaactcgccgaaaaggacgccaaagtcctgatcaacgggcaggacgccaaggccgttctgggcgcgaaacccgaattcatcgccaaggaaaagggggccgacgcttccgcgctgctgctgcgcggcgcttcgctcaagcccggacagtacaaggtgacggtggagagccccaccgggaaagcctccgccaactgggacgtatacggcacgcccgacaaacccgtcgccaagaacgtcatcctgctcatcgccgacggcctgagcatgggccaccgcacgagcgcccgcctcatgtccaaaggcgtgaccaacggcatgtacaacggcaagctgtcgatggacaccctgccctacaccgccatgctcggcacatgcagcgtggattccatcgccgccgactccgccaacaccgcctccgcctacatgaccgggcacaagtccagcgtgaacgccctcggcgtctacgcggaccgtacccccgactcgctggacgatcccaagcaggaaaccatcgccgaactgctccgccgcacgaccggcaaatccatcggcgtggtttcggacgccgaaatcgaggacgcgaccccggcttccgtggtcgggcatacccgccgccgcgccgacaaggccgaaatcgtggatatgttctacagcgtgaagcccgacgtcatcatcggcggcggttccgcctacttcctgcctcagaacgtccccggctccaagcgcaaggacgacaagaactacgtcgaaatgttccagaaggaaggctatgccctcgccacgtccaacaccgagctttccaaggccgtgaagggcaaccccgacaagctgctcggcttattccataccggtaacatggacggcgtgctggaccgcaagttcctcaagaaagggaccgtgtccaagttcccggatcagcccgatctcaccgactccatgcgggccgccctttccgtgctttccaagaaccccgaaggctttttcctgatgcttgaagcgggccttgtggacaaatacagccatcccctcgactgggaacgcgccgtctacgacaccatcatgttcgacaaggtcgtcgccatagcgcaggaattctgcgacaagaaccccgataccctgctcatcgtcaccggcgaccatacccactccatcagcgtcatcggcaccgtggacgacaacctgcccggcgagctcatgcgcgacaaggtgggcatctacgccgaggccggctatcccgcctataaggacgaaaacggcgacggttaccccgacgacgtgaacgtgtccaagcgcctcgcggtgttcatcggcaactaccccgaccattacgaaacctaccgcccgaagatggacggccccttcgtcccgtccgtcaaggatgagaagggccattacatcgccaatgccgcctacaaggatgtgcccggcgcgcagctccgcatcggcaacctgccccgcaccgaatccaccggcgtccactccatcgacgaccttgtggtcggcgcgcgcggccctcatgccgacgccttccggggcttcatgaacagcacggaagtcttccgcatcatgtccgaagccctcgcgctcggaaataagtaggaaaaagccgaagggagggcgcttcctgccgaagcccctccctctccttttgccttcttccacaggaaccatccatgaaaaaactgctcctcctcttttttgccctgctctgcctgacgggtacggcgaaagcggcgacggcggaactgtcgttcgacgaactgtatagcgggggcggcgtcctcgggctccagttttccgacaaggtaaaaaaccttgccggacagcgcatcacgatcaaaggattcatggccccgccgctcaaggccgaggcagccttcttcgtgctcacacgcgaacccgtggccctgtgcccgttctgccaatccgacgcggactggcccgacaacatcctcgtcgtctacctttcctccagccagagcttcgtccagaacaataccaccattgaagtggagggcgtgctggaaatcggatcgcaccgcgacggagacaccggattcatcagccagctccggctgcgggacgcccgcttccgcacgctgtaacagccgacccaagcaaggatcttgtatgaacgggctcgaacttcaggacatcctcctcacctttcccgaaggcgggcggaggcgcacggtcctcgacataccgtaccttaaagtgacctccggcgagcacatcggcatccggggcgcctcgggatcgggcaaaagctccctcctcaacgtcgtgagcgggcttgtgcttccggacaggggaaccgtacgctggggcgcgaccgtacccggcgcgctgcccgaacacgaacgagatcgctggcgcgggcaacatatcggtttcgtctttcaggacttccagcttttccccgagctggaagcgctggaaaacgtgctcctgcccgcaaccttcaccggatggcgcatcccggaagccttgatccggcgcgggcgcggcctgctcgaacaaatgcacgtctgccccacccggaaagtacgggcgctgtcgcgtggggaaaagcagcgggtcgccattgcgcgggccgtgctgctcaaaccgggcatcattctggcggacgagcccacggcaagccttgacgaagccaacgccgggcaggtgagcttgctgctctccgggtacgcccggacgctgggcagcacgctccttgtcgtaagccatgatgatgccgtgctggcggacatggacagggtgctcgatctcaaccggggcattgtgcgggaggcggcatgaatccgttgatgctgatcaaaggcgaactgcgccgctccttcgggggcattctggcgctggcactggtcctcgcgctgtccctcagcctcggcgtcggggtcagcatgaccgaacgggcggtacggcagggcacggcgcgggcgggcgacgccttcgaccttctggtgggcgcgcagggcagcagcgtacagctcatgctcggggcggtctatctgcgcccgcagtcgctgccgctggttccggggggcgcggttacggaaatcctgacgcaggaaggcgtcgtctgggccgcgccgctggccttcggcgaccgttggaacgcgtccccgctggtggggacgaccacggatatggtcacgctcggcggcaaccggacgctcgcggaaggcagggcattcgccgcacaggacgaagccgtactcggtgcgggtgtccccctgcggctcggagaggcgttttcccccatgcacgggcaggtctccgcatcccacaacgaacacggacatgtccgctacaaggccgtaggccgcctgccggaaacgggcacgccgtgggacaacgccatcctcattcccatcgaatcggtctgggccgtccacgatgcgcttcccgatgcggggcatggcctgcccctcggacatctttttgaagggaagggttccccgctgcccggcgtttccgccgtggtcgtcaagcccgaaagcatcgccgccgcctaccgcctgcgggccttttggcagacggcgaccctcccggatgcggacggcaggccggtgaacatgcagggcgtctttaccggcgaggtgctgaccgagctgttcgccaccctcggcgacatgcgcgacatcatgaccggcatggcctatgccgcgcagttcgtggccctgtgcggggtcatgctggtcggcgggatggcggtatccatgcgcaaacggatgctcggcacgctgcgtgtgctcggtgcgccgcgcgcctatctggtgctcagcgtctggtgcgtggtcagcgtcagcatcgccgtgggcacgctggcgggcctgctgttcggctgtggcctttccgaaggtgcggcgctgctcatgttccgccagaccgggatcatgctctccccgcaacttaccctcgccgaaggttcctttgccgcagcttccttcgcgctcggctccttgtgcgcgctgttccccgcctatatggtctaccgcaagacgggagccgtcgcattgggggatagcgaatagccctttcccaagaaccgacgcggcattttaccgcttccgcgcaggcaaagcgagccggtacctctatccattggctccggaatccgcacgactccgaaaactggaacacggaccagacgcaaggcttctattccgacttctatcagttcgaggaagacgccctcgacgaggacaagctcggctccaacgcccatccgcaggatcaggaaatagcgacggcaccatagccgccctcgccgccgaagcctatcctccgcacgaaaaaactctcagtggagcgataacggcacagcccgcatcgaatgagacggaaagcctcccccgaagacagaggaaggctttccttttggcatagggtggaacgggaggcacggagtaagcggaggcaagatgtccggggctacgaaaaggctctaccccgtctgcgggcgcattacttcgccagtacgggggagagggctctttcctgccgataggagaggtccacccaagagagttcgcggatatggcggaactccatcctggagccgcccgcaagattcgcggtaggctggagggtgcccgcctgctcacgatagggctagagggatggtttttaccctttgaagaggggcaagcacgccataacataccgcgtaccgtgccattgagtaccgcgtcacctaaaaaagcggcggaaacacgccacacaataccgagtaaggaaggaaacgcgccgctcagtaccgtaactatatattctataaaagaaggaataagagagatcccggttaatatgaaaagggaacctctccccttgccggcccccaagatagggactcacgttcggaatactccgaacgctcgacgccgcaccggggagcatgacgaaaaggccaccgcgagagaaggcagggggcagcctttgaagccgatcctgctatgctcgggctgtacaggcccgacttgaacagaaacgaagcacaggggaagcacggcagaggtaaggactcacgaaatagctggagcggttcgggaacgggccacctctttttgtggcctcccctccccgatgttgaggggagaaggaatccccctgtattgccaatctgaaccccggttttggggaaaatgactaattctgggcaaaatacctctcggaggcccgcgggagctttggacggggtacaagagctggcgcggcgggcgtgggattgtgtatagggctacccatgctgggaaccttcaccacccttcaccttcatacagaaaaaaccgggacagaacgccggaccataaaaaagctctcacagtgaatatctgtaagagcttgattttgatggtggacccactaggacttgaacctaggacggaccggttatgagccggtggctctaccaactgagctataggtcctcaggggcgtcattcggtcagaacaccctcttcaggagcatccatctgcatggccccgacagggcaaatacggatgcaacgcgcgcatactgtacacttttccttgtcgaatgcaagaaggcgcgttttgatgtcgacggtcagcgcggaggacgggcacagagccgtgcacatgccgcattgcatacacttgtcctcattatgccagatccgctgcgccacgggcgaaaccagtacgcccttctcccgcaggtagccgatccccttgtcgcaggcatctcgtgagcccgacagttcgagagtcaaaaaaccttcctgccgcggcgtgatctgggcggtactgatgttgaaatcgaggtcaaacagccgggtcaggttgcagaccaacggcgcccccgaaatggtcgggggaaacgtcagatgcacattggtacggtagggcttggtttcttggctcatgacgcttcctacatcttgttgtctttcatgagctgcgtagcgcgggtcgcttcaggcgacttggggaatttcttgatgagttcctgcaagcggaccttggcggcgtccttcttcccggccttgatgaagcacatcccctgcttcaggtacgcggaagcggccttcccgctggagccatatttggagatgacctgttcgtaatccagtgcggcggccgggaagttcccaagctggtaattgcactcgccgcgccagaaccacgcgttggaaacgagcttgtgcttgccgtacgtgtccgtaaaatccgagaaggacttgagggcctgcttgtagttgcgggcgttgaacgactgcacgccgttgtcgtagagagctttggcgatgtcgccctgagcctgcgtctgcggggcggcctgctgcggggcgggagcggccacctgcggctgcatgacgggcgcggcgggcacgggggccgcggcggtggcgtcgggcatgccgggcgcagcgccgggagcgcccggaacggcggccacgggcagttccatgccgaactgcgtggcgatggcctgcaacgcggcctcatggttgttcacgcgctgggcgagaccgggaaggccgccagcggcggccgtcgcattgttgaagtcgtcgatctgccctttcacggcgctcatttcctgacgcagggactgaacctgcgcccatgtgtcggcctgtgctggctgcacgccggaaagctggctattcagaaggcggatctgttgctcctgctggttcagacgcatctgcatggcgtctatctggccattggcacagccggtcagaacgagcgaacccaaaagcagggggaagatatacggctttttcattgtattaccctgaaatgaaggatttggataataaagatacgccctttgcggggagaactcaagtcagtgagcacgccgccagccaaacagcacataggccacgccgccgaggacgggaacaaacacgcacgcgaccatccacagcacccgctcgagcggcgtttcaaaggtatggttgaaggcgtgccagatgccccacaaattcagcaacgcaggcagaaacagcagcgcgatctgccaccattcaagcgaaaacagactcacgaagccctcccggacggacctttcagccacatgctgaggcaaacgagcagcgcgccgcaacagatggcgatgtccgccacgttgaacgcgggccaatgccactggccgacatagaaatccagaaaatccacaacggcacggaaccagatgcggtccacaaggttgcccacggctccgccgagcaccatgccaagcccccagaacagcagcttttcgccgcgctgcgccgagcgcgcgagcatgaaaatcacgcccgccgaaaccagcgtagccgcgaagaacagccaaaactgccattcgatgtccgaccggttgaggaacccgaacgcggccccgcgattgcggatattcaccaaatcaaagaagccggggatgaccgtcaccgccccataatagggcagtgacgccatcacccacaacttggtcagctggtcgagcacaagcgcgccgacgccgacgcccaaaacaactctataacgagtatccttacccggctctgccactatgcaagttccttcataacggcggcgcagcgggggcacagcgtcgggtgttcgggatcggagccgagttcgtcactgtagatccagcagcgctcgcatttctcgccaacggccttggccacgctcacggccagcttgccgcattcggcaatgtcggcctgagcgagatcggcgggcgcgtcggccagcggagccagatggagctgggacacgatgcacacggcgcgcaggtccgtgccgatgccgccgagcacttccagcagttccggcgaggcgtacagggtcacggcggtgtccagcgcgtggcccacagtcccggccttgcggagcggctcgatggcgcgggtcacttcggtacgcgcggcgagcacggcttcccaacgcttgcggtcagcatcgtccagcaggaaggcatccgcgtccatgagctggaaggcgaacacgctcttcgcgccgggatgcagcgcttcggggatgtggcggaacacttcctcagccgtgaagctcaggaccggggccatgtcctgcacgagcatcagcaggatgtggtacagcgcggtctgggcggaacggcgggcgcggctcgcgggcgcggaggaatacaggcgatccttgaggatgtccagatagaacgcggacaagtccgtggagcacaggttgtgcagcgaatggaagaccttatggaattcatagtcccggtaggcgtcctgcacgcgctggtgcgtgcgcgcggcgacgtcgagggcatagcgatccagcgggtccatatccttcacgtccacgaggtcggccttcgcgacgtccttcaggttgccgagcaggtagcggcaggtgttgcggatacggcggtaggcgtccacaaggcggttcacgatttccgccgaaatgcgcacatcctcgcggtaatccacggaagacacccacatgcggatgatttccgcgccgtgcttgctgatgatctcgtcaagctcgatgccgttgccgatggacttggacatcttgcggccttcgccgtcgaccacgtagccgtgcgtgagcaccgccttgtagggcgggacgccgcgcgtgccgatggaagcgagcagcgaggaatggaaccagccgcggtgctggtccgagccttcaaggtagaggtcggcggggaagcccagttcggggcgcttttcgagcaccgccgcgaagctggtcccggagtcgaaccatacgtcgaggatgtcggattcgcgcttccagcgctggccgccgcacttggggcacttcaacccttcgggcacgatgtccttcatatcggcttcataccagtagtcgcagccggtgggatgcttggcgaaccgggcggcaatgtcgcgcatccattcgggatcgttccatgcctctccgcagtcttcgcacaacagggccagaatcggcacgccccacagacgctggcgggaaatgcaccagtcggggcgctgctcgatcatgttgtagatgcgttcctcgccccagctcggaatccattccacgtcgttgcggatggccttcaacgccttctggcgcagttcgttggcctccatgctcacgaaccactgggtcgtggcgcggaagatgacgggctttttgcagcgccagcaatgcggataggagtgcgtgatgtcggcctgccccatcaggttgccgacttccttgaccttctcaatgacattggggttggccttctgcacctgcaatccggcgaaaaactccacgctgtcgaggtattcgccgcgatcgttgagcggggaatagatgtcgatgccgtactggaggcagacttcgtagtcctcgcggccgtgtccgggagcggtatggacacagccggtaccggcatcgagcgtcacatggccgccgaggatcaacggagactcgcggtcgtagaacggatggcgggccttgacgagttcaagctgctgcccggtagcggtccccacggccttcacgccgcccatgtcccagccgcacgccttggcgacgctttcgacgagttccgtggcgagcacgtactggctgccatcatattcgaccagcgaatattcgaattcgggatgcagcgccacggccatgttgctcggcagggtccacggggtcgtggtccagatgatcacataggcgcgggacggatcggcgttctcgaagaccgtcttgagcctgtcgtcggtcagcgggaaacggacgtaaatggacggcgacttgtggtcggcatactccacttcggcctcggcaagcgccgtctggcaggagcaacaccagtagatgggcttcttgctgcggaccacattgcccttttccacgaaattcgccaactcggtagccgtggcggactcgtattcggggagcatcgtcttgtagggatgatcccagtcgccgagcacgccaaggcgcttgaattccttgcgctggatatcgatgaacttgtccgcgtactggcggcagcggcggcgtaccgcatacggcggcatttcctttttcttttcgccaagctcgtgctcaaccttcaattcgatgggcaggccgtggcagtcccagccgggcacatacacggactgctgcccctgaatgttgcgggacttgatggtgatgtccttgaggatcttgttcagggcatggccgagatgcagatggccgttggcgtagggcgggccatcgtgcagacgaaaagagccccggctgcccgaagcttccagcatggttccgtaaatattgttctcttcccaccagcgcaacatttcgggttcacgctgggtgagattggctttcatgggaaaggatgtatcgggaagattcaggctctttttgtaatcgctcatggacaggctccttatatatccacaccaaagtgtaatcgaaaaattgtgcttcaaggttgcgcggttgtcaagaaagaacgcggaggaaacgccgccctccccgcctgattgtcacaggcatgagaggatgatagagggggccgagcgtaaggagcgaaagcctttcgcaaaggcggagccctgtgcgccccgcccagccgcaggtgacgccaaggcatccccgcagcgtacccccatccctcccggaacaaaaccccgcccaaggcggaattccggaggctgccaaggctcgacaacgcggcaacgccgcattcccccggaggccatatccatgacgtttccacggccctgcctgtacgccctgcttgcggcgtgccttttgctccccggctgcgtcgccaaccagtacgccataaaaatcaacgccatcaccaacggcgacatccaagccggcatcggggacgtctattatatcatggcggtcaagggccaagaggacgatctcgtctttctggaactcaagcggaacctcgaaagcgccctgccccaagcgggcctgaaagtgaccaaaagtctcccccatgccacggcggtgcttttcgcggggtacaagagccaaacggtcgcccggcagacgaccgtttccgaacccgtctacggcgtgacgcgggtcgaaaccagaggtaccggggaatacatcaacacgttaacgggaaaaaccagcaagacatccgtttcaacccccacctacggcgttacgggctacaagaacacccaaaaggaagtggcccaaaacaagatcgttctgctgcttgccgccgattcgctcaaaacgaagaaaaaaatgtgggaaacgatcgtcacctacaccgggaactcgtttgacaaccgcaagatgctggacatgatggttatgggcgccaaggattacctcgcccaaaccacccccggcgacacatggcttgacgtcagcgaatccgacgatggcgcactcagcctcaaagaaaggaagtaagcccatgtgcacagccaagatccccccgcgcccccgcctcttcctgctggccgcccttttcctgctggcgggctgctctccccagtactccatgcgggtcatttccgaaaccgacgggcacgcctaccccaatgaccagtatacctattatatcgcctcatcgaaaaaacaaaacagcgacccgacctatcagcttctcaagcaggacgtaaaaagcaccctgtctgaagcgggcttctcgctcacgcaagaccgcaaccggggcacggcactcctttccatcgattacaccgccaaaacatccacaaagcacatcaccgtcaaaaagccgatttacggacaaaccgggaccgtcgaaaagacgcacggcacgtatgacaaggccacgggccgctataccaaaaccaccacgacgaccccaacctacgggacggtcgggtatgaggatgaaaccaaggaagtcacggagtgcgacatcttcctccatctgagcgccgccagcagcaaaacgaacaaagagctctggagcaccagcatctaccatacgcacgactccgaggatatttccggcgtgttgagcgtgatggtcaggggctgcaaagattacatcgcccgcaacacaagcggcatcatttcactgcaggtcacggcaaacgacgacggcacgttcgggattgtggaaaagcaataggcgcatccgcgaccagcggagtaccgccgtcaagaaaagggccatcagcatgacaaacgccgctgatggccctttcaggttcataaaggaaaggggcggaaacgcctccgcttccgccctcttccgatcttgttacaatggctgcacggtatcgcccgacttcacgccgaaggtcaatccctcttcggtggcgtcgatgaccacccgctgatcgtcgcgcacctgtccgccgatgatgaacttggcaagcggcgtttcgacgtgggactgcaggtaccgcttgagcggacgggccccgtagtgcggatcgtaggcggcatccccgatgaactcgtgggcggcctcggtcagttccagcgcgatcttgcgctcctcaagccgcttctggagccgacgcagctggaggtcgatgatctggccgatctgctcggggagcagcggcttgaacagcaccgtctcgtccacgcggttcaggaactcgggcttaaaatgctggcgcagttcgcccatgacttccgtgtacacgtccgaggcgaacgagccgtccggattgatgccgtcgagcatcctgtacgagccgatgttcgaggtcatgatcacgatggtgttgcggaagtccaccgtacggccctggctgtcggtcagccttccgtcgtcgaggagctgcagcagggtgttgaacacgtccggatgcgccttttcgatttcgtcgaacaggatgacgctgtagggcttgcggcgcacggcttcggtcagctggccgccttcgtcgtaccccacatagccgggaggcgcaccgatgagccgcgccacggaatgcttttccatatactcgctcatgtcgaggcgcacgatgttctcttcgctgtcaaagagcgcttcggccagcgccttgcacagctccgtcttgcccacacccgtggggccgaggaaaatgaacgagccctgcggacgcgaggggtcggacagcccggcccgggtacgcagcacggcgtcggacacggcctgcacggcctcatcctgcccgatcacgcgctcatggagcttgtcaggcagatggatgagcttgtcgcgttcggactggagcagccgcgtgaccggaatgccggtccagcgggccacgatatccgccacatcgtcggggcgcacttcctgcttgagcaggcgcggcgcttcctgaccgttttcggcttcgtggagacgcttttccagctcaggcagcttcgcatacttgagttcggacgccgcctgcaaatcgccgcggcgggtcgcatcatcaatggcgaggcgcgtctgctcgatctcgcccttgagatcgcgcacaacgttgatgacgcccttctcgttttcccactggcccttgagctcggcctgcgtcatctgaaggttgcggagttcgttctccagcttctccagacgctcgcgggacgcgtcgtcggtttccttgcgcagggcctcgcgctcgatttcgagctgcatgaccttacggttggcttcgtccagttccgtgggcagcgagtcgatttcggtacggatcatggcggccgcttcgtcgatcaggtcgatggccttgtcgggaagctgacggtcggtgatgtaccggttggacagcaccaccgcctccacaatggaggagtcgctgatgcgcacgccgtggtgcacctcaaaccgctccttcaagccgcgcaggatggaaatggtgtcctccacggagggctcctccaccagcacggtctggaaacgccgttccagcgccgggtccttttcgatgtacttgcggtactcgtcaagggtcgtcgcgccgatgcagtgcaactcgccgcgagccagaagaggcttcaacaggttgcccgcgtccatcgcgccgtcggtcttgcccgcgcccacgatggtgtgcagctcgtcgatgaacaggataatctgcccttcggatttctgcacttcggacagcacggccttgagccgttcctcaaattcgccgcggtacttggcgcccgcgatgagcgcgcccatgtccagcgcaaaaatggtcttgttcttgagcccttccgggacgtcgcccttgacgatacggtaggcgaggccctccgcgatggcggtcttgcccacgcccgcctcaccgatgagcacgggattgttcttcgtgcggcgcgacaggatgcggatgacgcggcggatttccgcgtcacgaccgatcaccgggtcgagcttgcccttgctggcggcttcgacgaggttgcgcccgtacttgctgagcgcctcatagctctcttcagggttggcggaggtcacgcggtgcgggccgcggacagccatcatcgtctcggtgaacttatcggcggacaagccggcatccgccgcgacctggccaagccctgtggaggcgggttcgcgcagcagttcggcaaaaatatgctccacgctgacgtactcgtcacgcagacgcttggcgagggcctcggcgttggcgatagccttggcgacccgctgcgaaatcgtgatcgtgcccatttccgcgcccggcccgcgcacggaaggacgcttcttcagaaccgcctccagcgccgtgaccagcgccttgggggcgacgccgacgcgctccagaacgcgggggacaaagccgtcttcctgattcaccagagcgagcgccaaatgctcggcgtccacttcctgatgaccgtactgagcggcaagcccctgcgccgtggtcagcgcttcacgggatttttcggtaaatctgttgatatccataatggttcacctctattgcgttgtagcgcagcagcggcgcccgagacaaaatgaccgaacgcaacacaactgcaaaagtgatatcactatcgctttctctctaacaataaggcgtactaacgatctgtcaactcacgaatacgcaactctaacgttgcgatacggtccagcaggtccattactatggagccgccgagcgtgtgcagttcgaaatcgctgcacagccgctcaagcttgcggatacggtatacgtcatcctgccggaacaacaatgcggcttccgccgtgcgcgtgggtttgagccacccgatgtccatcagttcggaaaggcgatccggggtcgtcccggtcagttccaggaattcgccccagacgataagggtcgagcggctcggcacatcctttgtattctgcaaaagttccatacaatcatctcccctgacgttgtccttcaaaaacggaacgcggcgctatttttccgccgcaagggcttcccacagttcacgctgcttcggcgtgagatccttcggcgcgtcgatgccgacccgcacatacagatcgccgcgcgacttcgccgggccaaggcccttgccgcgcagacgcatcttcttcccgcttccggtcccggcgggaatggaaagctcgacgttcccgtcaagggtggggactttgaccttcgccccaagcacggcttcccacggcgcgatccgcacctcgtaggtgaggtccgtgccgtcaacatggaacaacgaatgcggcgcgaaacgtatccgcaaatacagatcgcccttcggcccgccgttgggcgaatcgtagccctgcccggcaaggcggagcttggcgccgtccttcaccccggcggggatattcactttcagggttttggtgccgtccccgccctcaagcgtaagactgcgctcgccgcccttcacggcgtcctcaagcgtgatggaaatatcggcctcgatgtcgcggccccgctggggacgggacgtatagccgctgaacgggccgccggcgctcccgccctgacggctgccgaacagggtttcgaaaaagtcgctgaacccggagccgtcaaaaccctgaccgccgaattcctgcccgttgaacgtgaagcgcgtaccgccgccgtaggggttgcccccgccgaacggattgccgccgaactgctggccctgctgccagttgggcccgagctggtcatacatcttccgcttctgctcgtctttgagaacttcgtacgcctcgtttatttccttgaacttttcctcggattccttgtttccggggttgagatccgggtggtacttgcgggcgagcttcttgaaggcttttgcgatttcatccttggaagcttcgcgccccacacccaatattttgtaataatccttatattcgacactcatactttagcctcctcatagacacgcctgtctgtgcgcgcaaggccgccctcactcttcacgcggccttaactgatcatatgtaaagcggatcccatttcagtcaagacgatgagagcccggcagggccgccctcccggccattgaaaaaaaaaggcgttgcggctaggtacaaaaggtacgggccgtttaccgaccagcaaaggagcctccccatgtcctcccgtcccacctcagcctccatgctgtccatgctcccccaacccatccagccgatccccggcgactccttcaacgaccgcatcctgctgttgcttgcggcggtcgccacgacggacgacatgctcacctatcgggagtaccagctcgtacaggaggcggcgcaggccattttcggggaacgcgccctccatgccgaactgcaagccaagctccactacgcgctcctgaacccgccgtccgatcccgccgacatcgcccgcgacatggcgaaccaggccgacgcccaaaaggtttcctccacattcgtggacaccatgctgaaggcgctctcccgcatcggggggcaggaggaacggatcgacgaaaaggcgcggtcgctcgtcaacgatatcgaatgggccttccgcaagtcccgcctcgaacgcagcgcgggccggggcatcggcctcgggctcaacgtcggggaaagcctcggcgaactctaccgcaaggcaaccaacgtcctgccttcccggaaggaaatcgcgggctggttcgcgcccgaaacaagccagttcaacgccgatatggagcgtttcgccaattcgctcgaccgcatcgcgtggacgctcgacgacatggacctgcgcgaagagctgtatattttccgcaagatgctgcgccgccagccgttcaaaatcgtcatcgtgggcgaacgcaaacgcggcaaaagctcgctcatcaacgcgatcatcggacaggagctgtccccggtgcgcgagtccacgccggaaaccgccaccgtggtggaattcaaatacgcccacgccccggactacagcgtgcggttcctcgactccagccagttcgcccggcttgaggactatctcgaaaacgagcaggacaacctgctgctcacccgcaaaatcgaacacatccgcaaaggtgtgtccgacggcacgttcatccccggcaagctgctttcgggcatcacctgctgggacgacctgtccgactacatcagccttgaggggcgtttctcaggattcgtggcccgcgtcagcgtggggctgccgctggacacgctccgggcgggcgtcgtgctcgtggacacgcccggcctcaatgataccgatcagtttcatgattatctttcctatgaggaaagccttgaggcggactgcgtcatcttcgtcatggacgcccgcgatccgggctccaattccgaactgtccctgctccgcaagctggcccgcagcggacgcacggtcagcatcatcggcgtgctgaccaacatcgaccgcctgaacagcgccgccagcctcgaagcggcccgcgaacaggcgcgcaccgtgctgcgcgaagcctgccggagctccggccatgtggaactcgccggtgtcgtggccctcaatacccggcaggccgtcgaggaacgctgccggggaggttccgccttctcggaaacgctgtccaaagtgtcgcgttccgtgtccggctgcggagagcttgagcagctccttgccctcctgcgggaaatcatggacagggatgcgggcaaggaggcataccgccacaaaatcgcggaagcctactcccggattgccgactccgcccgcgaacggctccgccagcatgtgcaggagtaccgcgaatccctgccgaaccccgaactgcccggtatgctggacgcgcacgccaaacagctttccgcctccgccctctcctcgctggagcaggcccggcaggtcgtgaacgccgccgccaaggacttggacgcgtgggacgaatccacggaaaaggcactgaaaaaattccacgaaacgctggtgctgcggctcatggacgccgtgaaccgcaaagtggcggatctcgggcatcagttcgccaaagattccgtctggaaggaattcgacgccaccgaagcccgggccatcgcccggcgcgccgtggacgagttcctcgacgaacagcgcggcatcctccacacgtgggaagacaagctccgcctcttttccgcgcgcatggacgaattttcgcaggaatgccttgcccgcctgagttccaacatcgacggcctgcaagacgatccgggcgaagtgaacggcggctcctcgacggccacgcacttcctcgtacagacgcaccggcacatgaagaaccttgcggtattcaccaccgggctcaccgtgggccgcctcaccgcgctcgggccgatctcgatacttgttaccgcaggcaacattatcgcgctggcagcggcaagcccccttgcggccgccgtgttcgcggccgtggccgggacggcgggcctgctctaccacctcgggcgcgaggacaagcgcaaggccgcattcctcgacaaacgccgccgcgaagccgaggaatacgccgagcgggtgtgcggcgccctccggcaggaacttgccgtggtccgcgaagatctgggcaaggcgtacgaattcgaggtcaaacgcggctttgcccccgccttggaaagcctgttccaccagtccgtgcacctgcgcctgttccttgacgtgatgcagaaaatccgcagcgacgtttcccgctacgacacgcatgtccagaagcaactggaacagctcggcggcgttctggaacgctgatatcacggtgccgctccagctagagcggatttccttttgaacggcatgaagtaatgcacattacagtataaaagattctgaccgtccgttttaccatccccaatcaaaaacgttccgccctccagaggcttaccatgaccatcagacaagcaacccccaaagacttcgacgccatctattcccttgtcaaaacggcattccagacagcgaaagtctccgacggcggcgaacaggatttcgtccttaaactccggaaggggagctacatccccgagctggaacttgtcgccgaagaggacggcgtactcatcggtcacatcatgctgaccggagcatccatccgtgaaaacggaggctgcttcggcacgctgctcctcgccccgctatccgtggcgctcgaatggcgcgccaagggcatcggaacggccctcatccgcgaggccctcgccaaggccgccgcactggggcattcttccgccgtgctcatcggcgatcccggctattatggccgattcggattccattccgccgcttccatctcctaccccggcgttcccggcgaatacacgctcgcctgcgagctcacgcccggtgcgttgcgcaacatttcaggagccatttcccttcccgattgctaaaccaaaaggaaaaacgccatgcttaaaccatacgcctgccttgccctgttctgttccctgctcctcccctccttcgcccatgcggacgattcggacgtgggctgcgtcaccacggagtggaaactgctcggagccaatcacaaggtctgcgtttcggccttcaacgatccggacattccgggggtggcctgttacatcagccaagccaaaaccggcggtgtttccggctcgctcgggcttgccgaagatccgtccaacttcgccatttcgtgcagccaggtcggccctatcgaaattcccgccaagctccccaaacaggccaacgtattccgtgaatcgacctcggtctttttcaaggccacccgcgtcacccgcatctgggacgccaagcgcaacacgctcgtctatctcgcggtcagccgccgcctcgtggacggctcgcccttcaacgcgatctccacggttccggtgaaacaataggaaaaaagaagaagaaatgtgggggagggaaacctttctggagaaaggtttccctcccccacaccccctcccttcccaag
